United States Patent Application Publication US 2025/0057892 A1 - sequence listing, part 2

SEQ ID NO: 1120 - DNA, 2094 bp, Toxoplasma gondii
  source 1..2094: mol_type = genomic DNA
aaggcgacgccttcctcccgaaccgcgatgattttcaagagggagaccatctgaaatcctccgctgtcggtcaggaggtttcgcccccatcccatgaagcggtgcagcccaccggcggcctccattcgctcgacgccaatgtgtctgtacaggtgaaatgtattgcccagaatgatcggcgagaacgaggccggcggcaggaccgccgcgcagttcaaggcctttgccggcgaagcctcaaaccgcgacgcctcagacgcagcggcctcctctgcagtcgaactcgcagacgcgttctgctcctcaacagaaactgcgtctgcagcggcagaaggagagagagaagacggagaaggaggagaagaagaaggaatagaggacggaggagggtgagcgggagagaagatgagaggaaacgagttccgagatcgcggtgtccggaggcattcgtgggtgaggtaggaggagcgattttctggagagacaggcgccgacgggaaggcagacgagagacaacaagcgtcctcccttcgcactttggacggttctgagacgttcagacttgcgtccctagtaatggggagttctgcaggttccttgccgactttctcggcgtccgtcacagccacggacggcgcgtccccaggaggcgaactacctgcgaatctcccgcgacagccgctgcgccgctcctcccgcagagtctcctcgtggatgagctggaggagacgcgcattcaatcccttcagcgttccgtacgtccccacaggcatgaaaatcggtgtacgtacgtcgccgtgcggcaggtggacgatgctgcaccgcgcgcggccgtctgcatgcagcagggaaaagcggagagacgcctgcagcgcctctgctcgctctctggacacagttggaggcggaggcacagagaaatccacactagaagagtgaggagaagaagaagagcgaggaggaggagaagaagaagaagaagggggtgtcatggtggagggtggagaggagggcgagaggaagaaggcagttgtagatctctggtgacgtggacagttcaggaatctgaagactcttttttctcccctcgctccgctgcgtcatttgttcctttttttcgcgttcgttccaggcgttctgcatgtcgccttgaggcttcggggctccgagaggcgcagagacgagccacagcgcgtttggaagccgagaggagaggcgtagaaactgaggaaaagttgaatgagggatcgtcctagaaggggaggaacagggaaaaggaatgaaagttttacgtggcataaaagacagaaaacggccctggagtgcggcccgcatttgaagcgcagccgcgagcgacgagacttttccgacctcgcgaaccgaagaccggaaccacgagtggagctacacccgaagttggacggcgggcgtttctgtcggcttttccgagaaagccggaaagtgcctcggagaaaaagaacctctgaacagagttcccctcaacgcgcttcagggtgctggatctccggctttcgccgccggcgctgacgcatgcagagaaggcgcgaaaaaggtagaacggtgcatgcagcttctcgccgtcagctgagaagaagaaaagaaaggtcttcatttctctcctttctcctgattgcttgcttcctgtttcttcttcttgcttcttccctcaccgcgcgtgcagggaggaggattcgccgtcttcgcctgcagacccagagactttcaacagaagaagtattcagttctggacagaaaggtgcatgcatgaaaacgttaagcaaagaactaaaatgtctgtgaacttgaatgtgcagttgcgtgtgtctttcaagcgcaggctgcgtctgaggtagctcctgcgtgatcagggatttcttgaagaaactgcgtccgttcttctgaaacgccccggtgtatgtacacccgcgggggtctcgcgcggggcttctcctccgaaagaccgtctcttggagtcctcttttggcggcgagaaacgcgagaagacagcctcggaagaagagaaagatatgaggtaaacgaggggaacctgacgcgcgaaaagaaagcgagaca

SEQ ID NO: 1121 - DNA, 2981 bp, Toxoplasma gondii
  source 1..2981: mol_type = genomic DNA
cgcatcgtatgcaggtcggtcgatgaagttctacacattctcgaacaagtccgtggatggcctcggtcttgttatttccaaactacggcagagttacgcgaccgtcgggaatctctacaaagccatacagaacgctctgagcaggagatcgggacgtttaggctggtcgttgtggaaagagctcctctacggtgcatgagctgatgttgtgtgtcttgatttgaacaacgtgtgaatgtcatctttagttggccgaatatcggcgcgtcccgtcagcacctgatggccaacaacagctgctgctgtacagtggtactttcccgtagtgtaatacaagtggaagctgtaatgttgcttgtgtgatgtaataaaatcgatttatcagagcaacgtgggtagtgaccgatcacagagattgatcttgtgatggtcaacgcaatcacagctgggaatggccatgacggagccgaaccattggaacgcttaattgcattgttgcatgtgtctgacaattgttgcagaggatacttcagattgataacatgaaacttccctgctcatcaatctgacaacttagaggatgtcagttgtcactcttgtgtttggtaattacagatccaactaagtcattccatcattaccgcgggtttacgtttataacagatctgagactgtttccacacggcgactcagaggtcgtcgtgctctctcagtggggatggtatgctgagcacgctggcttatttttttcgctagaggtggcacagcaactcatatgtatgatcgaaccagcgtagtaagttgtctcggtgcacactgaagtacttccttcttgaagaaacttcccggctaatggcagccatcgccactgctcagccgaagtcacaggtgagccgtggactttcttgccacttccgcagtacgtatcaccggctaaaaggcagtctaaattcgcaaaacgaaggaaacgatggtgagactcggtcggagtacgcgtaacttgagctgttacgcagcagactgaggaagcgcgagtgagagtatgcccaaagcgtcgtgctcaccgcgtgcgctcacagtcgtactgactcccggacgaacgagccatctagatgcgatcgattgtatattcatgtgggtctatcagtctcgctcaaaaacaatgctgacatgatgtcactcgacggaagttgcaagtaaacagcgctttctcgtatttacatcgcctctcaaacgaccgtcgaagagttttgaaacagcaccatggttcacattggaggagagacacaaatcccgaagaaaaccgaaagttgttgcactccagcatttgtaactgttacacctaccacgctgacaaacccgtccggatttctgttgtttctgtcactttccgggggaaaaagaacactacataacatcggatagctgctgctacgtacgtcggacccacggtgggaacgaacacgatcattcccagggcggttgaccgtaacaatatcttaaaccacaataaccagaacagttattcctacagcagcgcggagaaagtgtgccgaactccgtcgtcgctttggttacgcccacttagtgccagtgactcaatctgcagagtactctggagatgctcgcattcatgctaggttctgggcatgtgacgtctaatcgtggaaaagcctgaattctgaattcgggattgtggccttcaggcctgcgactctaccaaatatttagccggcagatcggaagcgcgtctctgtgaaggacacatgtgtcacgggcacttgcttatcaagcggcgtaagactcgccaggcggagagagtcaccgcttctgtttcgaattacaaacagctaataggtaagaacgtgttctatgttgttgagtctcttgagcacggtacacgatgtacaaaaggtgtgcataagaaaggcaccagcgatgccgtcgcgagtactgtgattccatctcgggaccggaggggagggggggggggggaaaccaatcatacctagcatcgtggatgcaacggtgggtagaatttcgacagcgtggatgacactttgttcgtaccgatgagttcactatatatgtttcaaagcctattgtatgtcaaggcggatggatacagacacagccagggcctttttccagctgatcgtcgcactcgccgccgagcgacgcgttaacggggtcattttgtgtggcatcggtcttgtcacacagaatttcggtcgacataggtctcgcattatcgggcattgtcccttctgatgcttgtttcttggtcaggagagtatctttttaccgcctggccgcttccctgagtttgctggttctgcaggtgcccggtgtgatgagcgcagctgcatcggctgcggcttcgttgaacaagcaccatccgtcggggtcactccgcgtgtttcgtgggagtcgctattcggtccgtctccctcgagactatggacaatttcgtcggagcagcggcaattttgtagtaggacatgtttacgtttgttgttatcgttgtttttgttccatcgagggacatcccagcgaccgcttcggcagccgctgctcgccgcttacattagcgctgctctctccgtttcctgcaatccaatcgagaggtacatcctctcggtttcactagcttgtgaacggaacatcctaccgatgaatctaatgactgatcttaaattgcatttagcaagttaatttcatcagctttgttgtcccatttccgtgttccgagcctccagtcacatctgtagggtgaacgccctgtacctgcacccgaggtttttttgtgttgatatctctaccggcagtgcatccaatagcagagacctaaaggttattcgaattgcgtatgctattaaagaatcagaggcattatgaaagtacagattttgatatgctgctgtcggtccatcatcaggtattaaagttccgtgacgcagcagtaatttaacccaccgcca

SEQ ID NO: 1122 - DNA, 3011 bp, Toxoplasma gondii
  source 1..3011: mol_type = genomic DNA
tcgcctctgtgtcgacagacctgagccatgtgagactgaaggcgatggcgccgaggtggcttgtcgccgcggggagccgggagaaagttggagggcgcctgggctgtggcgcgatgcaggcgactcgggagcctggggtcgtgctccgggcagacgcagcgaaggcgacgcggaccgctgaggctcctgaatcccgcgagcggtcccgcgaccgccgccgtcagacaggggagtcaggcgagagtgcgacagagaattttcatgcacggcgctggagaagaacagcggcggacccgcggcggttaggccagacggagacacgacgcctgaggggaagtgagaggaggaagcctctgcagaactcgcctcggaagcagtcgatttctggtcggaggggaacagaggcgcaaggcgagtcggagactcggacgtctcttgattttccattgtgcagactaaaaactactccggacctggcggaggcgacggtcgcctccggtcgaacagggggacgcggaaagagtggggaacggcggcaacaaggcgaagggacgggagtctggagggggggagggcggaaggcggagcgaaccggaaaatttggtggagaaatgatggagaaacgcggcaacagacagagccggacgagacgagggaaagaccgagtcaaccagacaatgatggccgacaaaaaaactccaacgaaaaacgctggcaacggattatggaaagaacgacggaccctttcgacaaatggcagcaaataaaaggcgggagaagccgagaaagcgcgtgttgagggatttgctgacgtagatacaaactgcagttacttgcattcgcacttgagcaaaactgctgaggtgtacgtacaccgcagcggcgacgggaaaaggtcgccacacactactgaacaagagtagctgcattcactcgtgtgggtgctctgcgatttcttggctgcgaagcagacttgcgggggccacagtatgtcgcgcctacgcaggggaggcgcatcgagcacatccgtcgtcggcgaaacttcgcgtcttccagcgatattccggcagccacaccgtccgttttcgctcgactgcaagtatgctcagcgcgtggccaaggcagaaaccgtaggcaccatgctggttcccgctcttcgaaaaacgacggggaaaagtgtgagatctggaggcgtgcggtaagccgcatgcagcttcaacattctggcgcgagacaaggtacaaacacgcggagtcgggacaaaatgtgaactgtcagcgaaaaaaacggaatggacgaaccgacagataccaagttgacggatgaagtgtctaccggatccatggacgaaaggacatctcaccaaaaccccgtgagtcgaaacatgcgcgaacccggagggacacctgtggaaaaacgaccgacaagaacgaacctcgacaagaacggcacacgtcttcgccctctcctccctggagagacacagcaaacaacagagagagaacgggaatcgcgcgaaacgaaaaaagcagtcttcgcgatcgagaacccagcaacggcggggaaaaggtgcccctggacgcaaaagcgggatggaacgccacgccacgcaaagtttccacgtcaggggtccttgaatcaaaccgggactgtttcacaggttcatctttccttcacattttcctcgactgcgttttgaagcttccccgaacttgaagctggccggttccccagaaacggggccacgacgccctgtctcggatctgtgcccgcctgccagtcgagagcgcttcctaacaagaaacggagaccgtccaacgtttgaaaaatcggaagtgcacttgcaaattgaaagttctcgagggtaagcaagctcagtttcatgggaagccacttttaaccccaaaatcaaacagtcggtacgggggtgtgccgtccacctctatgtctctcgaaatcggccgtctcgggaacggaacagcctgcaagcccaggccctccacagaataccccagaagtttcagctcatgcatttagatgctcgtataacaacacaggagaactcttatttttgttacccagcaaccagacacgcaatcgcgcgttcctaactccagagcgccgtagaagggcggcaattttgtgtcagagacgctcgaatgcacatcaccggctgcttcagatctgtcaacgctccaggcgtgacgggagcttacacttgcaaaaattttgtgctggtgcttggagaacgagcacggcccgccaaactgtgacaagggttgagacttcctgcctttccattgcgaatacgaggcttctctgctggcgtgtcttgagaagccgaactgggtgttctccacgacagttcctcccaagtagacagtcgagaggattcgacccgctgcattgagctttttctagcaatttcgaagcgttgctcgcgggtgcgcctagatatacttttgaaaccaccggtgcctttgagagtgtacgcttccttcccggcggaacatccttcttctttgaaagacgccttcctgcttctcgcggttcgtacgacctcaaagagtacccaatcccacgtgatctgtacagtataacgaggcaatagaccgaaggaagaaaaacccttgtgaccagccgcagacgcagcacaaatggaattctgccaccctcgtcttttccagttcagccgcaatcgcagggtcttgcggagaggacgtggacgaagctagtggagtccttcttcgcgctattcgtgtgggatggtgagaaactgtacataaatctgaatgagcgactttataatgttcctttcacaacaaggctcctccgaagaacggggtgaaactagacgcatgagccatccgacaactccgccgtcagggcgcttgtcgccgcgcttcgtgtaaagaacgcagaacaacaactttctttgtttcggggcaggcgtatcagcgtgaaccagtttcgagcgtccgtttccttacgtggagattcgcaatcccgcg

SEQ ID NO: 1123 - DNA, 3200 bp, Toxoplasma gondii
  source 1..3200: mol_type = genomic DNA
ggcgggatgcagggtgtttctggcacttccggtttagtcttgattcacaaaacggagtttgtcattgcaaaaaatcacaattcaaggcgcgttggtctacggatggtaggcgaagcagaatgtgcagcccctgtagccgtgtgatgtcatggacgatggctgctctgtgaggcagtcattcaagaacagggttgatcagatgtcgttgtctttctttgtcggaagcttggtaacataaaaatgtgttagtcctcttcttccgactcttcggataacttgtttcccttggcgctgctcgctcctctggagcctttcccctgtgccacatgacattgtcagacgaaacacatactggatcgatagaagcactcttacgtttcttcgttttttcttcccaaaagtgccttctgctcgggactcctcggcacggagtttcgccaggcgatcctgcatgctctctaattttgttagcagaacctctatcttctcatcttcaagctttaaatcatcttttagaaagaccatatcagctttgggctgcaacacggtgtgtctgccatagacgcttatagtgagttcgcgttttactcaccgcagccccagccgcagcgtttgaagtaacctgacgtagctcttcttgaagcttatgccttgacgctttcgtctagaagacagcgtatgcgttagtgagataattcgtgttctgaagaaggacggacttcctgtagcatcgcctccgtgtctttaatctcttcttcgagctgtgctactgtcgttcccttgattgaagccatttcggcgagttttgcagtgcggatagctcgcatttcggcagtgttcatttttcctcggcaggcgatggccctcgaaaactcgagtttctccctaggacaatggtagtgtgggtctgttgaccaatcccagcgtcggaacgggttaactcacattgcgctagtgtcgggagagagtaagacgataactggagccgtatacagaggaggtgaggctgaaagaaatgacggcgttagatagtaactggttggaagacggtgtgctctagcgcacccgctgcttccgttgttatcccttcaagagtctatggttagattataattttcaacagtgaaacctattgttggcaccctatgaacacctacttcttctgccttttcctccgggttcgccgctttctctggttgcggagggttgatcaccgtcgacacgtactccactccctattagagtcaaatggtgaaaaaaactgcattattcaactcccactgagtgcgtcggaccttcctctcatttgctccagttgccttattcaagtcctagatgcttggcgtgtggaacggcttgactattggatgttttaaatgactaacgttgactgcttcttccagcttcgaacccagggattcagctgagttgccgtgtcaagccgtgaaccattattcattttcgcatgtctccgcttaccctccttcagtttctcagtcgcctgattctgaacggctgcctgtggtggggtattatgaggcatcagtgagtgactcaaaagataacactccttacaatatcttgcaagttgactggagcaggcgttggcgtgggctgtgcgccggcgataaccggcgccgggtatgggacagcaggagcagccatgactgccccctctactgctggtggcggaagcggtccctcggcagcaccatctgtgtgtgtgagcacagttttctcataaatatacacgatcgaccaccgaacgctgccgtaccttgctgctgaaggaaacgggagccggctaagttaggagatgctgctttgccccgaacgtgcttccccagcgcatggacggctttatgatgacgcgcatatgccgcagtcataaccaaggaaaaaacaataataagcgaaggcaattttatcaacattttgctttgcgttggccgtttgtgcagtatagagagttaaattcgtgacaataagctttctgcagcagcggcgcctgcaccaccacctcacctggtgtccctacagccgcgagtgcgcagaaaggctgctgaaaaaggcaggcaagccactgattggtcaactgccagtagcatggaaagcgttctccggagagcacaagatataacgaactgctgcgccagttacgcatggttagctgtgaagcttgtgaagagacaccacgcgcaaagcgctgctactgacatacgtttgcatcatggaagagattcgccgttcaaatactgcaggctgtcagttgatgcggagacgcagacatctacctattcaacaaaaggactgtctccaacgtctcaccaatcgctcagtcaacaggcccggaacagcttcattaactttccaggctgctgataccgatcaatttttactccaacgcactgtgaatacttgaagctcagttctgtgtattacatttctttaccattgcagtgtgttggaaatcgttttgacattgcctaccttaatgagggggggggagagcgtccgccaccatcactatggacgtcatctaagcatacataagcgatacttctgccaacgatacctcaaaatgtggaagcgtacgaaccccgtcctcatctgttcacagaatttcttagcaattaatatttgtgtttcgagctaagtttgtttttgacgtaaactgcacatgctctggtagcaatgggcagcgctgtcccgttctgcgaacttcgaatgcaggcatgcatgcatgcatgcgtatggaaagcatttgaggtcgttgagccagcccatgtggggggaggaaacgaacttccataaattcgtcctggggcaatatcatttggtactgtattcattgatgactcagaaattggaagactcaagtgatttgtgctgtgctgcgaggcacgctgtggcctccggtgttctggccagaacctattctatcagagcgaggtatggattctgcgtcaacggtcgcattggctgaacgttatgttcaaagagacaatcaacggccagttatagactgtctcttcgctactggatgcagcagacagcaacgaacctgggttgcacttacaagcgggtcaagttcgaaacggctcgcagcgcttgctgaaacgaggcagcagcaggaaaggaatctatcaattgtgagcctgtcgtcgccgctagaagaacgtctgatacgacgcctgcga

SEQ ID NO: 1124 - DNA, 3507 bp, Toxoplasma gondii
  source 1..3507: mol_type = genomic DNA
ataactagcctttgtagcggaggcttgtgaatcaggtgctctttgacactttgctggactgctggcctcacatcggccgtctcgcgtgtctggaagcagtcttcgttgtcggctttcaagctggtcggtgtttttcgtgtaacagttttcttgtcatgacagcaattcgacaagggaagccttgccgccttggtcagccaaactagtatatggaaggggtcatgtgtagctttcagcgcgatcagcctccggagccaattctaaatgacaccaggtggcagaatagaatgtctgctatcggaagcaagccatctttttctagcacgatacaggcttttgcacgagaccaccctcttttgtggcgccgatacgagcgcccgcagcgctatgtttattcttaacttcaccccactgtttcttagtgcagagggtagggacgtcattggacaatttccagggactaggagctccaactgagcattctttaaatgcgttttctttgtgcagccgtgctgaaagagagacggtcgtactctacaaatgatgctctgccgcacaatgacctctctcaattctcctctcagctatctgtcatcagtattcccaatgagcgtcagccatcatgagctgcacatggtcatcatgcaccatgaaaaaaggcatcgaatgctcagagatgttcatatggttcactaccatcgtgtacggccactggcagacgacctgcggatgtttcaagcggctatccagccaagggactcaaacattcgcttttcgcagtaccgccatgccgtcctgtttctactgtgaatggcgtgtcacagccatacgggcgattaactacgaaatgactaaaggcaggattgggttactccccaagtgccccattataccggacgatctgagtggctatttcacagtcggggcagaaacgactatcaacgtaatcattctgagggaagttggtttcgtacagcagctactcgctagcaggcgctgccaaaggacgaagaatagatgtgaagactccagcagactgccacgagtaacctgacaacagactttttgtccacgagattgcgattcgcctgaactcgggtttgatcctctttccgttgtgtgtatgttctggcgaatatcgtgggtaacctacagcctccgggggatggttcgagcttcccacgcatgtgagtagtgggaatggtaacatacaaataagttttcttttgtttcaaattttagaaacactggtccaacacgataaacttcatgccatccgtgtgtcttaggcgtggctagtcagctcaagtacacacgagctgggccagtagctgagtggaaaccaaatagtcgtcacacagagtgatagctctcggtccgccaaaacgctaccaggctttttctcgatgcagaacacatgcattcatcaggtaggtgcacgcaacttccccgttcagctggccactgtttctgtcttcctctcgccggagtggcaacgacggtaacgaaagcatagagcgaattcgcaatttcgattcaacttggcggtcgcgatgctgagcgccctgctgctgagcgcctacttgcttctcccggcgggagaaagcagtgctgaatctaggacattctctgtctcccgtcgaatggatgggcattccccgaaagaagggaactcaaggagtgtggacaccggtgtagaaatgatggaacacacaagagggcatgtcccgtccacggacatcaagacctagcgcatcgagcgcttcttcgaccgacgctcttcatcgacaagtttaatacgtcacctgcgaagccagcgtgagaagagaggtgaccaaggttcccttcagagtctgccaaagaacccgaacaaacctttctaatatgatgcgactccagtttcttcaaatttacgtttttgctaaagcaaaccacgataaaacacagttccttttgaaagcaacatggccagatggcgttccgatggtgcgtctgaagcggcgaagagttccatttttcgggacggagcacacaaggaatcgcaaatgttccctctccacatgagtgtcaggagctcgggttcatctgaaattcacactacgtggctgtgaagagttgacatctctcgaatatttttcgtctccgcgctaaagactccaactgaagtaacgctgtcgcacgtgaaccggacactatcgtcgtttgccgccctgacgcacggggatctcctcaaagaaacttctcacgagtcattctcacgttctcaatcagggtaaggacgccaaacactctatctgagtgttttgaactcctgcaagttgcaaccgtgcgtgaacgagaatggacaaaattatataactaccttcaagcgtggggaaacagaggaccgccatcccacagcagtgaacaaagatgctttattgcggcacttgaaaggcttgtttgcggaagtgctggatcagtgcgtggattcaaacatcccctctcagcggtgttacacgattcgcagactcgatacatcttacgactttgccctcaaggctgtcacaaatgttgagttcatatccgtttcgaaagttgcagagaacttggtgcagtcaagatcaagagccactgccagcgctgttccgggagtctttagtccgagcgacttggaacctggtagcattaattcacacactctactacttatgttgcccttgaccaccgcgcggctgctgtactgcgtgtttccgcgagaaattactgtctttggttgaaacggcagaactcccggccactccctcggaagatcgagcccttcagctgttttactacctatgtgccatctacgcacaccgcccagaaactgcctcgcacagtcgcgactttgtttcgcgttccatgaggctcgacaactcaggaaagactctttccgtagacgtgttcgtcaatgaaaggaattctatggcggcagactatcactataaagccgtaaactgcgtccgagttcacctgtactgcgatgacaggtgcgaagcagaagccgagcgagagacccttgagcgttcactcttcgagtccgacgcagcgctttttggcgacgaatcctgcctgattcctttgatgagttgtggctgcgttgcgcagcaatgtgcactcgaaaaatccgcgtggacacgagaacgccgcaacattccaggataaaaaaaattcaggactcgtactggcggttgtacgagtccgcaagacacagaaaggcagctagccagtgggcaggtcggcgccgttcacgcgctgggccccgacgaccagactgtcggatcccccgcgaagtcgcctgaacgttactttttcgtttttttgcgttttttgaatccgtttttcccagggaccctgaagtctctgggtcgttggaaactcggcgttctgttcgagaaagagctgaacagaccaaagtgacccgcaagacacagcggagactgaccttttgtgtccccttcgatcgcgcctttccccttgacacaa

SEQ ID NO: 1125 - DNA, 3911 bp, Toxoplasma gondii
  source 1..3911: mol_type = genomic DNA
ttgcagcagacacccagaacgcgcagaagacctgcgtcttcttcttcctcttcctctgcaccggagtctacgaagtaaccaccttcggcgcctgttccccgcgccccctgactgtcgccctcgcctttcctctccatccccagaccccacactgccggagacgcaggcgccgtccccgctccgcagcgcccacccaaggcatttcctccggactctcccgcgccgccggggtcctgtgagggaactccgctggcgcaacctggccctccaggccccttgtcgccccggcgctcctcgaattccaacggaaggccctcaagccccttgttgtgcctgcccgagggcccaggaagtgtctcctctcgcgcgggagctggggcgtccgcgctgggcgactcggaacgctctgggcctcgctgaaaccgcttcttccgccggagacgctcttgcgcctgcaaggtccgtcgccgctgtctctccgcctcttcttcgtcgtcacagccgggctcgttgggctgacctgcgccgcggcctggaggagtccgagaagaaaaacgaaaagggaaggctccttctccccctccggaggaggagagtggagcgcgcgaggccccagcgacatgcgctccgggctcgtccaccgaagggcgaggagacacggtcggggcgtcagagtctccgacagacccttccgcccctagagtggagccccagccgccgtcgtcctcgtcgaagtcgagctcgggcgccgccgcccacttgagggcgttggagatgaacagagaccatttgaggctctcgttttcgaccgcaactgccgtcattacatcgtgacctacttggccgctgctgggcgtcgcagggcaagcggggccgatcccgaggcggcctgcgtcgcggcgcccggcattctgacccgggggtctgcggctttctcggaagccttcgtccctgtctccgtggggtgcatctgcgccttgaggggcgactctccccttcagcgcgcccaaaatgccgcccaagccgtctccaggccccgcgcccggcgctcccggagccggccgcctcgaagactggcccccgggtcccggaggatctgtctctctgtctcctcgcgggcccatgctcggggcgccgggcccctccaaggcgtccacctggctgcccagtctcgcaccctttggagcccgactgaccccacccttcccaggatatcctgcttgggctccagcgccccctgcgggccccgccgggccaccgccccgactcgtctccgccgctgcctccgcggcgagggccgcggtcgcggcgacggcggcgactgcgaggctccggctttgttggggagtcacaggcacaaggcccgttgtggggacgtagccgtgctgaacgaactgtccgcctccaaagcctgccccgaaattggaggcggagacagcgcccggaaacggatgaaacgcgggtcccctcgcgggggcgagggcgatgccggctaggcgaggaggcgcaggcccgaggggcgacagagacgcggcgagcgcagccgtggcgccgaaggctccagcgggcgaaggcccagacggggcggtggggcccgacggggaccccagcgagacctgtaggccaacatgcgaagaagcctcagaacgtgcgccggctgcgaaggcttggtagggggcagcaaagcccccagcgtggctgtacgggcctccggggcccgtggggcctccagcgagagacagtgaggccccgagaaagttccctgaaggcgccagaggcaccgccagcggctcctctcggggggcgccgtacccctgagagaaagacatctgggagcatccacgcgcctcgccgcctcgcgcgctcgcgagaaggccggaagagacaagagcgaagccccaaggcgtccttctgtctcctccggggcgcggcaggtcctcgaccggcggggcggcggtgacgaaacctcaggaggcaccagcaaacgacaccctgcggggttcctctttttgcagagaaaagatctcgactctcccggattcgccgagcttctttgttctcgagttcgctttcaggcgaggtaccctctcacacacagaataaacaagtgattcagacggcgcgcttgggcgtcggtctacctcgaggcctctgccgccctttgtgtgctctctcttcgcctcctcttgctctctctttctcttttcagggtgcctcacctccccggcgtcttgttgaggcggcctcgcaagccccgctcgtcccttctgctctccgttcataagccggagggcccaggacgagtgcagcaaggagagactccggcgcggcgacagacgccgagaaagaagacagaggacatcgaagaagagagcatgtgagaggagccagggaaggcaagcgcgagaaaaggaaacaagggtggcgacggaagcgggagagacaagtgaagagaaggcccactaccagaagacgccgccgcgtagcagaagacagacgaggaacgagaaaggacgagtgtatgcagaagaagagacgggctcaaggagaagaagaaagagacctcgggagagggaagaaaccgacgaagaaaagagaacagacatctggaaaagaaacgcgtttctagacagaagagaggggaatgcgcgtagcaattaacatgaaccagagcagagaagggaagaagcaaaggactggagacgtgatgaaaaagacttctctctgccgatggaagaaaacgaaagaaacaaggaaggttggggaaacgaccgacgaaaaagaggcaccgggacggggccgaaacagcgagagggcgcgagcgactccagaggagaagccaagagaggagagaggaacgacaaaaaaggggggagagaaggagaagaaggaaagaaaagaagagagcaaaggagaaaatggttgaggggggggagcgggagaggaaagtgcgtggcagatgtcttttctttcgttttccttgaacggtttttcaccgtcctcaaactctctcttccagtgtccccagacaaagaaggtccgtggagaggctcaagcaaaagaggccgactggtagaagctcgcgattccggatggctgccgaggctgacgtagagaagtctctcgctggagaaggcttcttcaaattttctttcatcggagaaaagcgtccgcgttgccgaaatccggcaccagcgagctgtgtgtcgcactcgctgttcccggctctcgaactcctctcgactctcccgctgcatgcgagcggcgttcctctgctgcgcttcttctgcctcttctctcgcttctcttctttttcagcctctttcacatttgtcttctcctcctcgagctaggtctgtcgcgtcgttatgcctgcctgagaggcgctgtgtgtctctgcctttccagcgggggagagagtgcagatcgcgcttgtacgccgggaaagaattcgagagagcatctctcaccgaaggcctcggcgctctcttccacttctttccgatctctcggaaaacgaaagcgacccacaaagcagactcctcactctccttctgcgcttgcttcttctcgctcttcttctcccgctctcctcctctcgatcttcgcctctctttcttcttctgccgattttttctcgcgaacttctctctcgactttctcccctcgactttctcccctcgactttctctccggcggcgacgcttttcgttgccggccctctccgtgttttctcgcactgtcgcccctccgtgactttttctctctcgagttcgacttcgtttctgtctcctcttcttttagtagtggcgagggaagcacggcgactgtcctcgcatgggagctaaaggctgaggagacattcacctcagtcacgccatttcctcttctcttctctctgatctccaaca

SEQ ID NO: 1126 - DNA, 4806 bp, Toxoplasma gondii
  source 1..4806: mol_type = genomic DNA
ggaatcaagggatcaacagacgtgggagataataatttgtgtaccacggcagcaaagcatttttaggaaatacagagtctttgtgatggggaacatgcagttctttctcagctcgacttactatggctaatacgctccaaactgctgagctgcgaacatgccgtgacttgcattctcacgcccgactgatacacaaaaagcttcgtgcggcggctatcatacgctcagaagtgagtcatctcagtgtttgctaacacaaagacacttccacgttcctgggtggtcccaaccttgaatatggcctgttttacaaattctccaggcgacactgtgtaggatgcccactgaggaaagcgtgcaaactttcaggcggattggattctcgttggcctgacgcctgtttaggaactagtggaacgctttttacgcctgtctagaaccgcagcacagggggaaagaaaggtaacgaagactgataatttttgtgagaaaaaatctctaaagagttgcttcatatgtagaactacctcttttaaatgaagaccacgacgataacagaagagcagccgttgccgccgaagctggtagccttgattaaccattcgctcaaagatgtttcaagatgactcttcgcactgccgtctgtagcctttgccagctctgcactgtgtggctagacgccaatcaactcgtgacttgataaatgctgttgttaaccgagacaggctcatgcgctcgcttggatcagacccgcggtcaatactttctccaggagttgctccacttgaatcattgatgctttcagcaacgcagcagcaaagctgtggaatccccagggcacgcggaagtcctgaacaaaagacctacactgttgcaaccgtaacggcacacatattccatagacagcacaaaacccagaagcccgcctacacacgtgagatacagacggagtctgtatggggtgtatacgcgaagacaaccctgcttgcacgcaatctcccgtttgattgctgtgacgtgcagctgtttgccggagtgtggcagcgattaaaatctgtattttacagggaaccatcaggctatcgttggcgctagagcatgcgcttgggggctgaagtccctttccacgccacggacagctgtacgactctagggaaatcgccttgattcgtatgagacaaggcactttacggagaactgtctctgtgcactggttgctgaagtgctagtcatatgcacttttttggtactgtaatgtctttttctgtgtactcgatttgaattataccgatatgaaggtcgaggaacagaaggaagaaaaattcatcaggtcgactgcatgcgtgtggcgggtgtagcaccgcggcgaaatagcggcgtggccaaaacgagcattctgtattcggtccttccttcccttttttgctggcatcattgagtggagattcgtccggcacgaagattttgagacagtttacatcaataccaaccgggctgggtggcatccaatgcattggatcttcttcgaactcagcttttcaaggcctagagggtgcatccgcgttcgccggatgtcgatggtcttgtttgtgtttccatattgaccagtacatttcagggttaattctccgcatttgttcattttgtcacagatacagacctcattaccacgctgatcagcttcctccagttgacattttccgtcaccgggaatagtggctggccaggccagcggccatgtctccgaagaaatggatcagactcacacgctacggacccgcgtgatgctccactttgccttcttatcttgaaaatctgtgacgctcagcctctctgtaacggcttcatcgccgtcgtgtgtttctgcttcagtgcggaggtcactgggacctctggtgatgatgccgacacgcatttgaataaggggtttgggagctgcgctttacagccctcacgtggtgcctcaactcggactgatgaggaagttttcttttttgcctgttacagttgagcggctcttgccaagcaaggcaagcctatcccggcacagaacggcgaagttgctaccgatagcacagcccgtctccgcggatgtccgagcgccgtgcttagctggtaagttcttcagaatccgcgaacgataatccagacgtgagaattatgccgtcctcagcctttgcagtcgctctatggtctaactctctcgctcaaaagagccatggagagaatatccaacaaacaggccttgcctgtagtgctaagtatggttcataattcacccctagctggttctgcaagtgttcctttgcctgtgtcgcttctggtctggtcccttgcgtgcagcagatgcaaatcctcgacagcagttcgtgttccaccaccttcagtcgtgtgggaaagaaatgagttcctccgctttccccggaacccgggccgtgtgggggttcgactgtgttgcacctcgcacacaaggtcatgggacgactgtcgaatgcaagttcttaaggaactcgagacgctataaagttgatgcagtcttcaaggggaaaaggtcaatgttccccagcagcgggcccatgcaagactatggagtctctcattttgacaaacaaaaacgcaggacggcggattggctcgaaactgaacgccggcgcattgcggcactgccggaaccattgcggcctcttgaattcgcaagaactttgaatatgtacaaagagaaactaatagaattgtatggcgatgagtacgtgcgtagagagtgggcgacgcttgtcaagctcacacgggcaaaactgatggggacagaataggtcatgggtatttcaggatccggacccaatgtgcggcggttcaagcttcgttttcttggtggctacacgggggagggtgaactttttcagatccattttacacgtgtgcatgaagacagctgctgaccgccctctaaacgaatccccgtaggaagatgaaacgcaatcttcaccgtgctgagagaggaaccagagagagtttggctgggacgccatagcggctcctgagctacccacaaaccagctgtaaaagtggatacatcatggtgaagcgaggaagcagacctacaatgtgcagcgtggatagcgtcggttaagcaatattcctgaccgtttatgccggtacgatgagcttctgcagtgtattccagatcagattttagtgttgcaagtgaggaaatttccacgtgggatggtgatgaataacactgcatctaatatcagggaacacgcaactcttgtgcaaccgaagaaaatcgccctgttgaggactgcgggtaccattccgtaccgccactcctgatgggataaaaaatgagacgtcacgtctgtagtctctgtgttttcttctttgggacgaaacctcaagggcacgagaagcaaagagcgtgcgacgcaacgaagggggtttctttattcacactgttagaggcaaaagggtgcccacccgcattctgtgtcagcgcgttcgcttgcaccattatcatcttcatttatttctgatatgcctcccgcacgttcgtctacaccgcgataacaccacgaagggaatgcaactgtgccgtgtcatcctaaccacagtccacggactgccggagctgttgcctgtggttgaatcgttcctggtggggcagatacagcagttaagctattgtgcaggtgctacagtattttgttccgcgtacatcttcaccggagttatactgaccctccctcaccatgtgaatcagccttgtgcggggatgtgtcacacacacgaatgtttcaacaggtactcacctgtgcctctcaacacaactggctagtgcgcgcgaaagcaccacagcgcgaaagcatctgttctacagacacagcgaagaaatgcgaagtgcgtatgctctgaaaacgactcattctgaagggaacagcgaggcacaggtgccgctggtacgcctgttctaagtcgactgtacacacgaaaaaatccgccctgctcgacctacctttttgtgacaaccacgccttaggcccgcccctcagactgtcgcgtgcagtgctacgatgagtcgttctcctactcacgggaaacaaagtcgttaagtttaacattttacccgagagttcaagaacacgtagaaaacacagcttcccttaagtctctcacagacgcgtggagtggaactagcctgacttcaaagctacatcctgttttcggggccgcacgcggctgtttgacagccagcatgcgacttacgaggcacggcaattgactgtcaccggaaggagcgcgtcacactagtgaagcaccgtagaatgattgaggtttccctcgcgtcttcctctctttccgcaactttccctgtgtctctaagcacacatctttgaaggggcaacttcaggcggactaggcagctgggagcatcgtacgtcactttgtgctgacgagcatcgacgaccaccgagtcgacggacgttgattgctgctaccagaccgctctctagcaagacccgttttgagaactgttaggcagcactgagtctgtccaaaccgtggacagcgtactgcttgctttcgtatcagaatgcccagttgactctgttctttttggtggcttcccatactacgcggacttcccggttgacgtctgcttgtacgcttctctgtcccctgtgaaaaaattcagaaacgggttttggagtcagaactgtgtccacagcgtggtgagtttaccagttttcccgtccttcattgttttcgtgactagcttttcgttccgttccacagacagcgcaa

SEQ ID NO: 1127 - DNA, 2126 bp, Toxoplasma gondii
  source 1..2126: mol_type = genomic DNA
aacaaacgaacaccaacgatgtcaccaatgtaaccgagtttcttcatcagagaaacacactagttttctaaagtaacctacaagataccacagcctttatatcggtttgtttgacgatgaacacatgaagacactggaccatcctcttgacaaaaggccttggcatagcgaggtaggatgtacacgaaaaaagcagaaaagctagctgacgtcgttctttgtgagtcccaccgacacttaccgtagttgctatagttgatgtgctgcacttctttgccgacttgtaaaccgatatcgtaataaagcgaaccgccgcgaaatatattgataagctggcaccctctacaaattcctaatataggtatgccatccctgtgacaccgctgaagaagctccaactcgatagcatctcggtcctcgtcagacgtgacctcgccagggtgcatcgactgcacctcaagcttctgcacttggtccactgacgcagtgcctctgtatggatcgagtgatgggccgacatcttcgccttcaactagcaacaatccatgcatcggcatgaaaccatccagcatggcgcgggtccacggagttctaggaaccattaccggcacggcattatgaatctgcaacatctccagatgcagttcactaacatatccggtgaggcgacctttgcgcagccatcttcgagtcaccacgagaacacgcacgaagtcgtcaagtgcccgtgggatatcttgctctgccagtaattcgcccgactgtgacaacggtattttcaactggttctggtcgtcagcgatcttcgtaatgccttccccctgagaagccttggcgctgcttctggagggaatcatcgcggaaaacggaacttcctcatcactgtaaaggtcggcaagattaccagcgagtagtccggcggctgtattagatgctactgacgaagtttcatcagtatggttactggctgccgttgtggtggttagcccactgtcaccgcagctccgaaaaaaggagggtgagtccacaggagaaaaactcttatcgatggaaggtttacccgtacgcgagaattccagtgtgagagacatggctctctcgagatgttcaagcatcgagaagacactctctgaacgagaggggtcggcggccaccgtttacaacacggagaggtcacacggttgttaacgcaagaatagctgtgcaacagcaactgaagctaggaaccatgcaaacttgacgtagagtagccgactggatagcacgttctggattttggtgatcccggcgcgctgcgcgaaactgaaacagacgtgtacgtgtgacagcgtatcacactacacgctgggatgcgctggacgcacgctgccgcccccctggcgcgagcagcagttgagccgtgggaaactgtatgagctgggagaacaccgatggaagatttcagacattgggcaagtatgacaatcgatgcaaagacaaagttaagcaaacgctcaatcaaggcggcataaatgaggcaggaaaagctgggccagtccaggagtgcagctagggttccctctgctcgtatgtcgggcgatttttatagaatgaggcaaaaagcgacgcgcttctggtcagcagacacaactcggtagaatgtagcacaaacaggagctctcatctatggacgaaccaacagataaaaaaatattatgacctgccaccactagagctgatgccattttaaacttaactccatgctacagccatggcgtcgttacctcgacacggctgaacccggccgagcggcgagcactattgcagacacacaactcctgcggcccgtgcacgattgctgatgaaagacccatgatggaagtgtctcagcacattagaacgcttactgacaggtggagtataaaagtgcgggagggtactgctttacataaagtcttcggaggagagggactgaaagtgacttgcacgatctagtaacagtggggcgtggagtgtcactacaccgcagttctgcacagctaggatcaacacaagattgttccggtgccacaaatccaacgtggcgttaagcagtgcgatgtactttatagttgggtctcagtgagagacatcactggtcatagaaa

SEQ ID NO: 1128 - DNA, 2195 bp, Toxoplasma gondii
  source 1..2195: mol_type = genomic DNA
tgcagctgttgcagctggatccgaggatgttggagatcataaatgctccgtttaagtaatgggtggttggcccaagtgccacagagaaaaatgcgatttgtagaaccgtaacgaagcgactggttcacctaattcctgcgtggcaagtgactcccgtgcgggtgtctcaacgggagaatggtctcagatttcaatgttgtgctttatatcatctcgattcactgagcgtcagctcttcaatacattaaggcggccgacagttgtgccccagacccatgtataggcactcgcgcaaagggtcccgtggtcattccttcaggaaagcttgttgtgctccccataacttgtcttttcaagctattcgattctctagattccgtgtacgaacccctgaaccgggtcaactcatccgcttgattcgcatcgtctacacagaacccaatgaactacaccaatgcacgcagtctagaaaactgtccaataccttcagaaggtggtgaactcgtgctcgagatacgtaacttccccatgcattagtctggttactgggaagagattcgttagttcggcgctacgttgtagtcagaattcttggttgtctgatgaaacacaagagcgctcttgacccgcgaagtactgcgggtgagcatgtagacgcccagcacgagtgtttcattcgaacagggaattcccacgtagctccgcatgacctgacaacttcgggtgtgtgtgcattctgtatactgattgagctcacttggtaaaaccttgattctggaatgtccgtggtacacagcaatgtcctcgtggacgcgagcgagttattcgccagttcctttcttgtaattgtggaccatctgcaggtctcgaaggaagattatcactttttaaacggcatgtggcgttttcgttaggtcacatttaggtttccactcccccggtcagttgccaacagcaacggaaagcacaaaggaggaagctggtgagggacttcacgggcttttacacagcgcactatggtgcccagtcatggtatacgcttgcatccagtgttcgagcacacaaaggcgaatgtacaccctttgacaaccgaagcgactccggcgatgcctactctctaatggattgaaaattcgtgcatgcgtccactctttcgaaagcttgatggagtgcacggcgacggaagcacgcttcggtcacgcgttgttctccggcggtggtgttcgtacatcgcgttgacgcaacacaacgtgaaactgcatttgttctgagttgagagagattaatgtttcttatgggataaaagttgtgcttgtgttctcttccaaatctgttgcgttcaatctgggcaacaaggtgagcctccatgccacccacctctccgcgtttcgaagaactctacgaaccatcatcgtggcacggaggaaatggagtcacacgttaaaaacaacgctcgcgttctgcttgcccatccgacttcagtaaagcgagcaatttcgcagtcaggctgctcttctcaatgcatgcagcaaaaagtttcaccgacagatgatatcggcaaaggtgttacagaaagtagggaaatgctttttgtgcacgccgcaagcgtatctagaggaattgccgattgataggttgtaataaaggggtgacatacgaaaatggagaaccacattacacctcttccgtgccccaaacgaaggtgttcgaagcactgtatgaaatatccttcgcaggagcgttagttcacagatacttgaagattcgtttcccggaaaggtctgctctaaacactcatcgatgacacagcttgcgcactgcacgtgatttccaggcagggcaccgaatgtcttgtggtacttcgagattccgtgcaggttgcaaggttaatcatcgtaagctctcgcttttacccaatacaaagaaatgcggaacttatctgcctttgtagctcctgggggagtccaggctcatggcttgccctatagatgcaaacacaattctgatggcgcatgtgaagtgcggtgcttccacctcgatggcagaaaaggtggtgacaacgatgaagaagtcattttccgttgacctgtccacgttagtatgtcggacgttgtcgtgctagtagtatgaatgcgacattttgttcccgaaggtgtctcttgcccatccaggaagtgtcacgggaaacatcgtca

SEQ ID NO: 1129 - DNA, 1909 bp, Toxoplasma gondii
  source 1..1909: mol_type = genomic DNA
gagtgtttcctgctcgtttcctgtgaccggttgctctgcatacaagcgtcggagcgcctaactcaacaagttgtgtcagcggagccgccggtgggcgtggcgagatacctgcatccgaacaagctacggtgcgtccggatttgtttgtttgtggatgactatgtgttggcaaaagtgaggggtgatctcagtgacaccagacaatatgtttagaacagcagtagaaacatttgccttgtgggctaggacgcccgatttcggtcctagagccaaaatggtctggcgggatcgttctagaattcccatgagcaacaaaggcgaccgtcactgcctcatctgatctggccgcacgaaactgtcggctttgcacttttaacaacttcatgcgctcagctggatggtaataaagaggagaacagaacgaagataggaaatgatgagatgtaaaccaagggatgaaaactgcgggcatccttacttaacatctggctcaactgcgaagagacgttttccatggaagaacaccctcgaccgtagatggcgtttggttggtctaagcacgacaacccttgggcaagggcgtcgttttcttatggaccaaagacagtttggcaaccaattgaattgatttcttcagtgttaccccccggagtcagcgagtaaccaggcttgttcctgggcaagctctagctacaaagacatgttccatatttccttgtgcaggtctcctcggagccgcctcacagcgtccgttcactggatgacacgcactaacaaaccaccggctttacaaagttttatggtgatctgttgatccactcgggttcgccggcctccgcttggattgccgtaacgtaaagaaagccgcaagaatacttgacggtagcactcaaggtacacttcgcagcatggcatttgttctgcgttgtagctagcctgtatctctcctgcatctaaatagagaaggttctcccaaacgggaatacgtgtggaagttcccgctggtgttacagtgctcaaatgtctgtgtgccactcccatcagtacgaatccttaaagcatgcgtaatagtaggccagagtgtgttgcgatctgtataatgagaaccgcaatttcagaaaaatctacattcggcaaaagactgtggcacttcgtaagggtgttcctatttaaaacagcggctcagtttgacccgcgagatcatcgccataaacgcgcgttacaatatgagcagcctagcgggacatacctgatttcacgcgggaaccccgcagtggtcgtcgcttttcttccacgttcgaacccgcgagtatcgcaaggagttagccaaccaaacaggcgagaaagttccctccccatgctgcttccgaatcagagcgtgtctcaagcagagaaacaggcgggcatttgtctttatcttgtgtttacatgacgcttggaagtggcttcgtagctctctcgttataaatgtctggacaggcacctgtttggggctccagcggtacctttccagtggccacctctcgctttgcaccgttgaccgtgaacgcgtcgatgtgctacggcggcttggtggggcttgttgggcaagtctaccaaaatgttttctcgtgaatcttgttctttttctttttttgagacgaggaaggagacaacgaacaactctgctcattcgtgtcccctgtcacatttttcgatggttttttgcctttccttattgtccagctgtcttacagaatgagtgtgctcgccgcgtgcctagatcgtgtctggcttgttcagtagctatcttctcgcgtctggtctcccctcgactcgtacttttcccggttttcttgcactgtcgactgttcccttgcttccgcttcaccgtctcaacctcccgtctcgtggcgattctcttctgaaa

SEQ ID NO: 1130 - DNA, 2599 bp, Toxoplasma gondii
  source 1..2599: mol_type = genomic DNA
tattgtaggagggaaactgtagatggaggaaaagctcagatatcaaccatctttccttgtggagtggtgttaacagtagctggcccggtgtacacaagtcccaattttttgttccactaccgagttacaaactgattttccagatattcaggaaagtacccgaagggcaaataaccagaggtacgctaagaaggtcccccaagtgagaggcaaaagagagaaactgcatgcataaaaaatgcactagagactgaccctgagccggaagcgacgagcgagactcgaccgacagaagagaagtaggctgttctcggggagaagagaaggaaccgggagaaggtcgatgggcgcagggcttcagaccagggagagggttaacagtggaggaagcggcggaaacagaccgaggttgccaaggtaggtgaggaagggatgttaagcgacgaggacggctctcgaatgcgagagaacgcgttccgtccctcagagggaagagagccagtgggcgaaacagctgctgggacaaggaacgaggaaaagacgtcctggttgccatcgttcggatgggggcaaggatcacacacacgggccgacggaagcgaggacagaaaagaatgcgtggaagaaaggagaagaaaacggttaggagaaaggaaaacaaagacggaaacagaaggtgatgagaatcgtccgcttcttgtcacccggaaatggacggagtcaaacaggtgagacgtgggattacgagaggccttccagtggcgcagatgccgtcgaagaagtacaacagaagacgagaaaaaagagacactaaggaacaactacagatttgctgcgcggcaaactgttgtgttgagtaggatggcaatgacgtctccacacgtcaaagaggccgaacgcgtgggcgtaccgagcctgcgtccgcatgcattccttttcgcctatgtatggatgcgtaagtgcgaatgcgactgccgaaaaagttaatgtgcaacgaaggcgctccgcagcactgccaagagacagaagaaaccgcgtctcgggaccgcggttgagagtcgatactccagcgacggtgaaacataggatgcggcaccagctgcgcgtcccccatgtagaggaacttcatatccgcctagacgaaagcttcttgttggtgaaaaatatgccaggctctcggaaggagcaggcgggtcccacgttgtagcctcgtcttcgatgccgcgtactacgctgtgtcttcgattccttttgcccagaaagctgcatgcgcatgcagatttcgtttgccgccttctccactggcattttcgcttcgctgtggacgaagctctacacaagacacaaactgaggctcgttgacagatcgcctgcaactgccctgtacggggggaaacgcccgcgaaccaccgaaaatctcgacgggaaagacgcggcgacgatgcggtagcaccttcgcttctcaccgaggaatctgggcagactttggctgaggtagcaaatcgcgtgacgtgctctgtgtagggctgcagagggaaagccaagtgacacagagttgcccgttcctcgtcgtcgaagttgacaagcgaaattcgactcgcattacggtgtctagaagcctcaggcgttctggaggcgcgctttcgcgtggagtggaattcttcaaatgcttgactccacggggtatctgcgccttgcatctggcctggctgcccggcgacttccgggcatggtgggcgcgagagggaccattctcggtcaagctcgcgagaggactgaattcttttaccgtcatcttcggctgtcttcacacttgtcgaagcaacacattgagcacacgacggcaagctttcagatgtggacccgtccgtaggagagcgaggttaccaacgggaagcagaatatgagatgggggggccgcgcgctccggcagctgcgtaatgccatgaatggggttaccgcaagacacaccctccagaacaggccgccgttccttcctgtccgtttcaccggactcttttttccatttgccatcggtcgttttctggatttttcctcgtttcttctctccggttcccgcttcaaacggacactgcgttttcaccggtgccaagagcgctcgtctgagctccagggcaacggacgacgccagcagatttttcgccagcgacgtgcgagtgtgttgccgcccaccgcggtttttctccacattttgaagaagcagcgaacaagcgaagcgcctcaggggaatttgagtttgcgttttctgcgatttctccgcgattcgaatcagagcgcgcatgctcgagttgtccgagctctgtactccggcccatccctcgagtcaaaatgcgacagttcgaccagggaaattcacgaagaatatgagacaagtgggcgcctcgcaaattctttgtccttcatgcgttttacccgcactgccactcaacgccctgtcctccggagctatgaagtgtctggccagaagccccgtgaagcgcgcgagaaaggcgacttcctcactgtctgctggttggtcgtttcttcggcggcttccacctttagcttgcaacccgctcgccaaaaacagacagcccta

SEQ ID NO: 1131 - DNA, 849 bp, Toxoplasma gondii
  source 1..849: mol_type = genomic DNA
acggtgttgacacaggatttagctagcgagcgatggtggaccgtcccggggaaaacacgtacggtcggttccgcatgtcgagagtccgtctgttctttttgagaattgggccatcatctttcatttaaaactgtgtaaggaagcacaaaaagcacagaactactccgcgcaggcgcacaaaaccgtcaggatgtgccaccggatgcggaacagagaaaaggggagaaaaagagacgacgaagacacatgctttggcccttttgagagcttcagggagcatacctgttgaacggcgaactggcgtcgaactttgtccgctttgacaagccgtctaaggagatggatcagccaaagaagaagcaggatgccggcaaggacgcagagagtgttgtgcaagcctggtgagatttccgaggccgctagcagagagcgatgcgacacaacaggcgccctgacgctgtcgtgccatatcggttctcttcgcttcccttcgtcgaccaaagagaaagaagaaagtagtgaggctgagaaagccgcgtctgccatcttggagaccacacgcgacggaagaagacggagtggacctgtacttatttcctgttctttccagcaattatcgttttccctgaatctcatgcagttcccttctccaacgacgcctttttcttctccttcttcctttctgccatccgcccaacctctctcgccgcccctcctacttcttcctctgccctgacgtgtgacttcctccttgatttgtctgttggaagcaaggaccgaagcgggagagacgaaaaggagatccacaactttacgagacaggaaaggaaatcgaaaacagaggggaaa

SEQ ID NO: 1132 - DNA, 2894 bp, Toxoplasma gondii
  source 1..2894: mol_type = genomic DNA
gtttctccggacgctctccgcgtacttcgtttctcgttcatcagagtcgacctccttctcgccatccgtcggccctctcgctgcggctctcggggaagtgcaggcctcctctccatcccccccctctccatctcggctcgagcgccatggagccgaacactccccattccgtcggccgtcagaagacgctgaggaccgcggcgcagagatctcgaccccagaggcaagagaggcttcacacgagccaggcgttgacgtcgagggagaggtgagagacctcaggttctccgtcgagctctcgcgcgctttcgaggctgccgtcttctcttggtggcgctgcagagcctggcggaagatggtggagactctgcaggggtcgaagctcgcgagttgggcagcaaaggcattcgccgccgagggaggaagttgagagagacagtcgacaacgtgaccttgctgagctgaggtgtaccgctgccgaagagtcgctaaagacaaagggaggtcaggtgcacggtgggaggcgaggttcgaggaaaggcgcccctcgctctcctcgactgggagagacgaacactgatctccgcgctgaagcaacatcttgagcgacagcgtggaggtcggaccgcgaaaaaagagacggcgaacagaggagaacgctttgagcgacgaaagggaacaggtgaagagcgagggcaaggaaggagacgccaggaacggtcagaacgctgaatcagaagaggcgaatgtgagagaagagcgaggaggagaactgaaaacgaggagacagacagggatgcagaggaaggctctggagcagaaaggcgaaaactcgagaaggaaacctttctctctcgtcgtctacttcggccgtcggaagacgaagacctgcgaagcaaacgagacagagacagagaaaaggtggggtaagcgccacgaagtgaaacggcgacagacacacacacacacatgcacatgcgcatgcaggcttcacatgaaacctactaggagtctcaggcaggagcgtggatgcaatcgaggtaaagagaaaagcgaaagagatcagaataccaaaggaaaggaacgggaaggtgaaagacctaggtgtctctgtaggctctgcagacaccgacttccgagaggagaataagagaagacctttctggcaagagcaaagacttcttctcactcggtgtgaggaacgaaagacactggagtccgtctcagataggaattcgatgcactgtatggcgtattttctggacctgtcaccttggaaatccttccgctttccggtcgtccggcagtcgctctttctcgcgttgcctgtctgtgtgtcaagcgccgcctgatgtctccactttcgaagaaggcgaagaaccaagaggagaacggagaggagagaaaagagactggggaagtcaccctccgatgttgggggtcctgggctaccgaattgagaagaaactcttcagcataggcagtgccgtctcgcctgaattacctcgcgagagcctcaatctgcagctacgccactacgccactcttgctcgctctcccttagttctgtttgtcgaattccttgtctcttggagaaaggacttcggattctcgaaaaagagttttcgtttctgccttcttcagcgagaaacggactccgcgttgagttcggtgtgtcttgcgtctgccttctgctggctttttatctcagatatcatcgcatgtcggaaagcggcagcggaaaagcatgcccgacgaggtcgagaatgagacagagttgagtctggtgcctctctggccttctcaaggcgtctgtcgactcccctcgggtcggtgtttccgttttaacgaagtctgtttttctcttgcgaacagccgcgcgcatgcacacaaaggcaggtgatcttgcacacagttgtgtcctctgtcgctccaagcctctttccatgtcgctcgaaggcgcgcaggttctggcagccattctcaccggaatttcttcttttctcgtgcctgtttgtttctttcgcgtttgcgttccttcctcgaacacacatgcactgcggcaaggtccgtcgctttcctggtgctcatgtggtgtgaaaaaaaacgaaaaaactaaggagaaagccggtttctccctcaaatccgggccatcctcccctctctcccgctgccagaagaactggcactgtcttcccgtctccttcttgcgttttcgttttttgttctctttgtcggaacaaattctttcgaagaacgcgctctcgagtttggttctccgcctttttcccagtcgcgtccccgtcggtcgcacacacagctcggcgtctcatccgcgttgtcttcctgtctcagtgtgcgtccgcttccagactccgcgacagtccattcttctctcgtttctgactgcgggctgccgtggaaaaaaggaacagacgagggagtagtgaatgttcactttcggggaacgcggacgctctcattcttcttcgcttacctctgtctgccagttgcatgtttccggcagctcacagagtcggaatcaaactctcaagagttcttcgcctctgacctgttttatttttcgcactctcctcatcctctcggaagctccaacgagaacgcaacgtctttctttgcgtgtcttccggtttttctcgtctctgtgtgcgcgtccctccccgttccaccccctcctttctctccagcctctctctgtctgcctgtttcacctgacatttcctccccctctgtctctgtcgtatttctcacggtgtttctcagcccccgccccccatcttttctgacctgtgtctccccgcgcttctctcctttctgcccgcgctcccgtctcttctgtggccttcgccagccgtctccgtctctccccacga

SEQ ID NO: 1133 - DNA, 2001 bp, Toxoplasma gondii
  source 1..2001: mol_type = genomic DNA
gtatcgattaaaaggcgaaagatacctgttgaagccttctgtcactcgggcggtaggtgagagtgtccgtggtcggagagagaggctcaaggaccgggaggtgactggaaaagtgacaagcatgcaaaatgaaactgcaatgaggaaccggggaagaaaggttcgtcgggccggggtgtgtcgcagctgcaacgcccggccgcatgtggggccagccggaaggctcaccatcgcccagatgccatttttatatgttgctcggattcacgacaagctgctgttccaggtgtcggcgggctgctgtgattatgccagggagaccggcattcgagttccttcctggagcgagaggagtagaggagagtaatggtatgtgtggaaatgggtacgctaggccacgaatttaggcacacacgccatgagaggaggcagactcaagccggtccagcgctattcccggagttgcatatgactgcaagttgcattgcgctttaggtcgtaacctggaacgccttttttttaagcctcgcaatgaaacaccacaggcaagagctgagggagtttcgtattcgcttccctggtgctgtggtctagtttgaaagcaacggacgcgctccgtcgctagcttttgtgttacgttgttgaattgctgaatgcctgagaattcttgcgggaggtggtacgacccgataaagacaaaaagtacgtctcatggcggcgttgtctagcggacgattcaacctgcagcaaggccgcagacggtcgcgtacgagcaaagaagtggaagagatctgtctgagacttacaaaaacatggacggaatgaaatgtctgcagggacaaactacgaaagccgtgtcaatgcatggaccgcaacgggtagaatctctcgcataccgatagagtctctggtcacacgtagcggacgacgagaggagaccccggtctccactcctcctggttgtcgccttgaaagaaaattcctcctcccatgagtactgtggccaagccaaccgctgcagaaatctgaaatcattgaaattcggacaccgctaacgcattcgcttccaaaacaagtagaaattttccagatagaccgtaacaacacacaatggtgtggcatgcgagctacttgctggaacactgctgaccaccgagtgcgagaggtgagctgtacatacattggaccgtggcactttattggtaaaatgcgtgcgatcactttcgttattttacgccggctggaataggaagtgtgtacggagttcactgttcttttcgacggctgccgtctctgcatgcaggtgaactgaatcgatgctagctttgccaggacatgcatgcggaaccagatgttcgagacctccctgatgtcggtcactgctgacagtccgattacgaagaattccgtcacaattcagtgctctaatgaacgcaggacggctacttagagggcatcttgtctttctgtgcatgcgggtcacattcgaatgagatctggacttccccttctcgcggccaaaggcatgctctcggtaaaagtctcgctccttgccaaccgctccaagccgtggcaacgcgtcgtcgacttggtttgcattttctgttcccttccactgtccagtttcttttgaacccttacaaagacaactgcggagcacgctggcgccgccgagcttcaactactggtggattcttggtcctctatgcacatgcgttcgaaactaccaacgcagtggccctgaaccagcatcgtccacgaggaatttgtccagattcggagttcattttctggattgatgttgcataaacggagcagggagagcaacacagcccctgttccgcgacagaaaggaccgctgcgccggcagctgcgtcgctctgctgggctggatcgagttcgggggctaggaacgacgaagaggttccaccctcgattgcttttcacagctgagcaacagacaatcctggaaaccccatctgcgtgcacacgtcggcaaca

SEQ ID NO: 1134 - DNA, 2384 bp, Toxoplasma gondii
  source 1..2384: mol_type = genomic DNA
agaaaagaaccatcaggagccgtttgcgtggaaggacacaaattgagagccgttgccaccattcacacgctacgcagttttttcctgtttggcggaaccagggagaaccgtttccggaggcgccattcgggtgtctgtacatgcacatgggatgtcaacacatgggagacggaccggagcggtggatacatagaattcgattggtgtcgaggctggaacaacatcatacacgcacgtagtttttgcttgcaagaggaaaggtaaaaaaaccaaagcccgcttctgttaacagctctggtgttaccacgacgtcgtcacgaggaagtgactcaacatcgaactccacaacgttctgccaagacgcatcccagttttccctcattatctttgtcgcctctacacgtagtgttcagctggatatctccagtaacaaacatctgaattaggctctgctgacatgaaaaagaacggtactggacttgagtcattggagcctgtcgaggcctggacgcgcagaaatcaagatcgtcttcatgtggattgaggtgaatacagcctgagttttcttctacgagaatccacagagctgcttctcggagcattcgaatgggttaaaatgttactttttccggctaaaaacaaacaaaatccttgaaggtctaaagccgtagtgggaactcggagtgcacaaccgtattaaggagcttctaaatcaacctgcctcagagattatgactctccataggatggcactgaatctgctgactgttgagtccttgttttcccgcgttgccggtacgaggaaccgcagtaatcaatatactacgcccaaaacatagcagacgtgaattaatcgtaaggccgcatgacggtgaacttcaacatctgtagttctagaacgtaaccgatacgtggacgttcttcaatgccgtggaatcttgaaatcgaacaccactatttgtggagctgcgacagagatctccgctcgtttttctgaagagcacgagacgaagcccaccgctgtcctgtctctctctgtcgctcccgtctctcttttctccccccaatgaggataagcgggactattgaaacaagaacgttgctttctactgtcaactggcaattcagaactctcaaaattgcgagaaacagtgtttaacaacaagaacttgagacagaacgtcaaattctttgcctggagacgtgctacgtttcgcgcaggtgcattctccaactctgtgcactgaaaaagagattgtgcattacatcgacgcgcgttctcggcgtttagatatacttacgaagcttcttgcgcatgtgctggcgttcaacatagctcgagaagcagcagcagccggtaaacggactgctgcagggttgttttggtcgtaaacaacgagacaaggcttccttgcgttgcgcgtttccttccattcgtttcagtttatcctccaatctcgagtcgaacaaagaagtaaagaggaagcttttccccaaaagggcgtatctacaagtctggttcaagagcacacgaagtctgcgagtgggcacagtgaaacagatgaggcgggggtttggcgcgttgaagaactcgcttgcagcttctggattttttgactacgaaccgtcctcctgttcgtcttcgctcatctttcggcgttgaagaaataccattttgcgtaaaggctccgagcatatcagtcttcttgtggcttcgggtcttcgattgtggacggtctcccgcggcggactggctcctcttctcgtgaaggtgacttttctcagccttcgcgggtgaccaaaagtgtgataggccggcgcgcgttttcccgagacgtcgtgccggccaacaccgcgactttttcttgctccttttccctattccttgcgggtgttcctcgtcacaagatcagccgaacacgagcggaaactggcttctccgtctgtcgtctcccgtctctcgcgcttctacgcggcttcatcgcgtttggcccgatggatgacccacttgacatctccaagagcgtacatctgcacatgtggatttcgacgtcctccccaagttctgcagcggccgtttgagtcacagacggcagagagctgcagacacaaatgtgcgttccggcgtatgcacactttgaattaattttttccctcgaagtccgtggcgtccagcgtccactttcgagggatctgcagccggttttggcttgcgttctttccctccttttcccgctcctctttttcgcatgaagcaagcgtcagatgccagagtgtagactgtgcagctcgtcgcgtttccaacatttccgtttttctgcgtttttttagatgccacaactccgactttgttgagacttctgccgccggcccacgagttcaga

SEQ ID NO: 1135 - DNA, 1918 bp, Toxoplasma gondii
  source 1..1918: mol_type = genomic DNA
cacagtgatgtgcagcatccgtcgacgcttctcgagaaaagaagaagaggaagctggaggagaagaagaggacgacgaagcgaacgaagaagaggaagctggaggagaagcgcgaggaggtcgagacgttgaagtgtctcctgttggtgggaaggaggcttgattcgcgtctctgcttcctggaggcctctgggacctcgagggcgcggctgtcgcgcgaaacggcgggtccttcatgaggattcggtctttgaagctccttctgctcgttttcgccttcagttcctcttgtcgagtgcctcgtccgtctctgcctctcttccttctccttctccttgtcttactccgagagagggggaggggcggtggaggaggggaggggcggtggaggaggggaggggcggtggaggaggcgaggcgcgagaagccgagcgagagaaaggcggcgacagcggagaaggctctgcctacacagaaactgacagcgcgacgcgtacgccgaggctctcgagtccaggcaattcctgcgcgagttcaggcctccaactcgttacgcggtggcgtcaggccgaggactccgcgcgcaaagcactcagaagagagcccgagaacagcgaggctgagacgcgctttgaggcgcgcgctgcgacagcagaagtctgcatagacagacgattgacgaggcagagagaaagaagaagcctcaagactcgactgcgcgagagtcccgattggacagcccgcgcgatgcagatggagaagaacggacggacggaacgccccgagaatggcgacgagagaaagacaccgaccggttgagaaagcagcgagaggagcgctcgaacgctggagaggaagccagagagaagacgagggagaacaagcctaacagacgattgacaccgtcgaggaaaaaagtcggccagggtcgtgcgaaaaacgcgcggaagcgcgacgcggcatttcgtcggcctgcaccttggagaagcaaatcccaaatccgcgcgacgcagaagaggaaaacgaaaaggaatcggattggcgaaggggataaacgatgacgaaaaacaggacgaagaaacatcgatagaaaagagtgtgcaggttccgcgcgtggtatccagctgtgcgcgactttgcgcggactgcatgccgacgcacagagtcgacagaggagtcaaagctcgtcaaggagaccttcaaatctacagagaagggggtctccgaaacctgtcttcttctgcggaacacaaataccctgaaggtttctttgccttcggtccttttcgcttccaccttttcttcgtctcgaccagaaactgtagacgacggagagacagtccccacagggcaccgcgagaagtgtctcgcgatttgacgcgaagacttttgagtaaaaaatcgaaaaaaaaatcgcaaaaaattaaataaattgtcctcgaccttgttgcttcctcgtcttttcgctcgcattatttcctgtggtctttgcgccgcgtaagtcgtttggaaactgtctgattcgtcctggggtgacaacaccgacggaggaggagaggcgctgtacaaagaactctctcgtctttccgtttcctctttactttgtttttctccaaccgtttctccgtaggtccacttgcctcttggcgctgtttgcgggtgagtcctgagaaaggactccacttcgtgtactcctctctccagtcttgcagcttccgagactcctctggaagttcctcttcccgttcttcactgctctctcctttctctgtctttcgtcttcctgtgcctctcctttctctgtctttcgtcttcctgtgtctctccttttgcgcgtcttttcgcgcggcgttcttccttgcctgtgagactcgtctttgtcttgcgccgtcaagtcttttcgccttcgccgccgaga

SEQ ID NO: 1136 - DNA, 2086 bp, Toxoplasma gondii
  source 1..2086: mol_type = genomic DNA
ccgctggtttgtgtctcgttctacgatgagacactttcagcattgttgtgggggaccaggaggtcggagagaaagtgcggtgtttagggtctggggcctttctgttcggcctggtttttgaaggcacacaactttgaacctctaagatacgctcggtgtggcctgcaaagcagaaagacatcaatgtttttctgttggcaatagtgacacagaaaacaagcgacctcacaggtactcttgggaccactcgttcagagtgtgcagttgttttcctgcgttatgtgagagagcgacgagtgaaagaggaatacagtggcctagagccgaaggggtagaaatccctaaaaggtatcggtatgatgtggtaagttgtttccaggtactttgcaaaaacgaaggaggaaagacactggctggctcactgcatttctgtatgttgggaggaaaccagcaggaacggccaggtactttctagtttcgatacgttttcctcatagcgtgaaccgttttcgtcaagtcgcatcacactgtcaccgtcaaagctaggctgcacggaaggcggacgaagagacacacctagagaaacaaatcagtgagatacgaaagtaaatgactgccggtggagacaagtaaagaccaagtatttagtcggattgggggaatatgtagtgacatggtgctttgtaaaggtggaaacgaagatagcaaactgcacagaggaaactttttcgtgggaataggttgtggaagcttgttttctgcacgaagtcgtgcaggaaatgactccgtaggttccagcgtcgtgctacctcagggtaactagaaatgtcatctggtacacatcccaggagttttagtgaacaagagagtgacggacagattctttgtgtgcagcacaacagggatgtttttgaaacttatgccaaagccctgaattgtagtggatgaaggaaacagaacgttttcatgcgtttcctttttcgtaggaatggacagtcgcagacaaaggactgtacaagagcttttgtgcattgagttatttagggaatagaaagagtgtgcagcagtgttgacttgcgaaggcgaagaaggcagatcgaggcgatagctacagcatcggtggcggaggctggtgaagggtgttgaatacgtagagtcgacatgccagtggaagaacacagagcaacacagcatgcatataagcatatacggtagacagcctagactgtcgaaaacgagaaacagagcttgtttggtgtccgaataccggcaggtaacagggaaaaagggaaaaatcaaaaacgagttgtccgtggggcaacacacacggtgattctgaggtagtaaagttgcggctgcagccccagccgtgcgcgttgccaaactttttcgttgtatgatctttatgactaagggatgtaatttccttcgccgtggggggtcttttgacttcaaggtccaaccatccagcacaccccagaaattgtaaatctcaagcagtggcattagccctcgcagccggcgattctcattcctcccaggtgtagagtgcaagatgggccaaagcgctctccgccgccgcactgtagcgaagcgctaacatcaagttgcacagcttgggggacaagcctgaccattcttgcacttggaaagcacggcgctcacgtggagtgtctcgagagcaatcaaatgtcacggtagagccgcagcgtagaagtaaaggggaggcgaggcatccatcaagagagataccattcattctgccaggggaggagggtagggagagagcgagagaactttacttgtcactacaagtggactggtgaataatctcgagatgcaaagaactgcggcgcggcgcagacgcgttttgacgtgttgatgacagaatacggttttcgcaagaagtggtcgtttccttttcgaatagaatgcgcaggcccccatgaccaaagaagagtgcctttgaggagtgctgcgttcgtttcctctattcttttttcgaacaagagcaagttcggatcacttcagcagaaatgctacagcagaagagcaacgcacgaccgtagcccttctgtcgggaaaa

SEQ ID NO: 1137 - DNA, 1740 bp, Toxoplasma gondii
  source 1..1740: mol_type = genomic DNA
caaacagagaccgatttccaaaaatgcatccctgttcgttgcgacgccctttcctctccggtccgcgggagcccccgagagatgtagacgcatgcagcggcgggagaaaagaagacatcgaggctctgggtcgactggaaaactcatcggaggaaacatgagaattcgcctctcgacacagactctcgagtgctgccagcaaatcccctggacgatgcacagctgtggcaacggaggagaacaggaccgacgaagaagaggaagaagaagaagaagagggagaagagggagaggaacggagagaagacgagaaagaagatgaagaagaagggaacggagagagaggagacagcccactccgcgcttggtccgttgttcctttttccgtgatccaagcagggcattctgcaaaggctacacactctggcgcggcatggactcgaacggcgacgccgcgagcgagagaggaaggaagaagcgcctgcgtccaccgaagtggagagagaggaagaacttccacatttctgcctgagaagcttctcaaccggactccagcgctgacctgaagagacctcaggtgcgagaagaagaggaagaagaaagaggagaagaagaaacaaatgccaaagccgtgtctccccattctgggcgaaaacagagccgcgcgcagagaagcgaacaaacgcagagactccctcacgatcaacgacgcatgcggcaaagttccgctcgtcaacagaagaagatttcaagtgttgtttttctctccgttttctgggccttcaagtcgaacgtctggaagcacaaatgaaggcgcccccatgttcaccgatattatccacctgcatacaacatgtatatgtacaagacgccaacagtctctgtgtcgacaccggcgtatgcatgcatcttgacatgtttgaactatgtaaacagacgcatacgtagaaggggagaggtgtactgttgctgtttgtgtgagttcccggctcttctgcggagcctaggcgtctctttttcatgcatgcgcagggagggcagggtgcgagagtggcggacgattgtttctcgggagcagaaagaagacagatgtggatctgttctcggaaaaaaaagtttccgttcaaggaacgacctgccttcggcgaaaggccgagtctcagacgctgagggtctctgagtcaccgctggacgcacgcgcatgcagtgaagaaaaaaagttggcaaggagagcgcagctcgagacagttctgccttctgcaactccccgtttctgtctgagtctgtcttcaaatgcttctctcatttgtgttggattccttgctttttctccgcgccggaatcttatggacaaggtcgacaagtcgaccgaactctcttgcagagaggccgcacgatggagacagcggaggcaaggggcattttggacgagtgaaaggcttttttcgtggtgagaattcgtggatttcttcttctctctctcagcctcacgcgcagagaattctgagtgtttgtacgaagcgtcttggacaacgattcgctgtgcgggtcagtgaaaaaaacccgctcccgaaaccgtccaggtttacggtttcgtcggggaaagagtgctactcttactccgctgtcgatttcttttttatatctttctctctcggtttctccttctttctcgccttgctgttgtctctgtctctgtgcatctgcttttcttcttcgcctcctctgccagggcgcgca

SEQ ID NO: 1138 - DNA, 1070 bp, Toxoplasma gondii
  source 1..1070: mol_type = genomic DNA
gaacgttatctcggacgttctgttacgaaacgctggtctcgcacggtgccaggtggcgaacgaatcgctgttcgaccaatagtggaatgcgttatcgcttcaacagaattggacatagtatttctatctgacaatcgttgatgttcggtgctatgtggaactagcacccgacagtgcaccgcgacattttcttgctgtggccatacaaagagtgcacgtcgaagcacccactgctactgtattttccgcagcgggaacttgccgcaggtatacttgcacaactcgtctgaggcggtgaaggggttagggaaactgacagattgtcaacattcgtgtggtctcccaaaaacgtttggcaaatatgaggaagtctgttaatggtacaggatgcaactcattcaccatatttgatgcagtcaattcttcagtgcaaggatttggcaaatgtccacagctggtcacgtgatacattcgtggagtgctcaagaggacgaacatatgacgcgtcgaattctactgggacagtcaaatcacgatatttcacgggggtcattatcttttgttgcttgcgctattagccagtgttaacaatacggttgagtaccctggtggcatgagcaatagtgcggaaaaatcgcctccaccacgacacgatacgcgattttactgacatccgatgccagtcacctcacttgcaaccggaagtcgtttaaggcgccggcgaggtggacaggcgaactcggcgcaagaatcgagcattcatcgccatgcgttggtaaactgtggctttttgcgcacgagctgcagacgggcacctctgtatcaggaagtgccaacagcgtcgcaacacgacaggcccttgtgtagtagacctcaaacgccagacgcgtgtggtgccctctccgtcttttcttcaagaagaactgattcagtcgctcaactgatgttgcactcgtcacattctttcagaggaggttgttgtgtcctattttcacaccgagtgcgatggctagcaacggcccacgccccgaggtctacacttggcagatagatcatcatagtcgtctata

SEQ ID NO: 1139 - DNA, 1801 bp, Toxoplasma gondii
  source 1..1801: mol_type = genomic DNA
ctcgtttttgctctccttgcgtcgccggtgctcgatgcgactgtgtttcgtttaccagcaaatcactggtagatacgttaaggaaacagttgcagacagaacagaccggattctggagtctcagacaaggaacttgcggagtggaggagaggaaacactgccgagaaattccgtccctctgtaccagcagaaaaagtgaaagcgacgagagagaagtggagaaaagagagcaggaaaagagaaaagactcagaggaatgcctcctgagcagccaagagcgagagaaagactgtgaaggagtgtgaaagcctcgtgcaatgaaggcgaaggagcttggtgacgggaaggtggaaagagcgagagcggagagaaaaggctctgattcagagaagaggaagacaaatgttaaccaagggagagagaaagctctcagtgtgtcgatgggaagcagagacgaagagtggaacaaacagaaagagggaaggacatcgcggaatgaaaagcacagcgagaccaccgaaggaagtgaaggatgtggaaaggcgaaggaaaacggtcgacgaagaagggcaaacaggaccaggctgacaaagaggcagggaacgtcacggcggaggaaatcgacacgagggcaacgcgggaaagccgcaacgagcccccttctcaggcagaagaagaatacctgctctcggaggagcacatggagtgagcgagcggggggaactgagcaaggcgtgaggcagagacagcacgggggaagaaacacagaaagagaggcttttcgatggggccagagacgctcgagaagatactcgcagaagaaaacggacaccagagtcgggagagctgggagagtgagaacagggaactgaaatttgaagacgaacacccagacaaatccctctctgtgcatgtgacgtttaaggaggggacaaggctgtacctcagtggtgaccgggcagggtgtcgggaagagaatcaggactcatgagaaaaagagcgaccggagtagatacaacacgagatgaggtggtgaaacaacggaaagaaaagtgatttgcctctgaaaaaagaaggaggatttgaccacgagaattaagaagcggtctcttgcccgccgaagaaaacatgctgctcgagtgaagattcacaggccttgcatgcgccgcgacgacagctgacctttcgaccggttttcatcgcatcccgcgcgtcaaattcattgttgttcggcgacaagcagagaggacgaaatttcctttcaacgacgccactatttgtcaacggaaaggaacaaggagagctgcatcgctctctgcagaaaatcccgtgtctgtttgcccgacgacgccgacaccgtcgggtgtatgtacacgggaacgctggtcggcatctcgttgtcgtggtcgggatttcgacgcaaacgaaggagccttctttccttctcttttctttgacaggctttgatatttcttctgttcgtcgttgagtcggcgtttcacctctgcacattccctccctggtcgaggaaactttgagactctctcctgttcgtttctcgacgactcgttcaaaggattcattgcccttttcgcggatttgctgtgtccattctcttcggcgttcttctccagggagacacgtgcgctcgagccggtttgctctggggccctctttggcttcaacttccccctcgactgggtctttcctgtctcgcggcagatctccaacctatcgcacatatcctttcgagaagcctcttgctctctgtcaacgtccggattctctggacgccaagtga

SEQ ID NO: 1140 - DNA, 2578 bp, Toxoplasma gondii
  source 1..2578: mol_type = genomic DNA
gagggttctgcggaacatgttttcaatgggtgaatgaatgcgttagcgctcaagtcccgaggtggtggcgttcatgtgttcgcaagcacttgcactgttgacggactgtttcttgaactgttctgggaagcgaactggtcggagatgtccttgtggcttctgccgaaaaaaaagttcatcgaaatccaaaagataaccctgtgaggggcggaacaacgggaagcctctatttttcgtactcaaaatacgtctctggtcaaaggatctgcgatccagaacgttggagcggacttccgtcactagattcttgaggaagatgttcacacggtgctgcatctctgctcggtgtcgtgcgcctttccccgtggcaaaaaggctacaaacgaagaacgcgctcacggcaacacacaccgaagaaacggctatccggttccttctccgtggctgtttccttcgagttctaccttgagaacgaaagaagggagatgggatttgcgttcgttggcgagagaaaatgaagtccacccgacaaaaggaaagacgcaatgcatttggaacgcagtagacatccgtgaaacacatgcgtggagcaaagtaccgcagggaaacagcgaaaacgcgtttcgttatcacgctcccctgtcgctacactgtatctaagcgtggtgcgcgctcgaatccaaatgtagttaggcggttttgcgttgaaaaaatgtgcgacaggactggacggcagaaaccgagagagttaaggaaacggctgcacgatgagcaaaaagaaatcaagaaatcaagccgctccgtgctcactgtacactcacgttccgccaatgttgtctgagacattgcttcgttgacacgagcgagttcacccgaacctgtggaggcgaatcaacacaaacagtttggtcactttgcatatcgagacgacagcagattcctgacaatacagagtctagttcgtggttgccgagattcatttctcatgagatttcgatagtaattctatagcggggccgcgggcattttctacgtagtatgcatgttttgttgctcggcgaagaaaatcagatatggccgttgcgactcgttcattctcaactcagtactgcaaggtggcgtgccgaaaactcatctccgtacacggtttgacatctaaaatgattagagtctttttctcggatcatgaaggggatttgagaaaacgatattcttcagacactcaatgctggccgcacacgctggtgtaagcaactgtcgagtacgactggagtacccaggtttgctctcacgatttccaaagagtgcgaatatgaggatacctctaacggcaacacgttccgtaaaaaggtcgcaaggtacttcaacgaagaagagtccttgaaactgcaacctgtcgtgaggctgatgtgaagagttcccctgtccgctgccagatgccgtcggcattcgagtttgtgaggctcgatgaatccagaaaccaaagtttctgtccagataatgcttgtcttccaacattcgtacattccccgttgtaggtaaaataaagtgggttttggggagcatcgggaagccatgatacagctgcaagacggacgggctaagaacactctttgaagccacgggtgatcgaaaaggttttacttgctttctcgagggtcgttttgtcgtggcatctcgatcatcacttgttcttcctcttgctgctcttcgcctttctccagtggaccatgcaacgctcattctcccttcaggtttccgcactctttcaagtctgacccggcttcctggcctgcgcacaggacccaactgtgatcccttcagttgacctgaaatgagtgtctcaacagtcaggcactttgagatcccagtgaagtgaagattcggcactgactgaaatgacgccgatggttctgtgctttgtttttctcgctgcgtctctttcgacatctcactttgaactctcatgatgtacatagtggtctgaccagccgacagcggctgtctgcgcgcatgcggagatcgaaacgtcaatgaccgctgttcggcttgcaagcattttcgtttcctgtcacgaacggcttggtcgtaactcttggaacgaatttctgcacagcaaggataccctggaaaacgcaggctttgtgcgtcggctaatctcaggtcgatagagcacagaattttctaacggcttctaggagtattcgtagtagcagtcatcgtgacaagccgaatggcttcatccgccgcggcttccgaacgactagatgtgaccggccatgtgtgcccatgaaggccttttgaagtgccccaggccgtttgaagaggtttgtccgctcttttcatcctcattttcgagaactagtgtctatcccgggaccttctgtagtggcttgtgcccctagaggtggctgtgcgcgtcttgaatctgtcgagatctttgtctcgttccttgacgacagtggtgggtcaatcaaaaaattgaaggttggcctggcggcaagggatcacttcatgaaggaactttggtcgcttttcgggaaaagacagtgacacgaagctcgcggatttttcacaa

SEQ ID NO: 1141 - DNA, 3696 bp, Toxoplasma gondii
  source 1..3696: mol_type = genomic DNA
aacgaagtatggttcttccgaaagagatgggcaacattgcgatgtggacaccacagtgtgcagtgctaatctactgtgtcccctgaggcgataggatggaagttgtcctcaccactatttctctgttgcggcagcagagagcctgcacgagcaaaggcaaggcgccttgctgaacacacagttgaacaggtattttccctgccgcagagaggacgacacgaatggaccttgtgcactgaagaaggagctcttcgttttccctctcaatgcaaggccactgatgtggggttgcacccccagaagattcgtgggcgtcgatcacatgaagcgatgacggtatctcgtcacaggtagcgctacactggtcagagttctgatttcgaatggggacaggcagaaacagtggactgggagaattcaaagaacgactcagtagagattgcatgaagtggagcaggcggccccagtcttcgggagatgctaacgctgccgggaggtctgatgctgaagcgtctgtagacagcgaacttgaagggcatgaagcagggcagtcgattgcgagcttctgacggaagaaacgagtgagctcctggagctcttcctcgacgaccgcgtcggttgagcgattggccccacaaaagacgctgcggcgtttctgcatgtggcagaatcctgtggacggctcccaaggagcctgattcgactccatggttctggaaaaaaactcgaaggtgcaccgagagaaacagatggattccgccgtccggagtggctctgccagtccggtctgccgcggcggtaaaatgtgtaccctgtctccggagcctactgggtatttctcgggaacaaggtgctgagcaaagaggatgacatttctcggagaagccagcaaaacatgcacgcgaaagttacacgccttatatctccattcgcggcttcggcgggtgatagctcgaccttcacttgaagggtcgaaggccaccgctaccacgtgtcaggagatccctgtttctctcgctcattgccaagaactcaagagagtatcatacacgaaacggtcaatcaccgcccacctggtgttcaagcagttgtcggaacggctctggaggcgaaatccgttggaactcttggtttatctttcctgcatgagaggatctgacgggaactagcgcatacgggcgacggacggatcggatcagggagttgaagtgcagcgctggggtgttacaatagatggacatccggtgcagctggcgtatgaaaagagacaaaagggtaagcattgagatatgaatgttcctgcattgttgttaaatggtaggggttcacatcaccgtggacgattgacatgggtttctctcggtaccggcgccgcccagggacggaccgaggcaccggggaaggagcggccgcttcaccgcagaaagtccaagcctggagtttaaaggatccccctctaatcaagccaggtaaaacgtgaccaattcgtcgcatatagacaaggaaagtcggtttaatgtaagtttggagtacagcagcgacgatggcgctcggcacagtttggtaagacatgcacaccacaggtggtacacggggccgacaagatagcccgcgacctctagaactgtgtgtggcatgttaagtgcctcttaggagcctgggtcagttgggaaacctgttgagtttccgctttaatgtgtaactgcttacagctagggcgttggaagaagagcaaggaaaatgagggtaaaacaggaaaagcaaatacgcgccgcgacacaattctgtcgaaccggtgtcgctgctgcatgcattcggaatcgagcctccgtgcccatctggggacgaggctaggggtgagaacggcggatgcaagaggacatggtggatactgggattatggagtgccgtggttcgcatcagtgtaggatttctagcggctatcacttcgactcatatttgtttattgcggagtgttcctacgttgcctttcagctgcttagtgagtctcctatcacgtgcaaaacaactcttcaagtacgtcgcttctgcataccaaagggagaagttattatacagcctcacattcggtgagcacatcaaagcgcattcccgaattcgctgactcagccttcctgccggatccagatgtggcactaaccaggcggatggtagccctactcggctaccagtgggacggggtcttctacaaaatggtgctctcttgtcacattgtggaactcaaagacctgtagggctgactatctaaatgaactgcggcgtcgattcatgttgacatcttcttgacctgtctataaggagagtataggtatctgcagaatcttggggatttctcgtgtatttacgtcgagttcgcacacgggacaacgaggtgtcgtggcgcgactgttacgctaccagttagatcaagtatcctgaagagtgccgtcctgacaccgaattgtttgggagttttgcgctccaatctacgaagggtaatagcaggatgacaaaggcgccagtcctgaagtagtggtgtttttagggaatcaactcccggaaaccgaaaccgccctttcctggatggtgtcatcccccgccggagggatttccaacgtatgccggaaaagcaaaacgctgttgatgcacaaatgaatggccttttaatccagaacactgcgtgtttctgtttttagtttttcttatttccacgttgttaggttcagcactggtcccgcttgcccctgccacaatgagcaatgcgtggtcatacgagtgcatagtgttttccgtagtagtttcttctactgcaagtcttttgtggcatgttcacacttgcccaatgctctggagcaaacaaatccgcgaagccaaggtgcggcgtttgcgtaacgaactaggcgcgtgtctaggtgccactgagtggcgtagctgcgcttggcacaactaaaattggggtgttctgggttgcagggctctgcctctgcgggttgcctcctttttggaaaatgtgctcatcgaaagcatatcactgttatctgggtgcctattgtctgtcgcagagagggtgaggcacattttctccccgtttcgtgcgaactagcacgtgggccgtcttttctcgggaacgcacttctgtcgacgacgctacgaaagcgcaaccaggcgcacagaagcactcgagatgaaaccgagaagaccgccacgagcgaacgtgaaacagcgtatgattatccgggaatgtacacatgtctctgaatggttgttccacgggcactggaatagcgtttctgttgagtccatcgcgatgttagactggccgcgtcaacactgctcatctgaatggctccaattctgcttcctcttcctcagtgggccgcttatgtttgggtcttttgacacccacgtttttcgatgtagcgggagaatttcaagatcggctgagagtttcagctcgaatgcagtgccgcatccgttaagcctgtattggcggtgaaacttccgttagacgtgttgcgtgaagcctttccgcagtttgcgaacggcacaaacgcctgcctgtacagattattttgtgcataccatgtcttcccaggtaataacaatggtagaacgtggtgagagtagcagttataatttagatagttagcaaataccgacggtacagactggtgtagagtatcaaccacagaacaa

SEQ ID NO: 1142 - DNA, 3871 bp, Toxoplasma gondii
  source 1..3871: mol_type = genomic DNA
tttgatggcatccagctgacagcacacataccaaccaacgcaggcaagccagcatcggtgcactgaaagggagacacggttcatgagcgttgctctttccagccagactgcaagcgaccccggcggtcagacgttcgactgaccccctctttgaagacctttggtgttccgcagtcgatttcgtcctggaagatggcccggccttgaagggtggtgttctccggagcgacaaagttctccgagaaagctcgaagttgatccgtgaagcgctctcccccgttcccgacttgcgcatatgcgggccactccgcgatgtacagcaccagcaacgcataccacgacttgatctgtccatcgccaacccgcaaaaaagggcacaactctgctcgaaacacatgcggattcaacacacctgaaggcagcggaaaaccacacacacaagtctcttcacacaccgactcgtcgcagtgactgtccaccgtcgagcgtcggtacaccactgtcctcaaccggaacaggcgccctaaacaaacacattctcaaaattacttctcccccgttcgacaaaatcagaggccggcaaagagcaggggtcaaacgagacaccgcgagacgaactaacgagcacctcgactttggactttccaccgttttatctgcccttacggacacaaaacaaatgaaacaagataaattgttgcgaactggaaaagtgcttgaatagccctgaacatcggccctcggctcctgacataacatttcgtgaatacgtcgtcgcggtgttcgaccagggacgaaacactgagggaagtctgacggagaagcaacttacgaagattgatattctccttctttctctgcggcaaaagctcgtttttcaggctggcattggaggccagcgtcctgtcggggttcacagcatctccggtcttgttttcaagcggtgcagcctggggcacgtccactgggggatcatcctgtgcagcactggacagtcttctgggttccatataaggcagagtgacgatgtagggatcttcttctcgctcgtaatcagacctatggagaaaagcttcgagcggtaggtccgccgctcggaggtacggagcagagctctcgctctgcaaaccagacacacagatgcggcggaaagatggtggacgaacctagacgtcacagaaagtggccgatcctgctaaacttgggagaaactgtggagaccaacttgactggcgctcagcaaaatgcgtcggattcacagagcgacgaacggaaacgcagtagattcgcagttttaaaaatcgtttgcagagcggcggtacggtcgtacccttcatacccgccggcaactcatttgaaaacacacctcccgacgaagagaagaatagccgtggattctcgaatctgaccaagtggctgcgggaaagtggtgaaatgttcggtgggaagtggaacgaactgtgcggccgcgacgaatacgaggtcacccggacagcaaggagtctacacacccaaattcaaaatatgtccgtatagaagtgacggcagtgattggttgcgccgacgctcatcaagccgtctacactatagttttgcgggttcgcatctcctgcggtcgacctgtgaaagtttcgccttgcgccttacctcgtccgaggcctccgagcgactcagcgcgcgcctttgtacatccgagagttcgttggacaaatgtgagcagagccagccggcaaggaaagtgacggcaagaatcagcgccttcgtgagagcaccgattcctgtggatgaattgctctgtatccgtttagccgtttccggctgcggtaactcggttgcagcgcaagggcaacgggaacaggtgggctcgttactgcaacagaaacgcgtttcctcggtttccataatgctccgcttgagaggagcagagtcagttcggtcctggcgagtaagagttccgccggtcgaactctgcaaaaagtcgagttccctgtggtcggcgctggcagagcgactgcctagtcgactggccagcaaaccgcgtgcctcctgggaaaaagaacgctggcgcgggcagccccagccattgaaaactgctccagattcgctgtctgtcttctcttggaggatcgaaactaccgggatcaaagtcgcaaatacaaacggcagcttctcggcgaaacccttggcagtctccgcactgattccaatcttgttctccgtccccgcctcccctgcttggtagtgaggctacgaggcatgttttagatctagaacgtgaccagccacgttgttcgcgtgcaccggacggagaagaaacgacgtttccgcaaagcgacgcttctcagaaccggacgaaaggcatggaaatcgttgctggccggaggaaatcacctgcaaagtcccaacgcgaaaaacacgaggtctcaatgcgaccgagcctggcgcgcgggacacaaggcgggctgggtgcggttgtgtctgtgcctcagtcctcagaaaagccaacctctgctgattttcgaaaatttccgtacactcgccgagtggcgcgcattaccgcggcacaaagtcttctcctctccgtgaagactttgccgcgtcgcagaaatccacgcggcgcgctgtgcgcctctctgttgggcttggtcttcaaaccccgccagtcaccgcagaccggcgcagtacgggcccgacccgtgggcagctcggccgtttccgacgttcctgcgaaagttgttcgcgcgctaaaagtgtgaaaagttcagctgtgggcgtcagaggcgtcgaaacggatcacgtctcgaccttttttgcaaaagggagtcctctcgaccgtccctatcgggcaagtattcgtccacccaggctcaaacacaccctcgccaacctagcattcccatcgcgccgacctcacaggaaagagcagctctcagcgcagacgcagtcaagtttaaccgtgttctctcacgctgtctcgatctttgcgatctttgactttgcgtccagattccagtctccagacttttcattcgtttctagagcaaaacggcctctttcctttggtgttcgcttttcaaagtcccccatctagaaccccactgccagccttaggacagagactgcgccagggataatcgtctttatcgtctgaatagctgccgactctgcttttcaacgtcgctgcgccgtactcacacactctccagctcaccagaaagcgcagagcgcgccgactgttgttcctctctgaatttgtctttaatttccgtcgcctcgttctgcgagcaccgttgttccgcctctccgggacccctctgcttttctccgcctctcgcctccccgctgctttttccgctgctttttcctcgactcacctgcgcgtcttcttcctctggaaagttgtagcgttgaaatgcggttctctcctcttttttcatctcgtctgcctcatcttgcttgccgctgccgacggtgcgtcctcttccgcttcgttgctgtctctccgcggtctactctgcagtgtctccgtcccggtgtcgcgtcgaggcttttctcccaccgcagatgcgcaagcgcatcctttgtccactctcgcaaaacgtctgtgcaccatcttctttcagagaacgctagacctgtcctctctctcttctgctgacagtctcccctgcttccgtttccccagttggctctcgcgctgtttgcgggtgtttcctttctccagcgttttagtcgtcgtagcttttccgtccttctttcctggcgttcttttctctctccctccttccttctctttctcgctatctctcctgcctacccttctgctaggtctgagagcaactgcatgcgtttcggagtctcttcgccgcga

SEQ ID NO: 1143 - DNA, 2120 bp, Toxoplasma gondii
  source 1..2120: mol_type = genomic DNA
ctttctacgatcctgaatgatggactcgagtttcgcgggacacacgaccgcgttcttcaaaactttacaccacctgatcacggggcacattcggcgcggcgatgatgacgcagcgccttgccgtctctgcgaatgtgtcgcttagcgaggcaatccaacagtggggaccaacttggacgaagtagatcgaggggaagctgcgcctgctgaagctacgtcagcatccccactcgaagtgtaaactccccagaaccagcttttgaataaacctgtctcagtgacaacgactttcggtgcgaacgcgtcgacgtcaggatgcgtgcttacctacagacctgggcagatgcggcgccttgaaagtttcatgtactggtagagatacagatcattctcacagtgtgtgcagacgagctctaatccgtacagaacgagtgcttccacggcaactcaggcaaacgggtgtgcatgcaaaagtgtggtctggagttcagacgcgaaaattcgcctttcttcggacttcggcacgacacacttttgcgtgttttccgtctaagttcgaatctgtcccctaaaacatattgcccacctttctctctttacaatgtaaacagaacagccggaaagtcagctcacggcctcggttttcgttgcaaccgttttcttatcaggaaatctaactgaggcttgagacgaaggtttctacgggggagggggggtgagagaaggggaagacagcgcccgtacagttcgtcgcgtggcgtccatgctgttttttattttacggggggtttcacaaaccagtttcaggttactttcttgtggctgaactggaaaacggcctgtcgccattcgacggaaaagaagtgatctgagactaaccgtggagtcggtgagtcacgccagctaaacatctgcttcgatctaacaagtttctacaatcaagtgtctgcgtactgcagactgcggctctatttttcgcatacgggaacgcgacatgcacgcgtcttttttcgagcgagatgtcctcttctgaaaaacacacacccggcgccttgatctaagatcgtgaacttgtgtgggagaggcgggggggaaacaaagtggcggccgagtggggagagtgagaggaagacacacgctgactgagagggactccagaggaaattactgttctcggttgccgtggcgacacccgagaggggaagaaaactcagcagccgcgaagacggaaggggagggcacaaagcagttcgacctgtcagtgtctcgagctcgaggtcccagggttcccgaaaagaaaagcagtattgccagcgcgcagacgaagaagacagacttcgacagagagacaggtgtaaaaaacgaaacacagaacgagtgactggggattttctcgggaaaatgcatgcactcgagtgtgctgtgccgcaaaggtggcgggagagcggcgggatttctgggggatctgtctggcgccagacggcgaggtgcgcgagaagcgttttgttttgtcgttcgttttttctccacgttttccccgttttctcgcagcctcccgtgtgtgtgtctcacctcgaccgcctctctccctggcgctgccctcatcacccttgtcgctgcccgctgggtttcacaccaaacgaggtaagttttcagcggtgtcgatacacccgaaacgcgcgccttttgcctccacttcgaggagagccgtttcccatttcgtatcctttgctcgccacagaccgcggaggaagtccgatttccgcggagacaagacacacccaatgccgccgcctcccgggatcgccgactgatggtgcgttgggagatagcaatactcgagaacctggagcgccgctctctgtagacctcgcagactctcttcttctgcgttctccgctctgctgtccgcgcagcttgctcgccagactctcgctctgctctccgtccgcgcctctcgtcgccagcctctgttgtgcaggcctctcttcctccgcgactgctgtctgctccgcgtcttgagcctcatataaaacttctctgcaccctccagtggtcggacgcgcgtccgccggttccccctcgctctcctcttccctcgctctggtgtacgtacacca

SEQ ID NO: 1144 - DNA, 4147 bp, Toxoplasma gondii
  source 1..4147: mol_type = genomic DNA
gccgcgaaacgagtgaaagggtacacacgttttcggctgttcaagaagcacgtgcatagcgtatcattcacgctgacagagaaagcgatgcaaggaacttgagaagcactagatgtacaccggcaacctcaccgcgatttccaaccagttgggacagaacggcagccaagtactcactgaacaaagaatatagggtcgatctgtgtaagtgacacggcgttaacggagacaaagaacttggcaagcagtgctagtgtataatggaaaagtgattgaacgttgagaggttatttctcaaaacttctttttccaacgcaccggtgaccctggggcgtcctcggaggaattttgtagacagtgacctctctgcagttgtagacgatgaattcgagagcctcgttatcatctttgttttcgactggaggggcagcgtcctcggcttctacgggtctggattttgcctcgggagcatctgtcgccatttgaggcatttcttgagaaggaataatttcttcggaagtacgcagaacagaacgaaattgagaactccagctgaatcgacagctacgcatccgtaccaccgtgtaaaacgagcgtgttaggatgcctacatcgggtgcatgcactggtctatatcggtttgttgacagctcgaaagagaggggaagcgaatctacgactgcgaaagcctgcaggccctagttgctcggatgagaatgttgcaggcacacagtagatagggagggaaacaacaagtcgtgcatgtacacgcgcagaatcagacgtctgcggtaagttgaagaaaaatggtgaggctcctcaccgagcaccgcgggtgcgatgtcttgtgacagttgagtgatttcgtccaggacttgtccaacacgaaagcaatctgcatgtaaatgaaggaagggagacgcgctgtcgcgagcaaaaaggaaaagacgagggaaaactggaacgcaatcgtcaaactgtgcccggaatcgacgcgcagccgtcttgacaactcgcgggttcgcgcagttgcagacaaaagaactgttttggcacgagtgtcgtcttaactcggcaagcaaatgaagagaggaagttcttcgtctcgagaattggagcttggaaatctagaaaatctccacttgaagaagcagtgtctcgcttgtccgtttttggaacgtgtgtcatgcgtggctcttcgagcgcggaaaagcaggagacgatatcgcggaggttacttacgatgagggtcgcaaaaaccaggataaacagcgagatgaaattcgtttttgatctggttctacgcggtggcccgcaggaaaagtggcaggccatttgactcattggaatgacctcatccaaatgttgcctggtcgagctgaaccgcgtggatgaaattatctgcatgcgctgaagaccgttgggaatcttccttgcaaacaatctcgatgcgaaggatacgttgaccacagaagaaagagacgatttccattctccggagagaggctagcactcgctcttgagcagaaatctctttgttttttccgctgccgtggcagttgccaactttcacgtacggggacatagaacatttcgtatgaacgtgcacgtggatataaacgagtgtctacaaacgcaaatagacgtgcacatttcctgcgcatttgcacctccagctgaatgcgctccggcagatatcagctcggagttagttctgaggacttcagtcctgatcaaccacagttcagcttggattgaggaggaagaccactatagaccgttccaagattcattatgtccctttgtggatgtaagttgcggacaaagttttagatcgtctcgggtcgacgattcagtggaaaacaaagagaggaagcctctttctagcgtgaaactaacgacggtgcaagctgcctcgtgtccgtaggaagagttcacaacgagttaaccactttggggagggcgtttctcctttcttaggatcggtatgaaagaaacgacagaaatctgaagcacttcgacacgactgaataggtcaaacattacgtgcactaaagtaaggcatcctcgagggtaaactccccttgcgtcggttattggattcccgtgttctacatgtgagattgtgttggcattgaggcgctacagtagaaccggacagagaattcctttcaatggaagtagcagactttcaccagctgcagatggtagcgttcatccttctttcgcttcttgcacaactcagataatgacagtcagaacgttttatttcgtagcgatggctgtccgccagcagtggtaaaaaacacgtcaacgttgcgactagttttcgcggtctacgaagatggtttgtttcatggcattacgtgacatctgtctcaatttagtctctgtctctctggagaacttgaatgggcacctgcagcattctgtttgctatattctgcaacatgcgcaaggagtggcgttccacttagcatgagtaaacaacgattgccctgagggaataacagacttccttccttcatgctgcacgtgggctgaagagacgcccggtgcaattctgaagaaaacggcttctgttacaacaggcttgcatacttcaacatgcgtccatgtgctgtcttcccacgcacgcagaaacaggtgaggaggcgcccgaactacaaacagcttaagaaaaggatttgtcagcaacgatcgaaacagataattttcaagaaattccagtgtttcttcccctcatctgtcgcgccttttcgccgccaccgccttgtgcaattccttcatggagagcgtctgcttcattctccgcgtctcacgcatatatatatatatatatatatatatatatatatatatatatagttttttcagatctgcagtggttcgctgtggaacacaactgacaacggaattgcggtattctcgtcttttttgtaggtaggagaatgcatcgtcaaacgtgccttgtccgtgcgttaatttgctggtaaactgctgtgcatatatgctggtcttcagacgatacaactcactgaccgcggttgtcagaactggctttcatgttgttgtatatgtctcagatggttaggcagtggtggataatcgaaccgcttttctcacgttttcgttgaatcatatccgctttgtctcttttgaagacgtgcaccggggaaaggacgaaccactatggtttgcaaaaaacaaacgacaaacagggcggcacttgttatttatttccacctagttgcagaggaagcttttccactcggccctcacgtccgctgagaacagttatgccatccggattggaaagaaaagtggaaaacacctgtttgtccgacttcgtgtccatctactctcaagcagacggagaggcagcgtgcggcgcttcttttcttgcatgctggatacttatgttgggaaaaaagacgatatttctgcgcctgacggatgaatctgaacgccactcaagcgccggtcttctgtttctgtgtgtttctcagtcgttcttaaagtgaagtctccctcgagccacccttttcccctcaccgcggtttgtgtcttgtgcacagtcgtcaacgccagcgacagcagccacggtgtgaatttttagtttctgccgatcgggcttccctgtccgtgagtctctcgaattgtctggaaggtcgttcgctttcatatttctcgtctttttcccgctttcccctgcacggagctcgcctcgcgaaacggggaacctcgaccgagacgctgcttcttaactcgcaacagcccttctgttgttttcgtctgctttcatccggccagaattcccaccacttcccctgcatcgagcgctgtcgtagagagccgtggagtttcttttccgaaatttcctcgcacgaactccgccgtccctccagccgacgcagtcgttgttagccgtgtccatggctgcaaattcgagaaaagataccaagaacagcgcagtcttctgagatccaactgcaagtccctctcatcacattcgactcagcgatcggactaacctcttgtacacacctcagccaccgaagacgccaagcttctgcggctcgcgtcacagggtgacggtcacgtgtccagaaagaaagacgcgttttttgtgagcactgtacgagaa

SEQ ID NO: 1145 - DNA, 3207 bp, Toxoplasma gondii
  source 1..3207: mol_type = genomic DNA
gggatcacgagggcgggcagaactttggagaaaactggatggaaggttgctggggatcgaatcggagggagcaagggggcggtgaacctgtgcaaactggcgagagaggcggggaacggagagttgtccagggagaacggcacgacttcctcggtggggagaatttcacttcaggaggaaacggacgcgagactcgccgcgggacggaaggctctcgtggtcaagcaggcgcgcgaggggcaggcgcgaaacgcggcgggaatcgacacaccggcaaaggaaagggaaaggggagacgaggaggtttgtgggacatgatggatgacgatatcatggatataaatacgtggactatgtgaggacagcagggatagaagagggtgccactgcatgcgtgtgccctggagaatcccgcgcatgtcgacgatttgggtgaccggagaagtggaaaactttccatctaggttgccaagagggatgcgaactcacggatgcacgattcggagatgtgtgtgtgtgttgttgactcttcaaacggcggaggtcgtcaggcgcctcggttgtgtttacgggctgcaaacgtcttctgtctttgcagaagaaatatacggggagttttctgaactttccctgtccagcctcggttgaaacacacaggatacggggcgcatagcttttgcccgtattcaagaaacggtgaaggcgtaccctttgagacgaatcatcgcgaggaaactgtcttttcggggaccggtggacgacgaactgagttgcgttttgcggttaattccagtggagttccagaacgtcaaacaagccggtccatacgctcggaaagaacaaagaattaaccagcgggagaggcgttctggtaaaaggtgccgaggacagaaatcgtgccggcgcggtacgcactaccgaacgtatttccgtgttccctgggagtggttgttcgtgggcatcattgtctaagaaggcacaaattgttcgtagctttccgtcgccaaaaagcggtactctcaacgccagaaactgtccaaatgacagccaggagatctacgtcagcagtgaggtagtttcacggcaactacgagtaatttggatgatattatgtcactcttatcggtaattctatgcgggtacaagtcgagaaaacctacggttgcaggtcgtttagggaggcaagactccgtcgcgattttgacctgactcgagtctgacctcagtgtgtccttttttcctttccctggctagtcgtttccgggttcgtatctgcaacgagaagatgtcatggaaacatttttatttttcttcaagggctgttcatcttatgtaattccacagcttcgagggagccgcgtttaggtccaaaaagtcgttgtgtcgccgagtaaaatgtgacgtgaggacgtaaaggggtaggccctgctgaattcccaaggttgtgggttgtgtgttacgtgtgcttgtccgtgtttggtgcgtttttgatacggcccctgaaaacccaattcatgcctcgattgcattgttcgggctggtgtgaacgggccgcgattccgaagaaagcaagcgcaagtctgtgaggaaaaaaacaggagatagagggttgcaccgcagtgaggagagttaatcggcttgctgcaatgcacatacaagtttgcacgtgtcttttgcgaacggattcgagtactaggtgtacgtgcttagacggagctagtgtgaattcgtaaaccgtattcggcttcttcaccagaaacagaaaaaggagatgtgcgctgcattcttggagggtgagtgtgcactctatgtgatttcacgattgcacgaaaacaccgttttcacatttctgcaacccctaaacgtctcgttgcgttacctgcagtgcaactagcagcgcgtttgtaggcctctcacacgatacagtcgttctgagcacgaaaaaaccgagggcttcgcgtatttccctcacctccgcgagacaccgcaccaggggtgaacggctcgtcaacgtcgcatagttgtttacgtccgacatattcttgatgtcaacggactgcatgaatgtcctgttccagtatgtttgaacgaaagtgtcgcacggcttggcttacggaaacggggtccagcaaaagattccggttgcacacgttatctacacaagacctgtagcatacgccaccacagagacttccctacaactcccgtaatgagtgatgcggtccacgggatgcgataaatagtgctgcgtggtcgaggctgttcgcaaggttcagcgaaaggcggggaagtgggaagagagtcaatcgtctctggttctgcacaggcacaatgcgagccgtagtgtggacctgttcttccgtacttcatcaaagtgacatagctgtctcaatgtgacaaattctgactaccttgtttatgagaattcgtgatatcgacaggttgtctcgtgtgagattcctgtaaatggctaataaaagagggtgtgacaacatcagtcacaaacacggcgactctaccgcgtcgcatccggtgagatgtcgctgttggcctactgcctcaaagcaaatcacttctgcgatccgacgtacgtaaacgaaggaaggagaaattcacagcgttgcgcatgttggtagcctgatactttggggacgctcgacggcggtttccacctccagtgagcgttcgaccgttgaagataacgcactcccgtcgaggcatcaactgaaaggaagacggcaacatattcgcgacgaattcggtgcatgccttctaactggttgtgtctctcctcccgttcgttaatacactatgcttgcctcggccgaatgttctcaatcccccgcggccgcagaactgtttcaaaatagagagacgagactagagctgcgcgtctctttttgaggccgacccggtgtcatttttttacaaggggattatgaagtcgtgattacagcctttttttgacaaagagctaaggtcgctgctatggtaataagaacgaaaaccgtgtaaagtgaccggcgtttcatcctccctcttgcgctgacacaaagtgacgcggtgatccagcttgattgagtgacctcttcttattgtgcctctctttcaattcatgcaaaagcgttcccacgtctgtacagccgtatctgcattctgtttttgtgtcccagcctgcttcaagccagtcagttgtgtaacggtaaa

SEQ ID NO: 1146 - DNA, 2599 bp, Toxoplasma gondii
  source 1..2599: mol_type = genomic DNA
acgaagctaagaggcgaaactccttgccttgagaaacgtatttttccttgcaatactctcacatccgatgatctaggggttttcgtgtggggatgatataagagcctaatcggacgtcgcagggcttggccacgactcctggcaccaggtgcacctatcctggggacgatgaagctgaagctgtgaagagggttgaaactactctgtcagcttttttgcatttgtggagggaagagggcgaagcgtgcagccaatcaccttcagtttccggaagtcatcgagaggatttggatgtttttcgttcacatgttgtcgtgtctatctgttctggaagtcaactggcggatgctctctgctagagcaaccgtgaatagacttacctgtgcgacttgttctgggaagcagatgaaacgcgtttttcaattacattcactcgcgcgtttcctgtgagtccggtttttgtttcccctattgccggtgaatctatatggaccaggtaactgacttcttgtcacgatggcatgcagttaggtagaaattctctgaagcgaaaaccccgggcgttgctggtaaacgctttgagcctccgcggggtcggggccttcaaatgttcatcttgcgttcaatcgtgtgtcttcaaaggcagtacgttctgtctgtcgtttggcctttcgtactctgggacttgcgcatgtattctcgttcttcgttaatcgaaacctcttctccggaaacgctgtactctgaagagttcatcagcgcatgccccgaactaccggcaataccaccatcacctttgctgccgcctatgcatcctgtgacatgcaacacgctccatagaaaaattggatcgaccgctgccgcctgagtacgtcccccattaaaatttcatttcctgggtagtggttcttcagaatcggagaagacgaaaaggtaaaagcgatggggtcctaggctgtgccgaggattcacggtcaacacctcgttttctgggaacatcgttcggtttcgcttcagatagaagtcaaagacagcctcgtgaaatctgatgcttcagaaatccgtcagcaatgattgagattcagagacaatgacgctagctgatacaattctaccagcagtggttcgatggtaaacaaccaggacgtgcctcctgaaatatcgtgtttaataggcgacatatcgacacaaagagtgcacaagcagtcgcagatccatttcttgccagcttcagacaggaggacgtcacacaccgacaaatgtgtagacagagtgtttaaatgcgtgtgtaccgcctcctcgttttgcgtcaactgctagttgcggttgttttaatagcgcgtagagcgcatttacggatgtcctctgttgaaggcattgttgtaggctttggatcataactggcgccgtactgtcgccgagacaggttatcctgtctgtgtcgtctacattgacacgaaatgtttcggcggttgaaactgtttcagtgacgtggtggcgcgtatatcatgtcactgaaatctcaggctgaaggtgaacagctgtggtagtacactgtcaccactccgtgcccatattgcgccgctggaactcagggcagcttgctccggacaaagctgaaaaacggtctcccttagttacccaacatgtcaacatcgcgtcgtccctgcagggtcagaatgttaatagccggacacacaggtgaaacagcctacaacattccatccttcccgtcgacaccgtcgacaacgctacgcggcggtggccaaaggccacagtggcgtgcccgacatcgctcccccactatttgctaaccgccgaaagcattatcaagattcctctaaacgaccctagcacggtggaatgctcaccggctgtacagagtcggcctttcgtggtttgttgaacgtcaagggttgcggcatcaaggcgaggactagcattatctgtcgacacgacacaaaatgagctcggacaagcgcttggtgctgcgaagacaactgatccttcagggtcccctgtaagcgttcaggtgcttcctcccctcggcagcagataacggtaacatggtttaagtgatgagaggtcgcgtgagtttccgtgacaagttccctcacagggcatatccattcaaattccgcttgaaagcaaatgaggggtgacgaatcctacagccatcgctggagttctttcctcaagtcacatggtgctctgcggggcgcgtgcttgtaatccaatagatgtagtcagtgtgggtctattcaaaaagcactagtttctctgtgttaacaaaggtgaaactggggagatcttcctcgtctcaggtccaactactcagcacccttgtgctaatccacttggcgacctcgcttgttcgttcttcagtgccaatctagtggccaagatcagcgacggtgcacagcgaccagctcgacccatattcaactagcgacgcgctagctcgagccagcggcacgtcctgttgtcgggaactgcaaacgccaagggagcacctttcccagtcagggtacgccttcggttttgtgtttacaccgcagcgggcagcatgagcagcaaacccgcttacggcacggtacga

SEQ ID NO: 1147 - DNA, 2649 bp, Toxoplasma gondii
  source 1..2649: mol_type = genomic DNA
cctgtgctcgcgcgtcgtgttcagtactgtgtgaaactcctttcctcggatccccgcggcgcgaacggaggagagaggagagacaaggtgcccgtcggggacagagggggtgagtgcaaagcagagttgccagaggcgttttcgacgtcttcagactcgagaagacaggagtctggaagtctgtttttggtgacagaggatgcggctgtagtcgtggacgcgctgaaggctcttgctggcacctccacagaccgctaggtgtcagccgaaaaacgcagattagtgcgcaggtttgggcgggggtttggaaaagctgtgcgcggcttctttcctcgatacagttaactagctagagcgcttgggagcgatggtcattcctgcgttgctccacaatttgatgttgacgggctcgcgcagtctgcgacacgtgctgtacgaagagtgtctctgttttccatcggaagagcgacgacgaattcatgctgaaggcgagacctgcggtgcccttcctggttcgttcgtagttctcaggatggacgaggcatagtcaggggggaagcgccgactttccacgttcctcccacgcctgaagcacgtagaaacgggtcgctacggatcaagacgagttgcaaagattttcactccgaaatcgacatgagtttccgcgacgccagttccgtgtgaagtgtctgcgtcacactcaacccggtcgaatattccgttagcgactcgatgagaccggagaagttctgctgcgttcacaaagctgaaacaacaactgaagaaagaaatcgactgaaccaacggaggaccatcccaaacgggtggtttgttagaatctgtgctacaagcaacatcttattggaaaccagtaacgaggaaactccctgaaaaatgtgttttttctacgttattgtgtgctgttgaaagcagcaccgccccaaatcaggggcaaacagcagagtcatgctacacaagtaatcatagtattgttccgacaccctcttgatcgaaccccactggaccgcgtactgcaccttctctggagagaactagtgaaaaagatctcatgtaacagccagtgtcctcagcagttcctgcagaaaaggaatctgaactacgaatcacttttaaaagaggaacatgaactaggaagtatccgcggcaaacgcaaatttacaaagaagtcgctgcgataagcgcacatgtcctaggtagtagccactttaaaagcacaagtactgagaggtaactccgacaaaggagcgtgctttgaggagcaagtgcgtctgcacggctccggcatgtggcgccttgcctgcttcgccgaaccaacatggcagattggaacctatctgagacgtccactcaagatgtgcggacaagtttgaactaagcaagtggacttgctggaggagggagccgtttaaccatccgtttcgcttttcctgcgtctttcggggagtcgcgttgtctcgacgtgccaggaatgcgcagatttcctcttttcagaagcctaaatgtgtctagcgctccctcctcaacagtgcggatgctgacaagcagaggacagacaagatccatgggtacatcgtcagatgaatttcaattgactgaatctcgtagtcccagcttggagcagcgacaccagggacgccgttgaattccttttgaggatcaaccatcgttgagtcatccgccaaccttcgctaccagtcttccatccatctccatgttcagtgtgtgttcgtccgtaagtttccctggaatgccaggaggagactccctggctctctggtgcagtgtgccggcggcgtctgcatgcaactagttgtctaatgtgcgacgctggtttgaagacatgtcgagtgtctgtatcttctcccttccctttcaagcgaaaacacaaaagatatggatttttcgattcgttgttttatactttgcacactccgtctcgacttccacgatttgaaatcttctctttaaccgagtcacggggatttttccctctagtctttgctctttcctcgctggggtgttgcgacaccgttttgcccttccatgaggtaaactctgaagtcacgagacacgcaattccagtccctgtgttgagtgctcagactgaaaatcaatatccgagattctccgcccagcttcacaaccacattctctccgccgcatggcagattttattcgcggccggctggcctcaagtcgctctgcgccttagagagtggaggaccttttaatttttcttccctccgaatttcctcgaaagctcagcaggtgttgaagcggaggacgcgggcacaccgcgctgtgactgtctgagcagtgtgggctggtgttgatttcgtcctgcaagggagttaaccattttcctttcttgttaggcgtttctaggaaagagaccgagagaggctgcatccgagagagctgcgcagagagagggacatgcgtcattatgtgtctagggacctttcacgtttctctagagacccaaatcctgtcggccgtcgtctcgatttccagtgttcctctgctccaaaaaacagttggaacgaagacagcacatactatcgcgtcaatgtccacctctctctgttccttgtatcgtttgcatccccgaaaggaatggagaggaga

SEQ ID NO: 1148 - DNA, 4012 bp, Toxoplasma gondii
  source 1..4012: mol_type = genomic DNA
ttgtgtgtcgactccacacatcgacgcatgtgcatgagatgtgcctgactccgaaggccggacagggaggggcatgctttctcgccttcgtcccgagtcgcactgcgtcaccgttcgttgtttctctgcgacgcgtccgaagacgaagcgcagagttctcgcgcagaaggaaccttctccgttgtttgccccagtccggaatctctctgcccttctacgccttgtgtttcttgtagtctccggcgaaggcgaatggacgggcgggtgtctcctgaggtccccttttgtctttgaagctggactgcgcgctggccgcagccgcgcctgctggtgtgaacttcttgtgccttcttttgccgtggcggcgcttgcagcacgggcagacgcacgcgaagaagcggcagaggacagttcggaaggcaaggagcgcgaggacgtaggtgacgatgacgaggaagagaagaagcgcgaggcggtctccaagtcctggcgggatgagagcctcgacgtcagggtgcgaagcgaacagcggggccagcgcagcgtccacgcggccgttgacactcggcagaaggtcgtcggaaagcgaggtgaccatctgaacacccttgcctgccgcagaagcggctacaggatacactgttgtctccagaaacagcttcgccttctccagagtcggtgcgacgggtgcaagcagtttcgcgttgaggacctcgaggtacggcgcagcgagagtctcgacttccagtttgactgttcccagcttctcagacacctcgcgcggaatgcatgcaaccacatgctctccaatcgccatgtacagtcgcccgatcgacaagagcgttccgcgcatctcttcaattgtgaaaatgtgatccgagctcttcctctcctcgccgaccttctccgacgcatgcttcaggtctctctccagtgcgcgaactcgagccgccagatctgctgcttccttctccttctctccaaggagcttcactttctcgccgagctcctgcgccttctgactgaggccgttcttcagcgcagcgacttcgcgttcgagtttttcgctcgttgcctcagaggcggcggcctgcttgtgctccagttccctcagtttcttctcgacatcggatttcgcgctttgcgatgcgttgtacatcgtccgcaggttttctgcctgctgctggcatgcgtccacttccttttgcttgcgctgcgtcgcctcggtgcatgcacgcacagacgtttcgtgaacctctctgaacttcttcaactccgcctcggcgttctccgctctctgctcggcatacttgagaagtcgcgcctccttgctctcgcctttctcggtctcggggacggtcgtcttcgcagagttctccgcttgccgctgctcgactggttttccggcgtccgcgcgcgtcggcgtctcggctgccgcagcgaagaggcacagcgagtcgccagagcggcgcgactcagcgagaggcgagactgtcgagggagcaaagaagtccgccgcgagacacaacaagagcgcagtggagaggaagaggggggggagccggggaaccgaggccgccatttctggagagcgcaggcagacactttgggggaacaggtgacagaatttacaagaggaagaggccagaagaacgaagaaggcgaagaaggacgagagcagaaaaggctctttacgcgccgagacagaaggtcgagatgcgaagggcaaaccagcaggcggcgagaggttccggcgcgcagagagtcgctttgagagggtggaaaatcggacgttgcttgtgtctgacgaagatgcatgcacgtcacttttttcgccttcagagcgactcaggagcaagacttgttccgccgcagctctgccgtgtcgcgctgtgcgggtcgtcgtctgtttgctctgctagagaaacgcagaaaagcaggagtgcatccggagagaacttccgcgaaatccgagatacaagcgacttcgcctgaagaaacacagcagagaacgagactgcaacactctgtccgtcttttcagggaaacgggcagaagacagacgaaaaacggccaccggagcgtgagagacagatatggagaatcctctagagacacacacacacactcacaccggctggagagcaaccttccgggaggaaagagaaacacaaagaagaaaagagaatcaagcacgcagcgaacagcaaatccacttttgggccgcgatagaaaaccaggttttctcacggaaaaaaagggtgcactctcgcctcgcggcaacacaccagaggccggtcagtcctccccccgcgcccccgacgccaccagcgtctctctcgaattgccgcgttcttctctcactaccagaaaaaggtttttctttcgaatttctgaaagaaaacaggaaacgcgaaggccaagcaatgcatttctctccaagaaagaagacaaatagacaagtgcaacacacatatgtgcagacagagacagccgcccgacttccctatatataaatatatataatatctgtaatatctatttatatataatatcctatatatatatatagatagatagatatatataatatgcgtatgtacttgtgtcgattgccaatttcatacaatacaacgcttcctttatacgcatagattcgttcgcttagagcagctcgtgtatgtgagtatgcctatgcgtatccatgtgcgcaggaggaaagtagcagtgagcactgacaactatacgcatgtgtatatatatacctacatctctgagaatgggccgtctctgtactccaacacatacgcatttccggcttatgcatacagatgcagagacacctttagctcgatgcttcaagtgcagatgcatgcagagaagaacactcgcttctctttcaagaaaacaagttcgtggatccgcgagaagaatgaacgttgtctctctgtcagacgcagagcgaggaattgcagaagagaaacgcctcccgttctctcagaaaaaagaaaggcgaggaaggacaagagtcgaacaaagaaacctgaacgagttatcgtgagctggaagagttggagtgaaactcagacagactcagtttgacatcttttatttgatttaagaagaacctttttgctcttcctctttctacttctctcctctcttcttcctctcagtttcgcttctcgccattagtctgtctctcaccttcctccgcctttctctcctctcttccccactgtctccatcgcgtaaaaggtaaagcatctacagtacctcgtgcgaataccttttctctctccaccaccgtgcggtgttgacgccacctgaggtcgtgttgcctaagtgaaggaaccgctctccttaagagcggttcctcacgtccaggccaagaacttgatgcaactctcgtgcatcgtctgacagtgcttgttcagaacaagcatagaacgtatccggtaacaaaggaaagtcagtatctaagcgaataaggaagagagcaaatttggtggaataatactgcttgcaggagtcgagaagtacacgcctagacgctgaaaatgacgaacaaagtctgtatctaaaccggttccacagattcttgtgacaattgtcgcgcggttctgcatcactttctgacgctctctgactgtgtactgtttctgtcacacaatggaagcaaagagaaaaacgtctctgcgccttcgtagaaacacaggtccctccatgaagctcggaaaaacacacgtttgttttgcactcttaactgactgtttggtgtcttgtatcttcggagattgctatctgtacgttttgtggtctcaggggcgccttttcgctgcgtcttgttgtgtagaggacgctggtctgtgcacggcgacgccagactgtccaggaactggaaaccgggcgaagttgccggagcagtgaacgctttttcgcaattcaggccgtggaggagcagtgaaagacgaacgtgcgggttcgaaaaggatctcggagcgaaaggaaa

SEQ ID NO: 1149 - DNA, 4333 bp, Toxoplasma gondii
  source 1..4333: mol_type = genomic DNA
acgggaaaacgcgaaagtcggttggagtctttacatgtcgttcaagactttcatcttgagctaccttgactaaaaatcgagattagaccctgagccgacgtattgcctgtgcgaccttgggagtcgttcatcgccacagtggcactcaactgtctcaccatatggttcggaagctgtttctcgtgtcgtggttgagactttgaatttgtatcagcttgcaaatgtcgtttccagatccgtagccttgcccccagtgtgacagcaaggaagagacaagaaggtgcgagaacccggggagaaaaaaaactttcctttcgccgtggtctgttgtgttttcggaacgcagcacgtgcgtctctccagctgccgcccgaggaactcgtggagtgtgcagacacgtcaagccaaaaacccagagggctccacgtctggttttctcaaagaaaaagtggggagggattggagaaagcggcatcacgagctttatgcactctatacggactgtcgaaaaagagaggaatcagagagaaaatctgactttctgtcgagtggctcatgccacatgttcacggaacgtggagcagcgaactttcgaagcgaaacaaaaattcggtttcttgcgcgactcaagtgcgacattcatcgacacgctcctccgcagcgtggagaaggcatggcaacaaagaatcaaagaaccatatgtgtgacacgtagaacacaaccgatgtcctgtataggcttgctgtcgcaggacgttgaaatccaccagctttttaccggtcttatgccgtccagggcggtggacagcagtcacaaaggactgggtagtctgtactttttcgaaccatctggagtcaggtcaactggagactccttcccccagtcaaaagtctttcttggccaatcctcaaaagtcaaaaaaacgggacgggtgacttgcagacttgcagagcttgcttcagtgcccttcctcttggtgccgtgttgttgaacttggccactgagtaagctgaagatggtattcgtctggaatgcaacaaagccactccttagaaacgcgacagcgatgtccagagcaattaaaaactcctgtcggctttgccctcacgcccgttcctcgttcccggtgtggtgtatttcaacaagcacacctacgctgtagctaaaagcgactgcggacagatcacccagttacggtgcttagttgttgaatccacctgcatcgttgtgctccgttcactagtgaacctcgaactgacagctgaaaacataccagacgtctccaaagataaaaaagaagtttgagtaattggagcgctcgtggcgggacttgacccaacatgtcacgacacgagctgacgacatccacacttttcctgtgattcttttaacattgatagtttcgctatttgaacctagtatagctgaggtctggcaacgcttgtcactgttcgactcatttgattcatgaacttcgcgcaatagcagctgagaacacaatggaccaagcacagaaccatggcgatgaacgtctgcatcacaagtctgagttcatatcgtatacctgacaggtagtatttctcgaacggtttcatggactgttgaagataacaccatgacaaatcgagagctgctaggtttgatatttcccgaaccagccggcctgaatcgatctcgcgcacggttgcggcgaaactcgtggaagcaatgagtgaaagagacctccgaaaagaagtgtattaaagaggcaatttcgtgtcatgacttctaccccttcttccttactgttacctacacacagatacacacggaaacacatggacatacacatgaatgtatatatatacatctatagatagatatatagatatatatttgcagatatatgtgtttattcaggtgaagaattgttttctgcatatagagaggtgccagatgttgcatttgattggatagaaagtattgtctcgcagcataaactgttttcatgtgatgcatttcgtagaacaactagcacaggcgcgtgatctcgtcgaccacaccgcggcgatgagcttcagggtgagtgagtctgctcaacatagaaaggcaacctaataactgcgctacgttccgaacacgttttcaaaagaattgtattcttcacccttttatgaagcgaaaaatcctagctttttcgacaagagctatgagctgcgaactggacgaggtctctccattttcgaaaaactcggaccactgattgacgacgtgcatcagcacttgagttgtgtttcaccgtttcgctcttgttcgccggtttttgataggccttcttcctccttttttcaacagcataaatctacgtacacatcatagaccctgatacctgtacatgatcgcaacctagatgcatatttatagagaagaagcaagttccatattgactacacaggaagtgcccacgccgctgtgtgttagaattgatgagtaaatcctctttctctttgtggtaaccactgattaacatcagcgaaaaactgtatcgtcggaagagagaaagcacgaaatatgctaaaaacagaagctgactgaattatcctcgtgtttcgctttttacatttctcaccgccaaagaacaacggaggaactccactttcactttttctcttttctccgctttttctctcttctccgttatttcatatcgaagactctctctgtttttcttgctccgttggtctctgttgtagcttctctcggacgtctatccttctccggcaagagctcgtgtctacatttcctacggtagaggaaacggacttccgccgaaatcctgcgacagaagaactttttcgttgtctttcgttcctcttctctcttttacacttctctgttgtctgctgtcgtcttcgttagctgagagaagcagaataagccaaggtcgttgccctcgattctcaacagagtgcgtatctcctctttctgtctgtggtgtgttcagccgcctttgcacagacacacatcggcgtagcctgaaagaagcagctctttgaagccttctacgcatttgtctccgttgattcacattacgtttcgcagtgtctatttcgcattcatcggcgctcttcacactctcaaccgagatacctctctgccgattccagcgtttctccagagagaaacgttgcacagcctcctcctagtcgcctttctctttccatcgcgaggccgttttgatatctcgctctctcgttttttcagacactttcccccaaagaaacagagctgaaccactcttctcgctcttcttctctctttcctctccttctccgcttcctcgcctggagaactcttctgtcttgcgtcggcgggaacgcctcctcctcgctgcacgcgtcgtcttgtccgctaactttttttttggtcggaaaccccttccttcttcactcgacaaagactcagctcctcttcgtctttcttctcttcttcctccaccttgctctcctgaagtcgctcgtcttcttctctctctctggcgagaaaaccggtgtgtcgctttcaccgctgcgcggaggcaacgacccaactgacccttgggctctcatgcgtctcttggatttttcggcattcttcttctcgtctcctgcgaagcttctccgtctccagactctgcctttttcccttcgacttttctttcgccgtcttcgctccctcgtcggtctctcacagtcttcacatgcgcgaaaaacggtctcttcttctgcccccccgaaacaggaaccggtgtggatatccacgctttctgttctggactctcaggtgtacgtacacctggacaaccgtctgtttcccgcttcttgtctctccaggcgttttccgtaccgccaaccgcgcacctccagggccgaggccgggcgtcggaccagaacgcgtcgccctgtaatacgtcgtttttgctttgcctgcgttctttcttcttctgtctccacactgagtcaccctggagccttctggtgattcttctggtgtttccggtcttccccatctacgccaccaggttccgtctcttccacacgcagtcttcctctccacttccccatcaaaggatctctccgagtctcctttactcccccaaatctgctctttctgtctcctccttcgcgtctgctctccgtcgcctcccgcaccgttctctctccctgctcctcccgtttacaccttcaccctctgtcttcggcgcgtctcgagtcggctctgagaggcgccggttctccccggcttcgctctttcgacgaggactggccctctttgcctcgggtgtagaaaagactgacggatacacttcccaaaa

SEQ ID NO: 1150 - DNA, 3923 bp, Toxoplasma gondii
  source 1..3923: mol_type = genomic DNA
tgttaatacaaaagatctgggtagagatggtgaaggatttgttcctccgagagctagaggtggagaaagtctcgtaatgaaggcaaaatttagactcgaattttcttgaggatgcgtcatctttcgaaagcgaaaatacccgcagataatcaagtcatgtacggttgcttctacaccatttccctccctcgggtggtcaaaaaataaagcgctgaactgccttattcgatcggcaaaagtttttccctggaagctaaaggtattgcccctgttggtgcggtcgaagcctagacccagtgtggctctacggaagaagagagcagctaatctcacggccccgtgacccatccaccctcgccaaagttacttattgagcacatatatatgcgacacttgagagacttggatcgccgagctcgaacgcaaactgatcatgcgtctactacgccagtctggaaacctagcccttgaaacgaactggcaatgagcaagccccccagtcgcccttttgcaaggcaaatgctcgaaaaacacaacgaacgcaaagcacgcacactgggcatcggccgggtgaaggccgcggttatgatggtggcatcaagagtgaggtagccgacgtaggcggtccagtccgttttcacaccgacggagctgagcagattttggctttgaaggatttcttggcttctccaggcgtatttctgcctcaggaattttagcaacttctcggcctctgtcgagcgctgctctctgcggctttgcctccaactcagcgaatctcctccgagtttcgtacgcttggctgcggggcgctctccaaaagaccgagtgtgtgaggtgtctcgacagtcggagccagccgctttgtcgctcgccgcctcctgggcttcgctctcagtctttccagaacgaatccgcgtcgcagataaccctcgttttcgggtctccactctcgaggtctcttcttgctgccactccacctgcctcgaatccacggccgctgtccacgcactccgttcctcgcatgattgcgtcaaactcgaggttcctctctcgggtcccgtctcttggggggccttagccggagcgttcgcctttccttgtccttctgtatgcgacgacagatcgaagtttgtctcttgcgtgcgggtctctggagtctctccatcgctcgtgtcgtcttcaagaagaatcggcgaggacggattcgcagcctcacccgaaccgggtgttgaggcccgcgaagccctgcccggcttcctccaggcggagacaggagtgaagagggaggaggtttgcacggactctatgctcgcagaatctggagccctagacgggaagccccgcgactgtggcggggactgggagaagaagaggtcgacggctgcattcagatcccagctcgtcgtgcgcaagagcgagagagcgacctcctcggaagcccccaggagactcgtcacttgccccacaagcgtcttctgtgagcgcgacagctttccaagacggctgagcacctgacgagacccgctgtccattatgaggaaacagaggaaccaacggcctctcgcctcggagagacaaaccgcgagcagcgacacgagactcactggctagaagaaaagaggctgaaagaggacaagaggatggagaggaagaaggtggaagaaaagaagatggagaaagcagatgagagatgcgacatgaaaaagtgcacacaaatgggcttcatagatacgcatagcgacacggtgaggcaagagttgaccagaaaggacaggagttcggagggtgcacgcaggcagcccgaatcgacacctcagctgtaagtaccgcagctgagagatgggggcttcgggaagagcacagtgccaaccagaaatacgaagggagaggctagcagaccaggtagaaaacaacggacaagaagggcggaatcatggaatgagaacggaaagagacgttttcgggtgcagagagtcacacacgaaaacctcccacctgtgctggttatgggtcaaaaaaaaaatcggaagagaaccggttgtcgcttcagtcctcagcgtggcgatagaagtacagagccaaccagacggggaagcgaggaagtgtaggaagcccttgaaaagaaagagagggtttctgagagcagagaaaggagcggaaaggatttggagtgtcgtgtcgccgtgtacttgaagtttcactgggagcaaattagttgacacaccctgtacagtttcgcggctgaggagatgaaacaaattctgtgtttttggaagtagaacgaaaagagtcaaacaaacgggggacacggtgcgaagatggacggacgaaaacagatcgtactctgcagataaacgatcatcgattcagggactacgcttcaggtcacgaattgttcacgaattaacattggggccctcaacgttcgaacctcagagagatagaggaagagaaggtaagaccccaggggaaacaacgggggcggggcacaagaaccattgagggaaagaagggatacacatgcacctgtaagaggcaggcggaggagcagtcagaagaaacagcagacactcttccattttacgtggcatctgaactaaacaagaaaggaaagaaactttttttcgggtcttggtgaggtgttgacgtgaatcgagacggacgaccttcagggagtcggagagagacacgcacactgggaaggcgaaactagtgagactgaagagcagtatttccagaaggagaaagacaactacctggaaaaaaggcgacagagtgcggccgtacggctgcagaatgcaatccttcacgtgaactctcagaaagtggagacaagacgcgaccctccacgcgttcaccttgggccgacaggaagaagagttggctggcatcgaggaaagatgccgcatatctcagaaaaaattgagaaagggaggggaacgtggatggaagaagagtgctttcctccgtcttcatggcccgcaatccgataaggcaaactcatattttgacgatcaatttaaagcatcaagtcaccgcaggttcaatttcgcgttggggggtgctttgccctgctcgaaagcgctggccagcccagaagggaaactttgcaaccccacctggggaaaagcgggctgaagcttgcatgtcaatctcggccgatggctagttaaactttaagggaaacgaaggtctggaaacccgctcgacaagggaaaagaaaaaaaggagtccacgatggaaacatagtcactcgagtgtctgtcgcagcggcagctctgctagaagccttccctgcgtcgaacatgaggaaaaccatcctcaccaaaaagagggcttgatacaggccagaaaactttgatttttttaggcagaagcaaataaagagatacgattggcatatcagcaagagatcgtcccattttgttgggcttttccagtccgactatcaacctagaagccaggcagtgtgcgtgactgcatgtgccagcttgagcaccgcagcgatttgccgctaggcaggtcatcagccttccgtgttccttagaaagagccgagtttccttcaaatagtcagtcgactgctttaaaatcctttgctcaacctttactcaagagtgagtgaatcaaggatgtaactgtctgtcttccgttgtcttgaaacccgattaccgtgacccagttgttactcaggtgagcacgcctgtttcatttcctccgatacaggcgcggcctgctcgcatattcgtgccctatgccgtcttgcctgaaatccgaaaacactggaactatcgacaggtcgcctcgattttgcctttccgggaacccttgctcgaacattcgagcagattcacgaccgcaggtttctttcggaaaagtcatcttcccgttggaaagggattgcaccgctggttatcacga

SEQ ID NO: 1151 - DNA, 3585 bp, Toxoplasma gondii
  source 1..3585: mol_type = genomic DNA
taaactgacggcaaggtggacacctgagaaagggtaaaaacacacacatagatacatctatgcgtatatttcctatatatatatatatatatatatatatgctcttgcgtccagagtctctctgcagcgagttgcaggttcagtcagccgccagaagtagcccctgtgaagcgtacgcatgcagccgacagagcacctcccgcttcgtttcaatgctgacatctcccagcccccttcgcttcttcacgcaactctctctccacgtagatgcctacatgcaaacatgcatgcccacatacgcacgcgcatgcatacatatttacatacaggcggatgtgtaggtacatatagctgtatacagacaggcgcatgcagaggcagcctgacatagaacctgtgtacgcagatttttgcagaccgatacgcaaacttttgcgaatatacgcgcgtatggatgtgcaagtgtcgagggcctgtcgttgtgtcgcattttttcagtcctcaagtgtggaactgtttgcattcgtttggagtgcgaacgggggagaaactgaagcatttgcagtgtctttcgcaactgaccagtgggcgctgaagtagacgccgatgacacccgagtcgatcgaggcggtaggtacctggcggtctcctctcccgataagcgtcgggccgagaagtcgctctagcgccgacatgtttggaggaaagagaagagaaaagaagcagaagagacggaggacagacgcagaatggccaagacgaaacaggggaagctgcggagagacggcgagcaaggcgggcggagcgagacagcgcagaccgagaccgagagctcggttagtcggtagaggaggcgctgcaggagatggcgtagaagggtgattggaggagaggacaggtagaagacagagaaacaaggacgagaaacaagaaggaaacgagcgggaaaggacgaccaacacagagaagggacagcggcagctgatggagcgaaaaagtgtcacagctatcggtgttgcattcgagagctgtacaaggcaacggagacgaagaaggttttggaggccgcttttccctcctccctttgaattttgcacgcttgacagaaataaaacatatgctttctccccgagagacggacctctcgcgtgtcttgttgtcttctgcgcagaggtgtgcatgctttgaatgtcagcaggacactttctgagcgaagcgcggctcccagatgtaacaaaaaacgttccgattctttgtccaaaagaggagtctggactgtaaaccggaattcctcagtgttttgcatgcatgtgtggaagcactaatgaagatctggaacgatgcgctgggacagatcggcagtcctcgacggcgggcacagtggatgtacaggcggacacagttcaacaaacgtgcggatctaggcaggtaacgagcgtttttccgacacagacaaaaaaagtgcctttctctccgtaaaatccgctccggctgcatgtgtcttctgtacagtgtctccgccgttccgttcgcaaagcccggcgcatttatgcagttcgaagtgagcagttcttagatggaatgtgatgacgcagtgcgcggaaccacggcaagggagtagaccatgcggaaacactgttgcctcaaactgagaaaccgacttgcaaacattatcccttgtacggacaggtcgagcggttcctttctgtggtcccttgctcacgagcgccgctctccctgtaccgggaggtctgttgcctcgtatcctggtagtattctgcaagctcaggtttcttcgaagaagactacagagagacacctgtgaaactgcagtctctgaggaagcgtgtgtgacactacgaaaggggcgccgcgatgcgaaacgaaagcgatcacttggatatccctatctcatgactggagtcacactcagtagcgtggacactatagtgtctctgtttattcgattcgagttacacagttcctgatgatgagggctgatcactggtgcaaagacaacatcgacttaaaatgcgataaaaacagcgcatggttgagcgatgatctttacgtttgtagtgatgcaatgtgcgccacagccttagcgccacgaaaagccgctacagtcgtgtggattactacacagaacgtcggtgggagcgctttcgagtggctcgatccgttctaagtttccttgaaaggcagttggacacatagaatccagtcgaggatctatagagtcccttcctttgacggagctcgtggttagtcgcttctcagccagaagagtggctgtacggctttcctgtctaacgaactcagcagaacccctcgaaaagaaagggtcgttttcgttcgtttgaacggtacgacagtttacctcccattcgtcgagctgactatgcaacggacttggcttcctcacgcccgcacgagccgggtgcctcggctgttctgtgacgcatgttgcctcgttccgattttgacacccttgtcatctttgtccttaatggatctgttcattctgacgtgtgccagcaacccagaaactctcacgttccttacttcctttcagtatccagccagatgcacgcctgcccctcactttgagtggctttttctcgcgcgtggtacgccacgtagaaaaacgcctgcaaaaacggacttcctcgagttttttgtagacttgacattttgttcactttctgcccccattcttatcactcctcggcagtgaaaatgtagaaaacacaccttctgatcgcacatattgttccccttttacgttcaaaatgggcatcgtgtgccgttttctgcggcatcgatcgcctgcttgctgctgtaaattttagtcgcaaagcagcccccgaacctgctttttatgttttcacttcagtcccgttgccagttcccgttccatcaaggaactacccgttacggaggcagcggctctccgaacaaagtcgttttttgtccgctgtaaggatgtgcagcgtagaacacagacgttttcgttgtttatggcaacttccagttgcattcacgttcccagcgtctatagcggagggtgtctgctttttcgtctttgttcgtacgagcgagagcctattctaaagacgttctcggtagattctcctaaggcagacgtgtttgtcgcgtctagagaaccacgcgtcaaagaggcaatttagaagtcttttctcgacgtttgtgtgtgctaaaccacgcctaaagattctgctttgtgcctcatacgagtaagcatccaaaaccattttcctcgaaatccattaggtcttgagccatctcagagccggttcttttcaataagggcttcgatgtcatcgcttctcgaggccgtttcgcgacttctttgaaccaatttacgggcgaagtaaacattttcattcaagtctaagctaaactgatgccacagactcgattctgtgtgtcgttttccgtttttttggcacgtccccaccgctgtcttgaggtcccccgaggctccgttgcctcctcccgataagtctgccctctgtagcgcgcggcagtttctaaaatgtttgtttcccttttggtggaaaa

SEQ ID NO: 1152 - DNA, 3549 bp, Toxoplasma gondii
  source 1..3549: mol_type = genomic DNA
cgtcgctgtcgctggaagacacctcagttttcctttcctgctttccctcgctgctcgtgcctcggcgccctgcagagcctgccgcggtcccgctggcttgactcggcgtctggcgcgcctggccagcggggaggggcgttgctggctttcgactcccgccgtcgtcccgcgtcttcttcggatcgtgcagtactcggggagccgcgttcagctttcgcttctctgcaggggacaaaggatccctcttccagcaactcgtcggggctgcagagcccggcgcttcctcgtcagaagaagacgaagaagaggtggaactctcgtcgctggagagggccgccaccgcggcccgcttcggcccaggtgtacatacacccgaggcagggcctctcccgctggcctctcgcgctgcagccttcgagggcctcccaggcgtcgacggcatacgctggagctttcctctcctctgaaaaggttttcggggaacttcctcttcggattcttcgctgctctcctcttcgctgctctcctcttcgctgctctcctcctcgctgctgtcctcctcgctgcttttctcgtccagggcgtcgccggcactcagcgccttgcatcccttcttcacgtggttggctggacgtccacccgagcttcgggggtctggcgctgaagaccgctcgcgttttcttgcgcccgcggctgttgcgggcagcagcgagtgtctctgggcctcagcagagccgcggagaaggcccggcgactcagctgtctgtgcaggcactggagtgtacagacacaccgtcacgacgtcgtctttgtccaggaggtcgatgggctggttgtcgggaaggaggaagttttcgaggcgcagcatgaggtcgacaggcttgccgagcgcgacctctgcggctcgagaactcgctgcgaagcaggaggcgttgacatttcggctgtcttcacacgcagaaagagcgagaagacacgagggagtctttggaaagcggccctgagcgaggtcagcgagaagcgctgctttcagctggccaatcgtccgtacgctgcgacgatccacaaacacacagctgtcctcaaagactgcaaaggagattccagagacgcatccacttctctgcagagactggagagaagaacacaagcacgcagaggacgaggaagaagcaaaggttgaggagggagaggaggaagagttcccagacgaggaggatcggatcgaccggggggcagtggaggaccctggaggggcttgacatgcgtcccctgcatgcacaggctcgcactcatttgaacctgttccttgacacgaggcacacaccaggccaagcgggtgaggggcatgcgcacccgccgcttctctcccagggagaaagtgggagcagaaacgcagtttaattcgcatcttgaaagtagttcagccgcgctgtataaacatgcacatatatatatatatagttgtatatatttgtatatatgtatgtatatgtatgtatgtatgtatgtgcttgtgtgcatgtagattacccgatgaaaacaggtaaagtttcaagtgaacaccagagagaactcgatctctcagactaccgattctgtacgggggatcgcaaggtgccgtttgaaacggcgcgactccgtccgtcgcgggctctgcacgctcgaccgcggtttcggggaagaaagaataagtcgtctcgagcttggaaaatgcaacatcaacggctcgacgccagcgaaaaagaaggagggaaacggagcgaaagagagggggcgagagaagggaagagagaaaaacggggcgacaccgagagagaatggaagacaaagatcaagggaggaaacagaggcgaaatggagaagaagtggaacggaagagaagatgcccgtttttttcagaggagccacggaggcagaaagcagcgtgtctatgttttttcgcgcaaggcgaatcctgttcgcagagattcgccgtagaagagaaagaacttcacagcaaagtggaaggagacggagaaacaagtctgaggttttccagagagtctctgttttctcaggacaaaagacaatttgcatcttttcgtcgagagatatgcatgtatcgattgtgctgttgcaagtgggagcgctcgtcgctcctcgctcctcgcctcgagcgagtccttccctttcgacctttccgctcctcgaatccgaagaagtgcaattccaccttctctctgccacacgtactgaagaaaaacgtcctctgccgagagcgccaagctcttcgcctggcggggcgcgaattcgaagcatctgcatgtcgtcctggacagttttttctctctctcggctgtccgcgagggaaatgtggggtggcaaggaaacctgacggcgcgagtgtaggcttctcttctgcaacacaagacgggcaaactgaatccttcaatggagagcgaaaagcatcaatgcctactcacacatccatagaattcgcgtccaagtgaattggcgcaggcgcgtctgcagctctgcggcgatgcacagctgacgttcctgagcagaggagagggtgagggtgtcgagacagccgggctcgagtcgccatttcggggatttttgtcggtggttcgcgcttcgctttcgaggacgccagttcttctcggaacgtgtcaagagtcgagcccgatcctttctttctctttgctccggagaaaaaggcgcaaagtgcctccgagtcgacagccgcagacgcggcgaggcgatgtgcacacagagcgagacgcaaagacactcaaaaaatatttccctctcaagcatctgccgacagggagccttcgacgcagtcacaactgagccttgaaacattcgccgccattgtttttgaggagacatcacctttagaagagaattcacgtacgtgtgtatgtttgttcgtttctgcgaatgaaaacaagtttgcgtggtactggtgagagacagaaaaagtggatggttaaaatgcattcgggagtctctgtgtgtcgaggacagcgagcaggagtgtttcaagtttttcacttcaaccaggcaattcctatgttcacattttcaaagggaacgatacttttcttcctggttttgctctcaaagctcctcgacagacctgcgcatctctcgcctacttcaaacgcttctttttgccgtgaaaaaagctcgacttggtctttcgttcctcttttctccagcgtcttccctcgcatgttccggttttaatcccctttcgtcttttcgcggctctcgcttgcgtcttcctccatatttacgtcagtgcccctcctctttcttcgcctctcgtctccaaagcgtcctctctacaaccttttcccccttccgctctctcctacactatctgtcgctctcttgtgctgctcttctcctctccgttttttgtcggattctctgtcttcttctctgtcgcgcctctgtctctcttccgtctctctttcttccgtctcttcgcttctcgctcgctgctgccttccagcgtgctccggcttgcctttcctctcgtgggcgtggaga

SEQ ID NO: 1153 - DNA, 1515 bp, Toxoplasma gondii
  source 1..1515: mol_type = genomic DNA
tcatcaagtcctttgagaagccttctctccctggtatctcacagtttttttagaccctttttgtagttctcattgctctcttcctctttttgtcttcctctcccttctttccttctctgcacctgtcgccttctctgcctgtctctctttccttctttttcgctctggagtacatgggcgatcggagatgcgaagaagcgcaggcacctcagaactcgactctgcaccgccatgttcttcttagaagaagcaatcgaggagcatgacgaattgcaacttttgatgatttgccgtgtgtaccagcgagagaaacagcgtttattacgcgccggtatcgtccctaggatccggatatgtgtgtgtctattagccgaatctactcggttctttgtattgaccttactgctagagacagggcaaatgggagactgctgtacatcttgttgatttgcatgttcgcttgaagtatttcatcctgttggggaagagcagctgggctctccggcaatctcttgtcttctcgggggttgcgaaggaggcgctttttccagtttctctcttttcagggcatgcagtcggcgagcttcgtttcggttcttgtgatgaatacagctcgacaaacgtaaattgatatctaatgaatgcccgctgcttcttattgaaaataccagcaatgcaacgttttagtgaagggctacaagggtggcgtttctgtcgaaggaagcgaaaaaaggagctagcgtgtagacgctaagaaagtccttctcgagcgtgaaggccccgcctgtgagaagtcaatccagttgagtgcaacagacacccagcatccgtcattaacgaatgcagatcaaaagcaaccttaagcgcgcgttttctgtcttttgaggcagctgtacatacaccgcacatccgccgtcgacgctggctgcgtggagtgcgcagattttcaggtcgaactcttctttgagtcctcgcgtcgttcctgttttgacaggaaagttgagggagaagatacaagaagggaatgaaggagaactccatcgagacactcgagagcagcggcagctcactttcttgcatgcagtttgcggacagcgactctcgagacgacggagatcaaacagacagccgtaaacacgttttcctcagaaacgactcgtttgttttcttctatctgttttctttccaaacgtagaagccgagctaagacttctcagcaacgcgcgtccgtcttctctcctctctgttctcgttttttccgttttcgtcttgtcttgttcttcctcgtttgtccttctctctcgcctgtgtttctcgtcagcagttttgcgtctcctttctcgagcagtctccccctttttcttctctctacctccttctctttctcttctcttcttcgtcttctggtcttcgttctctcgcctttgcctcctccctttccttcacttcttcccttcccccttcctctcgtctctcctctgctctgactctccttcgtcgccacttgtcgccgaa

SEQ ID NO: 1154 - DNA, 4355 bp, Toxoplasma gondii
  source 1..4355: mol_type = genomic DNA
tcaaattcttgacataaagcctgtggcagtgaatgaagaacacgatgcctttactgaaagaaggattgccactcgcggcagaccagtctcgatggcctcatagtcttgctctctattactggagactgtcgtcaatcacaataacaaaaaggcacaaaagcgaaaggagccgccgcgcagcaccctggtccagtcacaacgccggaccacccaagacggaagcgagcgacccgtcgctgttaagcagttgcaacagcgctacgcccgagaaacaacccacacaaacagtacacgagttgtgcctagtgacagggcactacagtattatttccactactatggagttaccggcggcaacgaacacaaaacgcatagtttgggcctttcgcccagtcggacaccatacaaatgagcatcagatgaagcctctcgttactacactgttgcacgttattatgtagttacattgacccgcaggaaattttctgactgccttgttaacgctagcgaacacgctaaagcaacagacacgcggactgagcagtccgaatatactgcgacctagtgttagggcacctgaacgcggaatataagttcattcagagctcaaaatcatgagaacgacgaggcaaccatacattcagcgtgtttgcagactctgtatgttgttgttgttgctacgaatgcgacttgatgtccctcccaggcacgcgatataacgccgttccgttctcttggccagtgagcaccagagcgcgggtgcggaggtgcgatctggaagtggccgaagttggatggaagtaggtatatttcacaagggaaggttcatagagatccgattcgctgcaaagcgtttcggccgcagatgtatcaaagacgtcagatacagaacaggcagactggcaaacaagccttagccggcattcagtgtgctcgatctccggagcacagaaggtcccacaaaggcggcgacaccaaaacaggcagacgctccttattagaccaaagtcgcttttctgtgtccggcaaccaacatagaaattgttgaactccactggattcctccggagtcggcacgtttttgccgcatgcagttgcgaacacctaccgaaagcataacggggtcatctaaggggccctgcctcaaactcgtgcaaccagacgtaaactcacgttcagcagtatcgagataccaaacatccagagaaccttaggaggttagaaaagaaccaaatcgtcgtcgcaaccacaagttgtccagaaggcctattctatttagcgaggatcgtgctcggtgtgtcacgttcgctgtttccatgcgtcgcatagccatagcattggtcagcaccgggccgaatcaatcctgacgtcttcggcacgcgtcttagggaagcagggggcagaaacggcttatcagttggcgtcgatatctttgttggacacataacaggcaatgaataacaccacatgcgaattttcctttaatctgttttctgctagctattcggctgttctccttctcttttggcaccagttgcggccacctctacaagaaggggggtcaaagagcggcctctacttggcccgtctccgtcttcctagtccctgtgttcttccgcactttatcacactacccgtcgaagttgtcccggcacctgcaacactttgtatgcagaaggtatctttctgccataatatcgacataggtttagtgctgtatctgatggcaacgacggttttgaactgttactcagagcagagcaatcgtaaacacctgtttgtcgcagcactggtgctgccgtcgacacaggcgtaatacgaggacaattgtgtgaacaatgttctctaaactcgacggctcgtggtttatgcttttttgcgccgtagaagtctccacatcaacgagctggggcaaaaggtaaggggaaatgagatgcgagctccataaaaaaaattgtgttcagcactcggcaggtacgtagttgttaattgaaataatatcaacgtccacggtgtttcctcgtgatgactgtgtctcttacgtgtttccagctctcctcctcaaagcggcacctagaccgggtgaactctgcggatgcgtccacgtgattaacggagcgacacaaacagtgcctagtacaatctagagtatacacttttcgtgattcaatatgtaacctgtcagaacgaagggaccagtatgtgccaagattgccagcgactgcacttggcatgacgtacataggcagtcgatttagtcatccgaggaacagagatgcagctttcatgaggtactccaccgagtcctggaccgtgcagcggggaattactctgggtcagtgttagtggcaccgtctgcgtggattaagttgcttcttactctaacgattcaggtggcgaagcttgttgaccggagtggctcacacttgcattaacttcgctgcagaataaacggtactgggaatcgaaactgatgcagatgtgctgcagacagtacgcagttcctttgggacaataacgctattacgtagaactgtaggggactagccagtctcgggacaagaacagtaggcagacgtttctgttggtcgctcggaacttgagaatcgactaaacttcgaaaagattcgagaaaggaaccccggcgcgcagaatccacgtatcagaagaacagtccgattcagaagctatgaaagctggcgctgaggtcgttgctaaccgttacgttgacgacggtggagtgtatccactccgaacagcgaagtgcaagtactgtagggaatgcagacacatttttttcgatccatgtgcaggctaacaaatccaaacccagactgtctgtaactgcagctaattcagatcaggcacgccaacgctctgatcaacttcagagcaaagaaaatgctgggtagacgctccctctgcgcgctgaggcatccgcaccgacagaggcacgcctgcatctactgcttacctcttacaacttatcaaatcacagggactccttccttcaataaggcatgctggcacgtcccctcattttacacactagcacattctgacaaagcggccttgaacgaattctaccacatgcagttcgacggtcaatggaggaatcacataccatcaagcgtactcagtggcggtctacgccgctatgccatttaatatcgtctactggtgattatcattcctgtggatgaaatgttactagaaccttgaggcgtcggaaggacaaacatagcaacgtgggtgataatcgccgagtgaactctcactgtagcgcacacctgtggttctccttggaataaagcgttacagccaattcctttcttaaaagacagtccactatatgagcgctgcactcacatcatcattttttccgcttaagggttagaaactgaaaacgttcacttgagagcagaagtgtttgcgcgccgcctggcacggactgcatcctgtgtagtccgtgcatgctggcctcggggttggttcccggaaacaactacccttttatatcaacgctgtcgtcacgtaagcaacagaccttgcaaaatccggcacttcctcaaattcactcgggaaaatcgtcttcaagggtctaaatgtgtgagaaactcgtaaaccggtctgttggtatgacgaactcgaatcggtggctcggttatttccccgtcgtttgcgaaccggcagtgagcacgccaccacaaggcggctggctggctcgtgttcacatccctcagaacggggatatttgcactcttcgaagaaccgattccctaccgcaactacatggattcccaagaaaaagagactgtatcctctgcttaaggctggtggcagtaaccgtcgagtgggtgggccgacgaaagctgcaaagacgctctcgcagcacagcaggtgggcggccttgctgtactgtacgtacacgccggctgagggcgcccggccgtcatcccgcttgttggtgccgccccttaccccaaagtggttccacgataatagcggttgttcgacgaaagtgggggggtggaaacagaatgagcggctaaaaacggtcggcgcagccgtcaatcgcaaagaacctgggtgacagtttgcttttctgtgtgtggctctgagtttttcatcctttctcacattctgtctcgtccaccattgtgtctctacacttgctgtttgcatgttgcgggtgtaagagttcatctagtaaggcgttcccccccatttcttcgagtccagttgcagttggtcgaaactctctagtttcttcgcagaatcaccgctgcacttgctgacttttcttgcagcagcgaccgacaccatatttttcgagttctttaactttgccgcaa

SEQ ID NO: 1155 - DNA, 1681 bp, Toxoplasma gondii
  source 1..1681: mol_type = genomic DNA
tccttgattcaacctgtggcgtcaagcgggtaaaaactttttctcaactgcttccactccgcgacaccctccactgaagccacagcacgaaaaaacttggatccggtaaacaaagactttccagatctaactcagtcgtccaactcgtagtccgtactcaccagaaaaaggtaatttatataaacctaggagcctcactttgcaatgcgtaacagagagtttagcttcagctataacgtggtgggtactgctggcgaggtatattacgactcttattaatgagagcacagttcgctgggtaaccagtccagagttccgccttgggcaggtgacccaagcagcatctcactccgcgaacagatcctaaatctccgtagttcttgcccttcttccacacagcttacccccaccccgcttacacgttgtcagtgtttaggccgccacaaccgttgttgcagaaagtgcctgcagtatagttggatcgaccgggacggagctcggaccaccaggcacgagacgacgtcgaacaacctgcaaatgtgccggggggaggtgctggggaatcgagtgacgcttcagtgaggaagtggcgacaacgagtgtaacagctggcgtcagacggtagtacggcgtcccagtattgtcggaggtcctgaaacgaaaagacaggaaaaagatccagaacgatgccatcgtcatttctctccaagtatgtgtacacccttcacgcgttcatcgtgaccagcagaaagttaaggcaatggaatctcagtctgctctgaatttctttagaggtgcaccctctgcagcggctctgtgtggaatttcttgcgcggcagcggaccttgagggtactggtaatccaacccatcgtagatgcagtggcgagcgaaaccgaggaggaaccagctgtgaattcaaatccggccaagacctgcaattcctgcgagtaagaaatcgattattgcctgacgaaatgctctcatttcactaccgagtgcccgatgcaggcttctgcatgcaacggcgcgagctgtcctgtcaacaggccgcctgacagatccagtgtgtcaccgcttcaaaacgtacagcattcccctgcaacatggctaacaccagaccagctgcagcgtgtaatagaaaggtagatatcaggaaaacgaaagagaaagtaccgcacaatcgccgacgatatcgtagacgcctcaagtcacattctaccatgacagacaacggcctaaacgaccagcgccacaacgcttgaggtcatttgcgcctgaatgttggaaaaacaaggaaacagaaaactcaactttctcctacgagtacggcgaatctccgtacttcttacttgtcccacaagtcttgtacttagcgctgtggacatgaagctaaaacgagctactcgacatcgacaatagtaacgtgtatgcatctaatacaggacagacgcgcatgcacatgcaatcgagaggcggcggtctctgcgcagatatggtttgggagacaacgaaaaatacccttattgtgagaaaaatgaataacttgtttccccttccctactcaaacatctctctttgctcgattgtggtgcatcagaactttcaactttcttcatcgcggcgtctgcgccagcgattgttttgtgacgctgagcgcgttccaaggatcttggtgtgaa

SEQ ID NO: 1156 - DNA, 3819 bp, Toxoplasma gondii
  source 1..3819: mol_type = genomic DNA
gaagaagcgtatcgatgccgtcttcggacatttcatggtggctgacttgaagggtccacgccgcgagggagccgtagtcagggccgagttccttggcggttcctggactttcgttctttagttccgcgccgtcctcatccgccgcgctcctaactcggtgcagaggcaccaggaggcggacgtcggggatgaaggagacacgaaactcccgcagaatgtcccagatggagtcctcctggtcagtgacttgtgcggcgcccgcgtcgacggctgcgaagaaggcgccgttcttctcggtcttgacgcgctggccgagccggtctgccaggcggcggtaggtaaccttgaagcggatgcagtgcggacagtgccgcgagaaaaacaggacgatgacgacgtcccccgccgtcagatgttgcgcgacgaattcgcggaaacctgacgcggacgtcgccatatggacggggcttgtgccgaacgggtgctcagaaatgaccgcagggacagcccggtgcgccgcgggggatagattcgcaggcgctccatcgacgcgggagagaagagaccacagcgaagcggagaaaagcagggagacgacgacgctcgcgcgacccgccattttgtgacgcctcaaaaagtgagaagaaaagagacctatcatacattgcgatccaccggggaaacccacgaccagccgcaccgagctgcctcgcgagcgaagcccagttttttgcctgtgcacagatctggctgcgtgagaaaaagcaaggattctccgccacaaggactacagaaactggacaacgcagaatgtaggccgcttccacggagcataaacagaacgcacctcacgtggagcacagaacgcacacacccgtagctcgcgcgcctttgcagtcttgtcccagtccagcgccgaaaaggcaggaaaaggaagaattgggcaggaaaggtcgggagaaacgtgtcaaaaaaagagcaacttcattctgtgcgataaccgcgcagaaggttgcacacctgcgaggccggggttttgtgcaccctcgcaggcacaaaggaaaaccgaggccgatatcgtgcgaaaaaaaacacagaaaagggaaaggatacaatggacagttcgcgggggcttgtcttttggctgcgcgctgggacgctcacgaaaaagagggaagaacgggagccgagtgactttggcgcgcggtgctttgcatggatgtttctccttttactcaggcagaaaacgcacgacgaaggcttgcgcgaacccgattctttcggttcgtgtggcagaggagcgtaaaaagggaaacaggatcgaagaagaaccggacacggacggacgccgcgcgagaaaggaggaaacaccagtgtacccgtttagccgaaacaaccatttctctgtacggcaaaagcttcataaaagaccgaatgcggaagattcaagagcggtacccaccaccctgagaaaagaagtagcctgtgtcgcattcccacgtaaagaaatcgcgcgcgacggcgcactccgcggggcatctgaagcggacgtggacgcaaatagttccttgcctctgtcgtgtcttcttcggggtgcctgcagagtttcctggcggagtgcttttcctgaaaacattccaaaaaacagacgcttctggcctttccaccgctcaaatctgggcaggggacgcagtccaacatccgatccacagtcaacgaagtagagtgcagcaaagaaaagatcttgcccagtgctaaacggcagccagttctgccggaaaaaactcccgtccggcaggccgtgagcaaaccaagcaccgcctttcgcgtgtgccgacggggaatctcaagaagagaaatgccggagggcctcaactgactcaccagacaaccaagtagggtttgcgcgtttcgtcgagaaagtgaaagcggggacgtccatggaacttcaagacagcaagaagagtgcaatgccggacaagtgaatgccgaggtgtagcagtacgggatcttgcacgcagtgctgaactgagacaaagtcgtgcgatatttaaaagaacctctctcagacgaaaaagccaaccagggccgccgttcgccacaccacttcagagagtcaacacgctacggacggtcgcgaaatcgttcatgttcactccggtaaaaaccaccttggaacccactacagatggcaaaacatcctcccacttttagcctcatatacacacgtacaaatgtgtatctgtatatatctatatgtaaatggtattattctatgatgtcgagagataggagcacttgagcgtcgtgaggttgcgacatcgttcccccgtgatcaagagtgataagggtcttacaaaagccatcggcaatcggacagatggaccgagctgtcgaatgtgcaccgtttgtgcagtgatacacttcactacacatgcgttgtctgcctcgagttcctcatcgagaaagaaacgacactacaaacaacgcaaatacgggtctatacggtcattgaacagcggggaatctgaggacctttgcagttaatatatatatatatatattcgtacatatataggtgtaggtatacataaatatgcataggtatttaaatgaatatctgtatatttttgtaagctatatatacatatatatctaggtatatatatatatatatatatataatagtaaatatgtgtacatatgtctaccaaaaacttctcagagacacagtttgtccacatgtactgatatttataagtaacttaacttcctgcatgtctgtggcggtatttagtttacttatgtgtacgtgaaaaacgacgagagatgcagcacacacgctaaccccccctatgcagattcttgagcctgttgtacacgaggtgcacagacgcatgaggctcgcttcccgaagaaaaacatattcttcgtggaacaaacgttactcgaattatcgaaaacgccggacgttttcgcttgactttgtggctatgtgccgatatgtttgtcacgacgttcactggatcggaatctctctgccgtacatacgaggcgtcgcccgactccattacatcgatgcaagcgcttcttaggagaatcgacttcacacctgcgcacaaatctatgtttctacataaatttcgacgcgtagatttccgcctcaaatacagttcagcctgcagccgcgaccccgctactcgtctgtgtcttcccgtgtgcagcacgatggcaaacctcttttccagattgcgttgacgatgcacagacttcctgccttgagaaagcagacaaaaaaagtccttctgacagagaaaatgtgccggtgggtttgacagaccctctgaaccacaggtgtgcgttttcattgaccgggtgcatgcagtgataaacatacacattggagaggcgttgtcacagctcgaaacgcgtcttctgaagcgccgtttactcattttaactgtttgagacttcgtaccgttttcgttctgcgttctcgagtctgaaaacgaagaactgtctttctttcgtatcgccagagagcggcgatctcgatgtcgagcgaaagtcgcgttgcccgctggcgcttgacccggcacaaaagagggacttcggcttttcgtcagtcgagaaagggacttctttgtttctcgatttaaactgagaagcgaaactcacagtcagtgccgactctacagcgaacacacggtcatttctcggcagtcggtccggcgctcgccgtctcctcacttccccgtgtatcgcttatttcttctttgagcctttcctctctgtgttgattacctccttctctctgta

SEQ ID NO: 1157 - DNA, 2348 bp, Toxoplasma gondii
  source 1..2348: mol_type = genomic DNA
gagacaaagacgcactgcgtcgacgtcctgtctccttcctatatctccacatttgcttgccgcaaaccaaagtggagaaaaaaaactcatctaccgacatccctttcaacacgcatcccaacacttgcatatagatgcatatatatatatatatatatatataagtatgtatatatataaggatgcacttgtatatataaatttatatatatatatatatatatatatacctatgtatttatgcgtgtacgtatgtctatgtaagtgtgtaggcatgtttaagcatatctgtggaaactttccagagcgactctttggcgctttttttccttttctgtctttggcgacacgctccgaaaagcgtaccatcgtggagaaagaaagaagaggacgtccactgcgtcgtcgtcaaagaggaaagcagagacagaggaagcgaaaaagacactgcgatactcggagagggacgaagagacagtgtcgaggcctgtcagagaagaaatctggtggttcgagtttcgcttcttaaactctcaggttcttgttcttcctcggtcgtctccctctttgaaggctgcgcagctccatggagtttcgtgctctcgtgctctgccttcgtctttttttctccttctctcggcaggtcttggatctcgttgttgccccgaaacaagaagccacacgtcgaagcgttgtccctcctctgccctctctctgtcccttgctgttcagcgggctgtacagacactgcaggtcgccccgttcgtcagcgaatggcccagtgcctcttgtctacccgttctcccctttttctttccagaaaaagacggcaagcacggcttttgtgtgcgaaaggcagagtcggcaacagagacgaagacgctccacgccagagaacgagtttcctcgcgaagacgcttggactctcggctgtctgtataaccgagcttctctcgcgatgctcctcgagtcgccagcgaagaagactgactgtccacgaagaacaccaccccggacgcgttttcaccgctgcatgcagccgccgacggggggagaaaaggcacacagagagtctgcggagagtcggggagctgaggcagaaatcgcggagaaaaccggactggaagagcgagaaaacgaaaacgcgttggaaaggcggaaggatggagagtcagattcgcctcgccttcgcgagcacacccgccgcgacagtgccagcaagagccgaaggagacacgacaccggcgacttctcttcgagcgaagctgcccggaatctcccctgccgctattgtcttttctgtttcctggaatccctcgcgacaaccttcttacagagaacctctccgatagcgccttgggagtctctgcgtgaggcgctctgcacctccgggaacgaagaccaggaatgtgagcgacacggacgactgcctactcagcagacagacgacggcaagcaaaagctgcgagtaaaaaacagaaaaaaagaggaaatgccgccagggagagtcgccacccgtctccccgttccgccccccagctcgagtgcgcgcgagagacctcgcgcaaaaccggcaaagaaatccgtgcagagcggcgcgaaaagggaccccgtctctctccgcagcgcccgttctctctgctgtggaaaggctacgtgaggcgctacacaaagaggtgcagattgacacctgtagacgcgaatgcgttttctctgtcgcctcgagagccgagacaccagccatcggaggcgtatgtacaccgcgtgctctctccccggggcgggtatcgctggatgtgcaaaggcgccgtgaagcgcgggggaatccggtaaaagcgaatttctgtggcttgtccttttctgctttcgttctcctgcacatctgccgtgaaggcgcagacaattcgccgcaagaaagcgacggaaaacgcgtcttggcgtctgctgtccgagcgagtcccttcgtcctgggaatcttcttcgggtgtggaacgagaagaacgcaatctcggcagaagactaccgcttcctctttgaggaatgcgtcagggagcaatctgtcgactgctgcgtggagacacaagagaacggggaagcgctctgtggtgacgtcgattttttcaggaaagaccctgtgctcctcctcgcggggtgtctgtcctgtctcgacggagaagaagcttcgttcgtgagtcgcgaaactctgaaagttccttttccttctctcctgtcggcctgcgtgtgacacccttccacttctctctgcgcgtcatcgctgttcgcgtcgggaacttaggaactctttctctccagtcttccctgtgtctttcgagaaaacgcggaaaaca

SEQ ID NO: 1158 - DNA, 1847 bp, Toxoplasma gondii
  source 1..1847: mol_type = genomic DNA
gtgggaccaatagagatgactgcgtctttctcgtactcctgaatgagtttcagggtacgctggtcgaaagatccgaaaacggtcttgtctacgcggttgtacttccgcacaaggtccagcgtcttggacacgctctgcgggtcggcttcggccttgatatccacgttcatagtggtgtctggaaactcagcaaaaacatcctccagccgaggaagtggctggggcgagaatttcacggggaaacccttgaaaccaggcacaaactccatgtggcagtccttcaggtggtccgagtcgagcacgggaggaagatccgcgtaattggtctcgctaatcagcatgttctgccccgtaacacgttcaatgttatcgtcgtgcgcaaccaccatcactttgtccttggtcatccagacgtccagttcaatcattctgcacttgcagtcgtttacggcgtacgaaaaagccaagatggtgttctctgctcgctcagcttgtcctcctctatgcgcgatgttccttggcgggttgctgaaaatgcgcttcgtctgccaaagaaggccaggccaccggttgaggacccagctcgcggcgacgaagcaagtgcacgcgctggcccccaccaagactttgggggagaccgacgacgcagtcgacagcaagtaatccatggttccttgcatcatatttcacttcagacactcttaaaacgcaagggaggaaagaagtgggagaaacacacgctggaaaatcctcctgtgtctgggcttgtgtttgaacgaggaacgctaaactggaggacaatccacgatgggagtctacccgtgaaagtggaaaaaaaagacttgaaatgtcctccaaccgttttctgtgcaatacttcgagaccgaatgacagaaaaagactttttttatatatacatacacaccaatgcctattttattggtgtgagcttgctagagacaactcgggaaaacgtaccttgggacagttgctcagactgatcgaccacgggagaagcagacgacaggaccatgaatgccgcttatgcacagtgagaattgatggttgaaaaatctgactgaagaaataacttccccttagtgagaagcactaagacgatagagtttaacaatagtaaggatatgctcgcattcttacggtatgcagagatacatccaccaagtccaaaagaatgtacacagtcacagcagtcacagccgtcacagccaccacgcgatggtggttagttctctcaaggagacaagtttccggagacgggaaagcagtgaatctgaggaagcgaggtattttatggcacgccgaggagaggtagacacaacccagctcaatcattacagtcagtgagggttgcggttcgcgctgccgcatgcatcgtactcgtatcgttctccgagtaagaacaatcgggcgccgactgttttcctatgacggtgaacatcaaacctggctttccctgtaataccgagacagggatgcggcaaacgcctacaacaatatgccgtcttgcccgtcaaatctgcgagactccttttctccatacgggactctcagcgcctcgatgctagtatcgacgtgagacttcgtgttctgctgagcagaactccaaatttcttcgcacgcgcatctgcatgctgtcatttgcgctaagaacgtatctctatccgtgagcatgtcttcgccggtggtgtcgcttgcccctggacagaaaggcggacacccagacagactagctgttttgatggttactcggagtgacaactgatcacccgacaaacaatggaaagctcccgtgtgtggcttgaaggaactccagttcttaggcagga

SEQ ID NO: 1159 - DNA, 2249 bp, Toxoplasma gondii
  source 1..2249: mol_type = genomic DNA
aagaagctgtgcagttctgatgatgtcgcagacctcagcctcaagacttcccgctgcatgcaaccctacaactgagctgagtttggtatctgattccgacgctttctcatcagcttcacccgcctcgtttgcagcgctaaaagcttcacgcaaaaacatagtattcttgcgcacagcgtctctgcattcacgattcgagagcatgtaatcatccaagtctgcacacgccctcaacagcctttgttctgagtcggggaccatcaccacagtttcatcgtacacattctgtaactgcttgatgtcgctcgactctcggttctcagcctgtacgcagcaaaagggattcagcacaagaaaaagatcacgggtggaaatatcaaacacggtaggaaacttcctacacgatttagtaaataacatatgcgaccaagacccccgaacagtccatagttattgggcactcagaagctctgccgatcaagaaccaggtagtgtcagataaattttatggcaggaacggacaccggatgtcgaaattactgctccgcagcgagagtcggggagactcctagagctgggggccaaatacctattcgaatacagaaggccactcttctgcgataccgacattccgtaggactcgcatagcaataaaaaccgcaagaggggcagaagaggcaagagctcttcaactgaattcggattgagtttgacggggaaacgctgtacgccattcactggaaggcgccgccaaaaagtaggttctcgacaagattcgcaagttccgacacgaaataggcagaatgaacactcactcttaccttcatccgaagaaccgtttgtcggtgctgctccacttccatctgatagtatttaacttccttcaacagacgctggacgactttgtgtttaattcgcaagaaccggagatactcgctgctcgacccagttgccattgtgtcgctgaagctaaagacgagtgctgttccaccggccgaacggtacgagtgctgttccaccggccgaacggtgaagttttggtgtattttcctcaactgtgctcaaacaacgccgcagagcgagcaggaaccgcaagacacctggtcggggttcagacagctgcaacaagcagaattgtgccccaacacgatgtgcacacctggatatttcgtcccaagacacggaggacagagagtgccgcgtctctagccgtgaaaaagcgggaacagactttctccggtgttgatcatgagcttggcagccaaacgacccattccgcaagtttacaatcgcgcacttggaaccaaaacttgggagacctttctcccctctggtaagcctcggtaagatggtcgacatatgagggtgtcacaagtgctcagttggaagaagagatttgctttgcactgcaccttttgtgtaataacttcgcgtgtcgggagcaccgtgtcctggctcgttgcctttcgggcaggacaacccgcccgcgcatgcatgcactctcgaatgcgttaaaaccacactcgattccatatcgtttcagtacagccgatccagataccaaagtacttgtcctcagaccacatctctcaagttgtcactctgtatgcttctcgaggctaccagagggctttttcaacgtcgatgtcggcccggatttcgtgtgaaactctcgctttccagccctggcattcaaattacccgtcgcactcaacgggtacttctttgcctttcgctgcgccgcaactcgcgctagattctatacataccgagtgagaacgtggcatctgtctcactccagcatcgtgtctgttgcatctatctaagtcctgtttaatcgtaagaactttctgaccgggacgcgtcggcgagaaacgcatgcactctgccacactttctgcccacactgccttcgagtccgccggcaggggacgtcgaccaaatgagagctcgtctgcgtgtcgctctgcgtcgagtctccagcttctttgcatgttgagcccatttctcctccatcgaacaaattcggatgcgctgtgcgtctgagtctctcagtgaagggaagttttctataccccagtcgttttgtctcagggacagctccctccaaccaaagagtgggtactcatcggcgtcaaactgataagagtgtgttctgcaatttcttgttggaccctgcaccgcaataacttcgtgcacaggcgagcgcaagaacgcctctttcacgtccacagcttcttgattcacaa

SEQ ID NO: 1160 - DNA, 1818 bp, Toxoplasma gondii
  source 1..1818: mol_type = genomic DNA
aaagaattctcgcaacttcgctgaatgaggctgtagtttctcgttgatgtatcttgtatacatcattgctagcgccgtcattccgaggagagcgaatgccatcagaatcatgaatactatgatttctctcccagacaggtcgagggcgggacggaggagtaacacgataaagaacgatataatcaggatggaaggggggagctcgaccattcccgtcagagtctcgccaaagcaatagctgatgtagtccgagaacgaaaactgtggatagccagtttctcgctcccgtggccttggaaccaacgggatcgaggggtaaataaatctttgacgaaggccccagtaaatcagagactcgctgacgtgctgctcgctaacatccgcagaagtctgcagcattgtgacgtcgtttcggaggtccgtttcagtcttggcgtcgaaatactcgtacttcctcagaaggcggtagcctactaaggtaaagactgcagcggcgagaatgaataggaacatgataatgaaaatgagaacatgtatctcctcaaagacctccgttaggtgggtcggcggtgacagagtttccccggcttctgttgcctcgcggagcgctgctgcttctgtttttgagacacctaaatacgtgtcgttgagtctctgcatttgcccgaggcgtacggtggcaaacgatgtaagactgatgaagcccaaaatggtcagttccttgtaggcacctcgtagcatctttaacagtgatgtcacgcctctgtatgtcaggaattcctccgtgctgtcgaaagccatctcaaagatcagagaacaagcgataatgaaaaggaagagaccaagggtgatccagttctctacattttcccgagtagactcttcggctggcgcttgtaaaaacgtttcctccagtgcctgtgacatcacacgaatcgttccaccttttcatttttcaattgagacaatgtgttcagcttacactaatagtcgtggcgcgactgactgccgatttgatgtcatatttattctgcagggcagggctataagggagcgcttcagcaaccgttgacaacaccgcgactcccatgagcagaacacctggcttgggaacccttgcccaggtcagcaaagccaggcaatttgtgaggagcctcatttgcctgactactactgctccagaaactgcttgaacaccaatcagacaacatggacaagttctcggtcgtctccttcacctacgtgacttgctttaattttctacgtttcgcggatctgacaacgggaagcgaaacagagtcacgtgtcgacagccagctgtgcgtacacctgattcacaggcatgcagcggcatgcagacacaccggcggtcgaagggcagtttctctgaaaaaggatcatggaattctgagtcttactaaattcatagtgaaaaaaaactgccgctttacctgtttcctgcacgttgcagcaaaatccactcgggcgaaaggtgtcgtttgtctggaaatccacctggcaggcgtgtcccggtttccctctggacacgctgcacactctgacgccgtccgagcgctacaaacggcagattgactagactgcggctgcaacggatgatgaagctgactctcagacggataatccgatacctttgtaatgagagttaggcaggatctgtcattccggggcggtcgtctccaccgacctgaccggaaacctgtgtgctctaggtgaaccgcacgcacgccagtatcggccgctgctccggtgtccgcctcacaaagattcttgccaatttacttctgtgattggcaacaa

SEQ ID NO: 1161 - DNA, 1717 bp, Toxoplasma gondii
  source 1..1717: mol_type = genomic DNA
tgtaatgcgtggcattccacgattcccacgttcagacgattcctaggacaaaacacgcttcttgcctcaaagattccaactctattgtcttcacagatcgttgacttaggtagcacctgcgaagagagcgccgcacagtctcggtggacagcgcaggtacttcagtgccgctggacctctagatatatttatttacacagtacttttgggtttagacgtatgcacgtgactatgggcaagagatagtaggttatttcactatgcgtccgtcagagacaacggccaaacctccatacctagctttctgtgtaggaagtcgtcctgaaagatgtcaacatttgctgcaaaaaccggaacctggtttgtctaaatgcaagagctgaagagagtctttaggacattccaacccaccttgagcgccgcgccagcggcaagccggcgcatgaaaactttctggagcacagggtcaagaagagcgaacccaagaaatataacgggctagactcccgctacaaggcaatcctacggctgagcatatcagcggtcagcagagagtcatgatagttgggaatagacggagctacatctgagatagggaaacgtttccttttgtggattcagacgcatttacgattgcaacacgaggacagttatcgcgaaaaggtgacactgttttcgtcagcaaatgcaacttgcgtcccgctgtccaatagtcacacggcttctcggagtcgtgctgagttttctggttaaagggagttttgctattctggaaatgtgcagttagcagagctgctaaaactatcagcgtagctgcaatgcacgcgtttccagtctcactgcttagccatttcacgtgaaaactcattgaatggctgcgggagaaaactttgcgtttctgcgttcattggtttttggcgccgccattctgtgttgttcatatatgatgttgcaactcgcgtgaaacgcttttgtgttgcaggttcagggggtgttctacatgtgctcttgtctgctggtctccacgccaagatggcgggtgcaaggcttgctgtgctttgtttcctctcaattctaagctgtactaatccacttggttgcgtgtcctcatttgaacttgatacggaacaagtcaacctttcttgtcagttttgcgatcttgccttgacgccgtctcgcgcttcttacttatcagctgccagaagcgatgaatcgaatggagggcttctcgctgcttctgttcaggaaaccaagacttctgatgttgcctctttaaaaactgtctcgtcggcgagtacttcctattttccaaatcgtgtgtttgctaaggagctaaatcctctcttctcttcctgcgcaggcgcttcctgtcacaggagagacacaagacactctatcaaaagcaaatcaacaaggcaaaagggcaaatctcagcttcctcaggccggaggcacagtgccattgctgtccgtaaaagaagagaagcgggaggttccaccgcctttccaatggctcttaccgccatacccgacatccagttatacaaattcatcttcggcttctgttcagccttcacatagccgcctttcgtctgattatatctctgtgtcctcgataggttcgtcacctttacttcccagcggcgttgcgtcgttttcttccgctgctccaggacatgccccgtcgtctcaccatccccagttaggcgctccttcaa

SEQ ID NO: 1162 - DNA, 3269 bp, Toxoplasma gondii
  source 1..3269: mol_type = genomic DNA
gtaagatggcgtttttgcacgactgcgccacgggaggaaaacaacagttggccaggaagcacggagttcgattgctctattcttgttttttctgtctttttttctcaccttggtctacctcttggcattcatcgcttttcgttgcacggagcaggtgatgggggactgagatccggtccaccaatctcctcccggggcttttgtgatcatttcttctttccatggtctgtcctcaacttggcaatgcgacgctggcttcgacttctcttctccgtctgaaaaagcgagaactctgaaccctgcttgagtctcccccgcggagtgcccccgtcgagccatccgaggagatgcgctccctgcaaggaagttggcgcttgccgcaaatttctctgtggttctccgcattagttgcttcccacacacggacttgcgttcggttacagaaacgagagttttgggggctctgtagaagacggttgatggacgtcgctgaccggagctacattcacaaaattcaacgaggatttgaacactagaccttcagaagcattcgaagccgactgccattgaagttgatcagacaagaaggtgcccatcgtctcgcttcagactttgttgccgccggggcttcttacttggagggacttagacataaaggtcgagtagtttactccttattcgcgcgcgcctttcttcgcgtgtgactttgattaactgtgagtttcccgcatgtcggcaagcacctcactggagagaagggcgattttctcggggatgtaacgcaccggttgaggtctgcctgttccagtacagtggtgattgcgaacaaaagattagtctactggcccctcagtttgaagtgaagacgatgcgataattaatcggaaagcacgatatcactgcttgccccagaacgccgtttccaacgtatttgctgcagtaaactagcggaatctgcgcgccagcaacctagggcaaaaagagatcgaattttgtcggcgctgcagccgctgccctcacacactgcaaaagggaaaacaaacggagcggcccaaaattccgagtgttcccggcgggttcatttgctgatcgtgatttaagttagcactccaaacactgctgtttgttcctcaacgcagaagcctgtgtcgcgggtcgacagtctgccggtgtaatgagaggtcgtgaagacagtcgattcttccctcattcgtcaatgcgttcagaattgatccatcgagacatgtacacgtaagatcgtacaaacactggcatgcccagcggtggctgatactgacagaatcgactacgaccgctgtacgtacgctccacctgacccagctgcttggaccgttcctggctttccgacatattgtatcgagcaacgagaggtaggtgactccgtcgttcagggttgaagggaacagcgactggtgtgctacggcggcaatggcttccgtatatctgtcggggggggagtggagcttgagtgcaggttttccgtccttccccgaatgcgtcgtcttgattgtgtcaggattctcaggattcagaagcatcgataatcagctgtgtcgatcagcaataagacttcagaacttgcgtaacttcgccgtcgtcaaaaatctcgcagagttttctcagcccggtaccctcacccactgtgtcgaaccccctgtttcccctatgcctcgcgatcgcggtgtccgccgctgtgacatttcctcctttgcccccaaatgaacccgccacttcaaaacgctgagtgtcttgtgtgttccgttactaagaaggttctgcccgataggttgcgagttacccaaacgagcataagaggtcgtttgccggcgcaaagggttccgcttggcgggagcgcaaccgccacgcggtttgtcctgagccgccgacatgcgtctaggggtcctttactcccgctgacaacccgtccgcagcccctatgctcctcccacaggagggtgccttgtgaagcgatgctagctctgcgagcgtgagcgatttgcacatttttccaagcgtttcaaaggtgcgtcttcgcaggctttttaggtcagtcttgaaaagaaacgctgacacaatcgttcggagcagcggcagtgccgcagatctgcagaccaactcgctctctccgccggtcactccgtctcaccgccaacaagttcctcggtgtgtcttgtcctagcactgcaaatctgtgtttcgcgatcacgtgtttttcgggacacacgctcgcattctcgtcatcccagacacgtctgcgtctggactgtgacgtctaaagtctctggacacttattgattcgcagccacgccaaactcttcttttcatgccgtgcatcccctggcgttgaaacagggcagcagcgtctcgagtttgacagagaaaaccagcggccgctgtgcctcgtgtttcgctggcttcccttccctttttttctatgtccagctatcttctggacaaaaacttcctcccgcaccatttgctatttcgctggcaggtgccttctcatttttcggtggcagcacagactccatcatctttggtcctgcgcgttggcgccgaccgacaaccgatgcgtccacaacgccgcagccattgcgtacgcgtctggtgtatcgggattccctcttcacgaaagtataagtaaaggaaagctaaaagcgaacctgtgagatacacctgggttccgtttagctatggaaatcaccctgctgaccaagacatcagtgtagcttgtgcgcggatcaagcaggcaccggtgctaggccttcgtgactttggcaactcgtgcgtttcggtattttgcattctccatttggaacgacgaaaaagtgtagcatcgcatacaaaaaacaaaagacaaagcaacagatccgcctcccgtgagtcatccggggccattttgcccatctctcggcactcacgcttatcgtccttacggagctatgagctacccacccgttaggggttgtcttcaatctgacctgcgaaactgcctgttgacccgattaggtctctcatctccttaaactttccgtgtcctggtttcgattatttgccggcggtgcctcgtggtggaaaaccctctacagatccgcaagaagacacacaagcctgaagtgagaatccacttcgctggatgcctgagttcttcgcggctgacgcctcagtctcagtttttttataggagactcaatacttttcacaggagagagatgcaagagggcagaggggcgaccacagacggaaa

SEQ ID NO: 1163 - DNA, 2080 bp, Toxoplasma gondii
  source 1..2080: mol_type = genomic DNA
gacactgcagctccgtctggccatcggcgctggtaaacgtcacaacgggaggtccctgggcttgtgtgtcgttgtcgccgcttcgcttctctgaagcttggctagatccggccgttgtcccttcgttcacgtcagccgccgttccctcgcgatctgccggtgtttcttgggtgtctttggaggagaaccacagatgtctcttcgtagaacatgcctcccactctctgctgggagtctccgaggggggagaactcacccgggtcgccgctgcggtgggagacgccactgcaggaggcgaggaagaagagagaaaaggagataaagcggaatagctggagagagcaaaccgcggagaaacacgagaggaagtacaagccgacaccgaagacggaatacacgggaaggaaccgacggaggagcctagagacatcccggcgttaacggactggaaagaaggccagcgccgaacatatttcgcaccacacgaagagcagaaagaagaacaaggctgagagagaaaaggcgacagcggtcgaaggtcagatgatgcacgcagagtcccgatggcacgaggactgagaatcgccgcaagaagtgcctttcgacaaacactgccgtcagcgagcagtgaggctccgccagcagaaagagactgcatttgtcccatcattctgggtccttggggagcagaaccagtcaaattccagagcacagagtggccaaaggaccggcaggcgtcgtccaagactcgcctcctgcgaaccgcgaacagaagtctccacttcgttaggaaacgacgggatgccacgacagtcgagaaaagggagacaaagcggaacgaagagacaacaactgaaaacagttctgctccttggcatacacaaagaaggcgacgatgggagacggttctgaggtgtgcatacacccgatgactcgcggacacggtggcagtgcggaagtacttcgcctccagatgccctcgacggtgcgacaactcggaaaacggcgtttttgcgcgacacagccgagacacaaagcagagaaagcttttgagttctggacgcgagtgtgaatcaaacagccgaaaaataccctgggatcgatacgtagcggtgttcccaacagaccacgagcgaggtgtatgtacacctgctggacgcagggacgccgtcggaccgcagaggggaccgacgtcgagtttacacgaagtaaaacagtttctgttttcactttcttctgcgtttcccgtcgaaaggttctcttctttgaagcagcacctcgttctggcacgaaaaaggtccgtggaagagcacgtcgctgtggtgcatgcaaatgcgctggcgaatacgagcaaggtcgctgcccggttgaatcagctgagggcagcgaatccgttctcctttctcttctttctttctcttcctaaggatcctttttttgcatctagatcgaaggctcttctttcctactcctcgtccctgcttggtttttcctgagctttttcgctctgcgctctggccccacgactcgacctgcgcatgcaaagccggcccggacgtcgattgcagactgttcttcgacaccggccgtctcctgtcttcgtttctcgactgcgcgtgagtcccagacgcgtggccggtcgtgtctatgccatcctggagtgcccagggaggcttctgtatctcctcggaggccgcttgattgctctccgctgccgcccaattcacggctctcctcgcgcgcctggaatcccgactggcgggctttgcctcgtctttctcgtggttgttgtctcgagttctttcgcgctttcttaaaggctcactcttgtcttccgtacccctcttgaccgtctgccaaccatcgttgaagcgccctgccggacctcctcaccgggtgtacgtacaccgcgggctccgcgctgcacgtctccttctcatctctctcctctgttaggctgcacatatcgctgtggtcctttgaagaggccgacacgcgttataacctcagtgtttttcttctctctctcgtgtttttctctcttcacgcttcagctgacggggctctttctcggacacca

SEQ ID NO: 1164 - DNA, 1806 bp, Toxoplasma gondii
  source 1..1806: mol_type = genomic DNA
ctgtagtgttccgttagagagaggcaccggactcgtgggtgaaaactgagaggggtcggtatggtctgttctggcggaaggcggagcatttgctttgcgcgccgggttggggaagtggttgagctgcgacgagtttcggcgtttcgtcggggcagagaccgtggcggtttttccttttacctagcggaaaaggcgcttcgatgggagaggaccatctagccgcgaatcgcagccgaaactgggaatgccagtgtttcccagaacatgcgtactgctgagtgtagtgagaagctattttcctgtccagaactcgggaaagctatgcagttctacggcagtgttttgatgtgatgaggaaaaagttctttcttggatttcctgggagccctgcgctcgaattcagcactcggtgctaagacttgtagaactcggtacgtgcaaggagatctaatggagtcataaccaatccactcgttgaagctgttctaccggcattagtcgcggggagacaagttccgaactcccgatgtaaattgttacgaaaaagcttaccacatcctccgcacgaaaacggattgcacgggaagagaaagttggattcagagagcaaacacaaggtcgtatgatctggtaaccccatctcgctcattccgaattccagtggaaaacgtgtcacttttccgtgcccacgcagaattcaattttctggcgaaggcagtgactagcctaagtacagacaacagtaaacttgacacgaaagcggtcatttcaatctacacacgataatgtatgtggtaagcgtctttttatctgaagatgcactgtagttttctttagtcgctgtcagtgtacatggacaccggacgttctggcagttgcttgtagtgcacacgccatacgtggcagtatgtcttgctgtctgctccacgcgccacaaagccttcccatccgttttctcccacatatgatggaatacaagatggaacgacgcaagaagaaggttgatttgatagtacaaatggtgctgcgttcgctggcgattcaggaagcccccgaaacccctgggggtggccactggctttccactcaatcactagctcctcctaatgagccacggacagcaaaaggcactcttcacagctacaaccagttaaaaggaacaacgtttccatgacgttcgtgttcggacgatgcgcgagttgagcaccattctctgcgggactgcggcacggtttacacaaaactttcaggacccatcttccgagtatccacgttctaaccttgaaagccggcaaatgtgtttccgagacacgtgaacaagaaggggaagagtaatggggttcctaagtggaaggaaagaagccaagcggccggacattccctttcaggacactctttgttgtcttgtgagtttgtccgcgcaaacaactagcggtttctaggcatgcactggcgcatgcgcggcatactgtcgacttcgaagttctatttctcatttctgtaggaaacatttcgccacggtgacgattcacgtttcaaaactcgagcgctgtgagtctcagcaggtttcaaaattagacaagtgcctgtaccccgggtgtaccggacccccagtctgcgtcgactttgtcagtgtgctgtgtgcgcgtgcccgtcgttcctccacccgccctcatattttcaaaaaatccacggttatctgcttttctctctgtaactgatgacgtcgcttcctccttttcgacagggtgggtgtgcggtccaagatttgtcatcttcgtgggcgtaccaccggtaccgcgtcaa

SEQ ID NO: 1165 - DNA, 2661 bp, Toxoplasma gondii
  source 1..2661: mol_type = genomic DNA
tccaaattggcattatgtttaggcggagacgtccgtcgttttccagtggtgtgatactctacgccatgagacgtgtacctgtgactagtgtgtcaaataagggggaaggaatatgttactttctctaatgacgagagcgagcgacgaggaggcgcaaaagagaactgtcggttttacatgtggtggtggcgtgagcggcgttcatcccgtgattcacagaaagtggagttccagaaaaagcctattccaatcgttttctagtggcagctgaggttcagtttttcatgtaacagataatggcgacacagaacagcagaacgtgtccctcagcgccatccactctttttcgttgggcaagcgggactgctctcttgcgttgatgctgtccttcagcactcttttggcggctttccttcagcgcggtattgcgtgactagcatatctgtatctgcgtggctctcaaaagccagtgcatatatccaggtgttcatgatgtagtgaatccgaagaacttcggctgggtaggcggcagtaagtagagatcacctacacatgtgttttcttgtggacggaatctctctgtaaaccatgagcagcaagactagttggtggagtaaatgtacatgaaataccaggaaaacatgggaacggttgtggtcgaaacaagctaaaccgtcttagtggcgaagggcttcacgaaggaagacagagtggggtctcagaaaacagagctctccatttagctggacgctggaactctagtcacgcttgcgagatgggctacgttgactaccgctgtcgaagaaaaaaacaacctacatcaagcggctacttccaactgagagagttttcgtacctcgtgttcaagtctgtatcaccactgcagcgctgcgacctcagctccgtaaacgccgatgcggcgttaaaagtcatcaccagaagttctcgctaggtagcaacagaggttgtcactgtgtccacggttgactgtgtaactacctacgtgagacgaaggggagaggggagggaagacgtgtgagaacgggtacagttgtgaagaaacattggagactatgagctggctggtctcgatcgccgcgatgtgaaaatggtcgaaacaaccggacaacaacaggcatgaactttgactgcgagaaatgctgaacgcgcgaaacaattacggaaatgagaatgtccctcttgccaagcgactttgcgacttgtgtcggacatgcagatgatcggttacctacagtccactgagttttcgtactatattctacatcccgcgtgacagtaacagcaacgcgcctcaagtctcggtcttcatccgattttggccggtttcgctgtgactcatttttatgttgtagcaggctgcctgtagtacacagcaaaacgccaaatctcttcttcccgcgttacggtaccaccacgaaggccatattaaaaggctgcctgtctgtccgtcttatttacacactcgtgtattattcgacggtgctgagagggacgatgagaagaacacgatggaacaaggggtatctcaataagtggcggcgagagcggaagcagcgatgccataccgcttcgctgatgtcaacgacaagcgcccgtggccagcaggctactctaccagtttctagcaactttcggcaactcctctcggcggatctagatgtctgctagctaaacgcgcagcgcgcgggaggatactcggccccgcagcaaaaaagcatcggcgaagtgacatggcctctcgagctgctaaacgtggtgcgcgcggaaaggtaccagaagacactttcgagtgctcgccgtgtttctctcgcagtttttttgtgccgcggaatttttggagatatcccggggaccttactgtaagcggacgatcttctcccttttccgtctgagataaaacaagaaagttcctgctttgtgcgtaccgcttccctactttttcgtgcctcgtctggtacaaatagcgctcgccgtcgtccagctgggcgcgtcgtccagaagcctccggtgccggcccttatttctggtttctcgagaaaaagggctggttgtttaactctttctgccactgatccagttcaagtaaacgtttctatctcaggtattcccttttttcacccaggtcgaaggtaaatctcgcacgaaagcagggtaggaaagggtcctctgtgatttctagtatacgccgcgatttccgtgctcagcggcgtcgtggctcggacgcacacgtcggccagccgcgcgcacatttgaaaagaaaatagatgtcggggtcgttgaactaagtttgccgttaaatttccccttctcgttcttgcttttttattggggggagggggggagggcgaagcatgggtaacaatggaaagtcgttccaaccgagaggcgtacacgagatagatgggtcccgaggatgaggcgaccgtcacttaaacgatcgggagaggtgacatgttgagctagatgcaggtaaacatagtttgctttccatttgttcctgacacatgggtctgatatgaactttgtatgttcctactgcacactccgagtcttcggaaaacgcggaccttcgatctatttccgagctcgtttgtgtccttgggtcgccaggttcctctttccttttccttcgcaacaaga

SEQ ID NO: 1166 - DNA, 1625 bp, Toxoplasma gondii
  source 1..1625: mol_type = genomic DNA
atggcagacaaatgcaacgcgctaataggatacggatgagttgccaccaagaagtcaaaacatctgtggatctccgcaggcacattccgcgaaccagaagctgctttcgctcctccctctccagtagtagccagttgtctagagacaatcacgctcgcaccgtagtctccgagctcctgatctcgtacgagagaagttaagtcatttctctgggtgtgattgggtgtccgcgaggccacaagttcacggaatacatctcgaccgacaagtcgaatgtccaaatctgtcagcagcaaatcgcagtaaccacaccggcggacgggcacgatgttaggccttgagcaacgcgggcactccttcttgtagtaccggttcgtatagaagcgttggagctgtgacgagtgatgcatgcacttctgctggacttcaaagaacggaggattcggcgtgctcctcggcagtgcattctctagagtagaccgacaggaaaccaaggagcaattcggcgaaagtccgaagacatttcgcacaaggataggcatgctgaagcaaagacggaaatcgaagacagttcattcgcatattctgtgccgctgacaggcgaatacacgcgaaagcgcatgtggcaaggaatgatacaaaagtgacagaatcatgactcggatcagacgtggtggcagagacggcaaacgaggggttcttcgacctttcctcagaggcagtttctctgcccagaatacctctgagctgttgtgacgagaagatggtaaacttccgaaaagtgcgagaggggccttcaattgtgcagatcagcctggatgtactgccatagctgcagctgtctggaaggagcttctgttcccgcacgggatgatgcctatgctgtttgactgggaaaagaaggacctcgtattatccgtgttggtgaagaaaaacatctttcgctcgcacttccgtcactcgcggccaatgaaggtaactcgctgatcacgcttctgcaagctaccttcgcatcaacgagaactccaaggagttctccaaggagttctcggtgttgacggcgacatttacgagattgcgctgtcagggtgacagaagaaacagaattttcaaaataatgcaggcaggtgttgggtcaccggaagtgaaaacaatttttttcaaccgcttctctcaaccgaatagctcctccagatggatgtattcgcctagacatgcttttctacagatgagtggcaacgctcgatttcagcacactttattttaaaaagtgaaggaaacgcttcacgatctttcgaatataggacatctcgagcgaagcgcatgcatgtggaaagcgaagtctccacgggtacacatcgtgtttctgttttacggagtggcagtgcgcatttcgacctcatttaaagaaaaaagcacgtctcgtgtcgcgtaccttgctgagtggcgttgaaaccagtgtttccaattccgcaccgccaagaataaatcagtctgtgattgtctcaccaaaaaacccgcgcatgtgttagaccggtcgtttggggagtggggggtcgggcctaaatcggagacgcacgcgacctgcgctgcgcagttcgcacggggtggttgtctacataaaa

SEQ ID NO: 1167 - DNA, 629 bp, Toxoplasma gondii
  source 1..629: mol_type = genomic DNA
gagaaggatagaacgagagaaaagtagaaagagagaaggatagacagagagaaaggtagaaagagagaaggatagacagagagaaaggtagaaagagagaaggatagagagaaaggtagaaagagagaaggatagacagagagaaaggtagaaagagagaaaggtagaaagagagaaaggtcgaaagaggggagcagctgcggcccgaggtcacagctgcttttctttttcacttcttgtccagacgttccacgacagacagtcctggagagagagaaggcctctctcgaggtttcaccgaaactgaggggagaaaaaaagagggggagagagaggaagaacagagacaagaacggatggtcacgagagaagagaactgaaggagacacgctgtcttctgctgcaagacgaagggaaagtcgcaaaaacgagagaagcgttgtcgtctattataaagttttcgtcgacagagacacagtgagttccagtcactctgcacctctaggcgacaaggaaacaccgccccctcgaccgtgaggagaaggggaagaagacgaggaggagaaaggagaaaaacgaaaggaaaacgaaggagaacgaaacgaaaacgaaggagaacgaaaaaaaca

SEQ ID NO: 1168 - DNA, 1977 bp, Toxoplasma gondii
  source 1..1977: mol_type = genomic DNA
ggaatcaagggatcaacagacgtgggagataataatttgtgtaccacggcagcaaagcatttttaggaaatacagagtctttgtgatggggaacatgcagttctttctcagctcgacttactatggctaatacgctccaaactgctgagctgcgaacatgccgtgacttgcattctcacgcccgactgatacacaaaaagcttcgtgcggcggctatcatacgctcagaagtgagtcatctcagtgtttgctaacacaaagacacttccacgttcctgggtggtcccaaccttgaatatggcctgttttacaaattctccaggcgacactgtgtaggatgcccactgaggaaagcgtgcaaactttcaggcggattggattctcgttggcctgacgcctgtttaggaactagtggaacgctttttacgcctgtctagaaccgcagcacagggggaaagaaaggtaacgaagactgataatttttgtgagaaaaaatctctaaagagttgcttcatatgtagaactacctcttttaaatgaagaccacgacgataacagaagagcagccgttgccgccgaagctggtagccttgattaaccattcgctcaaagatgtttcaagatgactcttcgcactgccgtctgtagcctttgccagctctgcactgtgtggctagacgccaatcaactcgtgacttgataaatgctgttgttaaccgagacaggctcatgcgctcgcttggatcagacccgcggtcaatactttctccaggagttgctccacttgaatcattgatgctttcagcaacgcagcagcaaagctgtggaatccccagggcacgcggaagtcctgaacaaaagacctacactgttgcaaccgtaacggcacacatattccatagacagcacaaaacccagaagcccgcctacacacgtgagatacagacggagtctgtatggggtgtatacgcgaagacaaccctgcttgcacgcaatctcccgtttgattgctgtgacgtgcagctgtttgccggagtgtggcagcgattaaaatctgtattttacagggaaccatcaggctatcgttggcgctagagcatgcgcttgggggctgaagtccctttccacgccacggacagctgtacgactctagggaaatcgccttgattcgtatgagacaaggcactttacggagaactgtctctgtgcactggttgctgaagtgctagtcatatgcacttttttggtactgtaatgtctttttctgtgtactcgatttgaattataccgatatgaaggtcgaggaacagaaggaagaaaaattcatcaggtcgactgcatgcgtgtggcgggtgtagcaccgcggcgaaatagcggcgtggccaaaacgagcattctgtattcggtccttccttcccttttttgctggcatcattgagtggagattcgtccggcacgaagattttgagacagtttacatcaataccaaccgggctgggtggcatccaatgcattggatcttcttcgaactcagcttttcaaggcctagagggtgcatccgcgttcgccggatgtcgatggtcttgtttgtgtttccatattgaccagtacatttcagggttaattctccgcatttgttcattttgtcacagatacagacctcattaccacgctgatcagcttcctccagttgacattttccgtcaccgggaatagtggctggccaggccagcggccatgtctccgaagaaatggatcagactcacacgctacggacccgcgtgatgctccactttgccttcttatcttgaaaatctgtgacgctcagcctctctgtaacggcttcatcgccgtcgtgtgtttctgcttcagtgcggaggtcactgggacctctggtgatgatgccgacacgcatttgaataaggggtttgggagctgcgctttacagccctcacgtggtgcctcaactcggactga

SEQ ID NO: 1169 - DNA, 1742 bp, Toxoplasma gondii
  source 1..1742: mol_type = genomic DNA
tgtgtacagatgtgtgcgtatgcatgtgacttacatgtgcgaaaggcagcatgcgcatgagggggtgtttcttgaaaagaagcacatgcaagagcataatatatatatatatatatatttacatttatatatatatatatatatacatttatttatatatatatatatatatataaagagacagaggggctaggaacaggagagttacgatacgcgagaaaatggctgttggagcgcgtaaagctgcagatttatgcatgtgtatggatgtgtatgtatatgcaggcatacacagactcgcgagagaagaaaggaggaaagagaaacaaagtagaagtggaaggaacctgcagacgaacagggccgaagagagacagagttcacaatccctcttctcttgccttcgacatttgagaagaatcaacgtcttaaaatataaaattctgttctttgacactgagccggcagctgctcataactgtcatgttgttaccagacatgtcgaggtcttttgtgtcactacctacgcgaagaggagagcgttgagtttcagctcttcaagagacgcagaaaaggccgtcgactcgtgagcggctgaagacgcgagttgtcctacagcgacgaaccggttctgtcgtgaagagaagaatcgcgagaaaacgggaaaaagattgcctctgcggtgtcgagtctgcgactgggtctgccgttcctctcgccgatgctcttggaggaaatctcggttcgagagaccttgtagaaagcagaacgaggggagaagtcctcacggcattggagagagagaaaggttctgcctctccgcaagcatgtggaaaaaaacagaacatctagacacggagagggagagacgcgcctacaagacagcctgagagccacagagcgagacaggaaaacgacgagaaggaagtcgcaacttcctgctctttctcccttcgttgttccgtcctctttgcaggtgcagcttcccaagacatctcggcaaaaacgacttctgaatccttgttggcgtagagaagaaatcgaaacgcgtcggccgaatgtcggagggtaaatcgttgccacctgaggtgtacatacacctggccagggaaaccgacagtttcagggagctctgtcgccgcactttttcctcgttttcagagactttcgcggcaagaaaagcagaatttctccttctcgcgtgtctctttcctggaggtgggctcttcgtttcctgccgcgagcttctcgctgcatgcagagagaaaaccggccgcgtcgacgcgtggaaaaacgcgtttctctgcgacagtgctcaaacggaaaaaagtgagtgtgcatgcctccttggcagcgagagagtggagaaagggagaaaactcttctgtttgatttgaggcagacgaaggactcgaagaaacaaaggcagtcttcgtctctcctgtgtccaggaccttctcttgcagtgtgctccgcgtgtgaacatcgaggaaacgcatgctgcagagaaacagtggagtccttccgtctctgctttcagaaaaggcttctttttcgtctcttcgtcgtcttctttctttcttgccgcgcgttcttcgcctgtctcggtcctctttcggcgaccgtctctaccaagactctgccggcgaaaacgatgcaggcggaagcggagacagcggaaaacagagcagaagagaagtgaaaaccagacaagaaccacgaagaaagaactcaaggaaaca

SEQ ID NO: 1170 - DNA, 4194 bp, Toxoplasma gondii
  source 1..4194: mol_type = genomic DNA
cgtagagactccggcgttctccttccacgtggaaatcctctaaatcgtgacaccggtggcggttactcggttcgaacctccacagacagagttttttgcctacctcttgacgctagaagcagatcaaaggaaacatggacacagatcttcgttagtgaaggtgcgaagcgaacatacaaatcggtgttctgctgtttctgtgtgttgccccctaccctgcagaggaacagctggacgctgcgctaaaggacctagaagaagcagccgaaatcatcgaacatgcaggctttgtggccctcgcttgctagggaaacgcaagatggcacaagaagagtgaggaggcagaggacccagggaatgaaatatgtatacctaagtggaggcatgcgtctgtgcgtgaggcgagggaataaaaacggagtccagcagagacattgaatggcctctcttggccggaaaacgaagagaaaagacgggtggcggaagctctgaaaatccgcagagagagggcgaactaaagcagagagtatatctaagaagagatagggtgcaaaagcaggtcgggcgggtgtacaaaaggaaacaaggcacctagtatcgcgcgaggacagacaacagcgtaaacgcgctcggtgtgagcaggcaaaaacacaatgcagtgagagaaagcgaagatcgaggctacgagacgcggcaatgcaaccacaggctttaagggatctgtgtgttttgcgcgttataactcggtacgcagagttctgtcgtccgttgtcgtttcctggagaacgctgctgcgccggcatgcgacgggagagacgaccagcccaacaagacaccgcgtgatggaatacatgtgcgagtgtctgctgcatacataaacgaaatgaatctttgcctctgcgaaaagggcggtggtatcgggcccctcctttcgtcgcaacagttactccaaaacagtcccatgatgtgtgtggcgagcgcgaaaatacggcaaacgggagtcttcaaggccgtgctgttctcgtagggaggtcggacttggctcatggctggttgcttgtgttttagcgtttcgtctttgctttgccatttttgcctcgggagcccgcgtgggaaaccagttaccaacacatcgctttctgcaaggctactttaattttcaatttcattctccacggtgtgcaaaaaacgccatgctcagctgtcttctcgtgcatgcgcctgcggcctaaagtcatgcaaccctatcagagaacaggcgcagtgcaggaaagaaggctgcttacaaaaatagaaaaggctgatgtgtatagccaaaagaatgagaacccctgacatggtcgcactggtcgctgtgcacggtcaacactcatgcgtaaagatgccatctcgctggaaactggaaaatttcagctctgcttcggtgaataagtggaatgggggagtgatcatcgctaggatacgtatcgcatatggcaagactctcaagagaaggaaacaggttgtttttgtagcgaccggtctgctgcctggcaagccgggtttcagcactaccgcgacaatgaacggagaagaaacaagaatggtttggaatcaggaaatacttttccattgttgaagccagaacaggtcaagcaggatgacatgcacaacataggtgccagaatacagttccagatgcgtacctgtacgtagaaatatgtcaaagcattcatttagagaggtaccgatatgtgtctatgccttgctgtggtcaacaatcgaatggtcccttctgcgcatcttcgcgaagctaattatgtttgaagcagtctagtagaacagtagttttcaaagtcgaaacattgtgaagggctctatatgccttcgaacgcattaaagaatctgtgaatgccgctttgtgtgcaaaaaacagactcaagagagaattttgcttctcgatggtgctggttacttggcacagtgcccaaacacaacagcatgagaaccgcttgatgcagaagtaaaaacctctgagtgtttcttataaaacagaagctagtcgtcattgacgggtttgaccagcttctctcgaagacacatggaagtatttctgagattggaaaaaactgctcaacctgctgttcccaaaagaagacgcacttcacattttcttccacagcatcacggactcatgccgcacgcctttccagtggacttttatgaagcgttctctaaggaagatacttgtcttctttcagattctaagtcgccctgatgaaagtccccatcggacagaacacactcgccttctttcgctgctgagcttgtgacaaacaaccattcgcctgagtcatacttcagctgatttctacaacggtgacgagcccatttttgacacacaaacgtacggtgggtggtacggtgttctgtgcgcccgaataaccccccaatttttgcgcgcagatgcatttgaagcattccggccgactgtgccccataccggtgtctcagaggagctcgtggaaagtgttctgtgcaggtggaagtctgttccggaggaagtgtgcctttctgtattaccaatgggcaccgatcgtacatctgaaagtaccaaaggacgggcctgactctagttcaagaaacagacaagccccttgtcggttgccctcctccaatggatccatgatgcattgtgcttctaccattgtgaataattagatcatcgaatgccagtctttctgaagcccagactaccggagaacaccggtgttgacaatgacctaactaagatgacagtcagcagagaaggaggctgcccttttcttgtttgtgagacaaggacggtaacgaggaggaactcccagtcttgcgcttcgagaatagcaccaaacagacgatcttgtcagaacaaaaaaagtcgcatgcgaattatttgcctcgctgggaaccggatagggaaaacaaattataagaaagcttcgttttccgcgccgtcactatccagggtacgcttgcttgttcctgggacctctgttccatggacaagctatcctatctgttcgctcttgacgctccgaaactttaaagcttgcgtcgtgcattttcagcgtttcttgcgagaaacaaaacaaccgaacgccgttgtctgctctggaggccgtctgagcgcccagagggacggctagtctctcggcgcatgccacgatatggaaaagaatgacagggttgctagagaaggtcaactgcctgcacattttcgcccattctttttctacgcaccgaccggctgatgatgctaaatatattttcgggtcgtctctagacagctgcttgtcgctttttgtttctccgccgtctgcaaattccctgactctgtgcttctaagtttcagtaagaaagtcacctgcctccaccttccgactttgtcttcccagcgctgcgtctttaccctccatcccgtcccaccaaagtacacatccttttttcaaaaaggcatatgcacgagctctcactccctttgacagcggagccctttccactttcacagtttcttccccgtgcccgtttcagcgtcgggcggctttgtctccagcgatttccaacggcagagttgcaaaagggttgtgcctgatttctcaagaaaaacactagctgtgcagatactggaaaacgcgcgtttcgcaggttatttaggggtgtgtgagatcctcgtaggttcgtggcgcgcgacaggacacactagatgcacaaaagcatgttcttatgtacctctgtgttgagctgccaacttggacaggtgcagctgcttttctccgttgcattttccttcttcaagcgtatgttcacggtcccaggtgccagaacgccgttggttgcaggggggctttgcattcgcaacggttcggttgcaagtttcgagcgcctcgccccgatggaggaatgatacaaactgcccgaagggacggtttcttcattttcttcaacctttccagttttccgcgagaccagatttgctcagctttttacagcgtttgttcgagcggccctgactcgatttgtttgggcttgctttcacgcctttcccccttgtctactttgagacaagttctcgaggacgctgcctctgtgcagcagccatagagtctcgaactgggacaaagcgtcagggaagagggaattggttcttcggggctttctcgagaaacttgacaa

SEQ ID NO: 1171 - DNA, 2142 bp, Toxoplasma gondii
  source 1..2142: mol_type = genomic DNA
ttaaggatacccagggttattacttggagcttgcgatcgtcaggagcaagaaagagaggtcagtaatagatccgggagtctagagaaagttatctgggacccgcgcacgagaatccatgagttgatgaaagtcttttttaaccgacagtttgtgataaaataggttgttacattcacgtggggtttccgcttcagcaggatgatccatcagctgttctaccttgactcgtatgctctttttaggggcagagcagctaagacaggagaaagggaaagatcccgtcgaatatttgatgaagaacacatattccaacaaaacgcaccagggaaatatagaagcctgccaaattcagatctgtcactaaaactctaaagaaaaaggcgtccgcatgataaccgaaaaaccttcgcacaacgaggattgcactgggtgagaagtctggaccatatccgcggcttccctcaaagcatcctttcgagaggtgttgagagcagtgtatatgcgctcccgtgttgcaaagcctcccgtaggaactgaaaagtgatttaagcatttacccagtcagtgacgctggcgcgctcgtcacagcaaagacacgatgggaacctacgctttgacatgttccggatcacaattgcaaatataacagcaggctgaagaaccgtgaagtgtctggccgtcccgagcaagccagttctttgtcctttcaatctttcccatcatgccgtcggtcaccgcgtgtgacgtatatcaccgtcggtagggaaaaaaagtgtagttgagtttacctccaatttcatgcggatgtggaagatgcgagctgccgggaaactattacagcaagggctatccccaagttatactgtttgcaacactgaaaaattcctctttcgttcgtcagaatcagtgcgattgagtgccaggttcccttatggtggaacatgaatgatcatgaaaagagtgccagcgttacatcagaaacagcttcaaagcactttcactaggagttactgcactagagtggtgagaattgaaacggcgcagattgtggtcgcgataccttgacatattccacgaaaaaaaggggtcgtgtgagcatgcaggaacaaagcttgacaaacatacgtgtgatgtactaccatgtcaatatgaaaacacacacagacagaccgttattcccctttatatgcctcacagcttgccaagatttccgacaagttatttttttggcctctaaatttcatgttgattagatgcggtgcgtgtcgtcaaccatacagtaattcgtggttcatctttacagagttgtactccatccttcgttgctgaaggcgcaggtgcattcagtgtctttttttttcggcaactgtattaggcatcacgcggcgttaccaatagcatgacggaaaacagtgaaagaaaaaatggaacaactgcgttcttcagctccgctacacactttcaggttctacaatgtctccttatatgtgcactcgtcatccgccatactttacagctcggattctcattgtgccctggtactgacaagaagacgaccaccgtgaatttccgcaaggcaacgtgactggcagagcagggcaaaagctaaagacacgcttcagtcgcttcagaagagttcctatcgcggagcgcagaacaactagcagcttgcaactgggcctgcacacactgtcagtgcacatgctgatgggtgctcgacatcgcatgcagagcagcacacctgatgtgaaatgattgacgacgatcatccgaatgcttttctttctaactcgtgacacattaaaatttggcatgttcagatgttcccagcgttttctcttctttcacctcatgtttctacgcctccctgcatgtatggaaagcaatcgctcttttttcgtcccctcacgagaacgttgatgctgtaatggaaatttcatctgcatgtgtaacggcttcttcacagcttgttgaatagaaacttttctgcgatccatatcgcccgtgtccatggccagcattcttgtgagctcttgtcaacgcctgtgccaacagctattcacacacacgcgtgtcgtgcccaggctccagatagtcttctctggaatccaggttcgattctatagttgacgtctctttca

SEQ ID NO: 1172 - DNA, 2660 bp, Toxoplasma gondii
  source 1..2660: mol_type = genomic DNA
cgcgagctctgttttcaagagggtgcgagagtgaagtgctaagaggcttttgacgccacaagagtcttgtcgcctctttcgtaaaattccccggaaggtgacatcgtctttgtgcttcatatttccgcgttttctttgcgattcgggattcgcggttctttcttgcttcgtctgctcagagaggtccctcccccacttcgcttcttcgttcctaagcaaagcaccgaacggcagacagtagacttaaacattgaggtgaaaaacctgtctttacttgaaaagaatcgcgaggatatctacgcgtcgttcagaaaaagagagatccccgtagacgtgctaagtctgtgccatctgatccaaagtggaaatgcgtggcactcatgcggagacacaaagaacagaaacgagtcgctgcgggtttgaaggtggtgaatgaaccagtgctcgcctttatctcgcaagcgcttcgacacgcactgtgcaagactcgcaacgcactggagaaaacctcgactgttttctggaaagctcagaggaaaaagtgcagcagacggtctgtggatctgcgtctcaaagaataccaaaggaaagagggattaaagaagaggaaaaaatcagaaagggacaaaggaagcgagggagacagcaagaaaagggggagtgtgcctctgcgtcttgtgaagggaagaaaaaggggtatgaaaacaacgaggaaacaaagagagagtgtgtgtgtatctgtgtctacgaagaaagcaggaaatgtcgtgacctatgccactgaggtgcacagactgaacaagattgacattctggaaaggcaagaagccacactctctcccttctcgtttttcctccgagatttgtgcgatatgtcatcaggagcccctctgccttgagaacgctacacacagagaatagagaagaaaaatgcgtcgagtccggcttctccatgcctttctttggaacacttctcccgaagaaatctgtttctcctatcgcaagcttctcccgcggccgctcacttggtgtgatgcattttgcgcgacacgaggaactctttgtaaaagaactagaggcacgtccgcattcgtttcactgccacgagctctttcagatggcagagacgagaaagcagacacttccaccggggaagaatttgctgtgtgttcatcctgcccaagcctggctttcctcccctgatcattagcctcttctcccctccccttggtttgccgttaaggcgagaaacgaacgagagattcacagaaaggcggcacccacgtgttttgtggagtgtacatacaccccatgtgtttgtcaggcttcggtgagctgtcagttgttgcctctttcctcgcgatttgctggaactttctggccacacgagacctcggggaaaagcgactccggagaaacttcgtcgcctggcccgatcgcgcctccgctggctaacaacttctttcgtttccgcattcttagtttctttcatggattcgagagctcgaaactggcacctgccaagcacggagttgcggtgtatatacaccgcaaatcatgtgcaagtttgtcgcttttggcgcgttgaagggcgcagctcgcacacctggggctggacaggttagaagtcttgagagaggctgcctggaagcctgttttctggaattttgttttctcgaaagtcttcttttctgtcgcgttcgcgcgtttctctgttcttgggctgctagcggtatttttcagcggctctggggatcgcaagtcgctcgctgttttctcggcggcacctttctcgcggctctccccggggggagggggagacgcgtgtgcgctgtctttgctttttttctgcagtttttccccttttttttgtctgccgcagtcgtcgcgaatctttccttttccgggacttcgcagccgaggttccactgctttctgccgcattcagacggtgcgtcaagcacttctttccctcctcagagagaagcttgtctttctgtgcaagcgagggcacgcgggcgcacggtctcgaagagtcagttgtcggaaaagcggagactcgctctgttttcttctcatctgtcgccagcgaagacattcctttcccttcgtcctccacggcgcctgtcttcgctcttcgccgcgcctcgctgtctgcaccgccgggcgcagggaggatcggcgagactcccgtccttggctattccctctcttcacacaaaactcctttcggactctcctaccttctcggatcgccgctctctcgtgcgcgacgccgcgtctgtctttgccggactctacacacactcgcaacccccacacgggacgcgttttcgtaacacaggagactcctaggtcttgcatgccagtctgccttttccacgccgtagaccaccggtttctgcgtcttcgtccctccctgagccgtcgcccgcgtttctcggatttcggccgatttccagacgcacactgtctcccttcgccgctctcgttttctcagcgaagcaaaggactccgttcttgtcgccggtctctcagctgaagcagctgcctcgagaagagacgcaccaggagagacagcgaaactgagagaagaagggacaagcttctcgaatctagcgaacgcacaggcttcgcggcgcgcccagtcttctggtgta

SEQ ID NO: 1173 - DNA, 3582 bp, Toxoplasma gondii
  source 1..3582: mol_type = genomic DNA
ataatgaagcagacagaactggcaacgcgggagacgaggcaaagcagacttcctctgacagaagagttcgccagacgcagcgagcgctctacctcttgcgagtcgccgtcgcacgagaagccgtccatgagcttgtctccggaaaagttaagccttatcgatcaacgcgtttcatggactccgccggccgccagctccacgacgaggcttacaggagcctcctagaggtaaacggcgtggtgcccctgtgaaggaggcgagggaacgaaggagaaagacgtcctgtgttgtctattgcagcttcgatggtctttttcctcgctcaagaggtccaggctgacacctgtggagtgcggagacagagggcgaaggtggatcttgcaaaggagcagggacgcgcgttttccgacctcttcgctcgcgcggagttgtctgtcatgaagacgccacacccgctattgttctgctttgtgtagctgttcgtcctcggcgtgactctcccaaatcccccgtctctctcagccctgtcaggtgctagaacctcagaactggcgaagcctcttctctggtttcgcgtgtcactttcatttaccgcagggtctgcgaacgtatgcggcagttgttagagtttacctgggcgctggctcgcatctgcgacaaaaaagtcatccatctgcatgtatacgcgcatgcagcgacacagcgattcacgtcgtgcgtagtcacacgcatttacgtggtaccgtgcgatctacagagtagacctggacgctatggacctcagcgttctgcaaagtggagtccgcgagcgaagcagacgcatttcagcgagttcagttttgtgtcaagtctaggtgaaatcgtgcagggactatctgcaagtgaaatgagtcggcagcaagaaataaataagcgttttgctccagccaatctgaactcgtgacgtctttgatgtgcatctgtccatgctggttaggtttcttgtgtccatcagtttctcactgcgtactaacgaacagaccagaaggggtctgtgtagtaagcgtccttcaacaaaagggtcgcgtaggttcttggagaaacaacggatttgtaaaaacacgacaccggttcgcacacaagtgtttttctctcgggcgaaaaccacatttttcggaccaccgcttgaaaatttgggataggtgaagcgattccagaacataatacacaaccatctgaaaagtgacacagatcttcgtttcgtggaccgtcagagaatgcgaagaaaccttttctgtcgtgctgaacttttctaagcaacaccctatctcgcttcgtcttctctctcggtcgacacgcacggcaaagcaaatggggagtcgcccgcagatcgaggcacaaagccaaagagcgcagagctcgacgcggcgcagtgaccctcgactactccagccaagactggaaagcaaagaggaaggcaggcttcgcagaatttcagataaaggcatgtcagttcctcctctcgtctctggctctgcaagtcgccacacgtgaaatcgtaccaccgatgcacaaacttcctctcgaggaaccccacaggcctgtgaacggcgtttcgtagggacacgagagaaacggccagcggagaagagctctgcagaaaacatacgcttctttgactttaaaagaactccgcagaaagcatgcacttcttctactttcccttggttcgccggattcgggaggaagcccatacaggtggcttctggacaaatccggtggaaaacacagcgttcgccagacgcacaagcacgctcgcagcttgctgttgcctgcacctggaagaagggtggcaaacgcactgcagggagtagtctagttttcggactgctgttccggtgtcatgaacacaggctaggaatggcggtggcgtagggcctcgtcaaagacgacaacagcaactttccagcgaatcgccgctctctcggtcgcaatccctccctctatccagccgatccacctcgacttggtttatcatggaaatctggcacgtcgctcgacctgaagtgcgccgccttttcggaactcgcaagaaacgcactcaaacaggaaaatccgtgaaagcaaggcttaagcggtggcagacttgccgcgaaactctctttccccgactctccagatcttcgtctctcttttctctggacattttcgcctcttttacatctggagaagcgtcgcgtcggcaatccagcctggaacgtcgacaagtgaagagccgcgccgttgccccagagacgacattttcatttatttcaatacgtgcagaagaggagagacccgagccggaagatccgcatgttcttatccgtaaatgatgcctggaacacgacgacctggcatctgtccaaagctggcattgagagcatgcggatctacgggttcaacgaacaccatcacatcgtgagaacaccaggattcacagctgcgattcttgttaccacgcaaatttcggaggcacagcaatcgtccttgtcgcgatcgctaacaaatagctaaagacacaattagtatcttgcggactacgaccttgaatagtggaggttatgcgatgcgtaacgcaacgtacgtcttattacacggtagatcagcggcgacacaccgcggtgtctctgtgccccgcagaaaacatgcactaagaacggttcagagttctctctttcttccatttctcgatgttcatgcttattttccttttgcttgtccctccacttttctgcctttctttcgatggcctgaacgttctgcttttcccctcgtccctggtgcactttctttctgcactaacgaaaacaaacactgtaaagaaattcttttccccctgaactcaaacgttgcgatggtaaatgtccctttttcacgattagcacacgaaacgctgcaaggaaaaaaaacttgtattcctttcctcgcattctagatcgtgtgccgctgtctgtgcttctgcagagcgtttctcgtggatctccgcccgacacggagacgatgtttttcgttttccgacgctccagttcgactcgaagttttcctcagtttcattgtgtcgttgcgttgtctgtttttctctttttctgttttttttctcggaaggacgctgcaaagatctctcgcagcacaccgggaactctcgtcgtccaccacgtacgcatgcggttcggaaaaaaattcgtgactccagcttgtctccctcctgccctccagagatttttccatcttcttcttgctcttctttctccgctgttccttctcccctgttctttctcccctgttccttctccctttcctttcgctgggctctcccggtcttcctttctttctgcgccggattcgctttcgcgagagtgtgcgcgtgtctcgccccgcgcttgagtcaactcatcacggccttcctcccgcctcctgccttggtcctcccgtccacctttctctttcctggcatctctgctcctcgttcctcctcgcttcctcctccgcgcctgcttcgctcctccttctgtccggaacgcgtttctctccccatctcctcctcaccttctgccgcaccca

SEQ ID NO: 1174 - DNA, 1134 bp, Toxoplasma gondii
  source 1..1134: mol_type = genomic DNA
actcgagctcaagagcttgagtttcagacggaaactcgaagagggaagtcctgcggatgtccagcgatgggtgggctgtacaaacagcacgcggcccagggatgaagggcttcacagagtctcagacgccgcaagctgcgcgtgtcctggttgtaaccgacacactgtcgcagattcacatagtgagaatcttcaagctagcttccgcagaagaccggagatttggtttccacgaatctgaatttggccttggggaaaaaagcagactgggagttcgcgtgcagcagcgacctttccgtctccgaaacggcgaggtgagtgtcaaggctgtcgaggcgacgcgcggcgcgaatctagcgcgagcaaagaggaaatacaaacagaagaaacgcagaaaacgacttggaccggcaggcgacagggccggagctgtcgccgccatttctgcaaagacgctcaagggcgaaggtgagaggcgggttgctcccgcctgggtgcatggaaatctgccaagtgggtcgaagctgcagttgttttcaagccagaaaacctctccatattgatcaggagcccgaaacagattcaaaatacagaattttctgaaataccgggggaaacaaaacagagacgactggccactccaatgagatcacggccgcagcacacttcggactggaaactaattctcacgtgggaaaggtagggtggcaaaggaccgacggcgaaaggctgtctggaaacggaagagaagcgccggggcgtgagaaggatgaaggcgagcaacttcagcagtcgctgtttccggagacactcgtcctggtggataagcgggacgagaccgccgagagccatgtgctaattaaaagcgaggaaagagccgccgcaaaacgagaacgggtagacacagtgaacccgaaaagaacagaagggcgacggcagatcctcgtgtcgctgcgccgcgcgaacataacggacggtcgtgaaacgtcacgaggcaactgacgaaaatgagccagaaagattatccagaagaaagcacacgactaccgatccgcagacggaaccctgcgggttgcttttagcgaagaaactcgtgcgtcgaggctttttgaagtggtaagcgcagaagggaca

SEQ ID NO: 1175 - DNA, 1427 bp, Toxoplasma gondii
  source 1..1427: mol_type = genomic DNA
ctggctgaataagtcacagtgtgacaaggacgttagcatccaacacatatatgcatatagaccgaaagtgcgatagataaatgcatcttggctagatgttaaaggctagcaaatgcccaagatgtttcggaagtatacatctagacgatcgcttgatacctgtaattatctgatgtacaaatgtcactagcccaatgaacactttttacgcctgggttggtgcgcgttatggagtggatgtcgggagtacaaatgagcagtcaacacttgtcaacaagtagagcaaaagaacggctgtgctcagggattgagtctttttgctgatgagatttaggtgtctaaaactgtgaaggctggaaacagacgctggaatgcgtagtagaatttagttcatttcgtgcgctgtgacatccgaagggctgaggaagtggataatcttgattacgattcgaagtgttattccacatgcaccagagaccttacatggaaaagtagctactatcttacaccttgctacccattcagcctaaaggcgcttgccttttctcacctataatgtacccggccacagttccatctggtgcgtcagcgacaatgcacagctcgggccagttggagaggtagcggagataaaagctttggagaaacgtctcagtgaacccatccagattgacggcgttgaatctgaaaagatctcctgcagtcataggtcggaagcaactcatttttttggcccagttgcagtgcgagccgtggagtcggcggttctggctttgtaaatccaaaaaagcgtgggtttcaggcagctgcgtctctacccaagggagacttgagtcaacagactgctgtgcggggctagcgtatccagttaagtgccgctgccgccgttaaatccgacggatacgaacaagcacgagggtcacgctgcaagaaaaggaatcttgcccacgaaacacagaaccacaatatctcattgcactccggacataccaacggcatcgccgagaaaaaacaacgttcggacgtgactcatacaaacaccctggttttagaggtgctgcttctcacctgttgtcgttctctcttcctaagcatggcacaaaaaagatcttgccgcagacaggctgacatctgaaacacacagtgataaagtatcgatacctggatttctagatgcgtaaagtagatgcgcatgtgcaactcgatgctcaaattacctcgcaaaaagtggggttgggatgggtggtgtctatcccgtgccgcgcgacgaaacctgctcactgtcttgtctggatgtgcaggagacttgagcgctgacggccgagactctctcaaattcagaaagtccttgcttaccacgagagtcttctcgaccaaccttctgtttcggcaatctgcagcggccaggtcttatcttgtaaaccaca

SEQ ID NO: 1176 - DNA, 4132 bp, Toxoplasma gondii
  source 1..4132: mol_type = genomic DNA
tggtacgagcttaacacgccgtagttgcatttaagtcgtcaaagtcacgcgggtggatgcgaccatcgcacgcgtattgcaccgaacaactgatgctcttgaggctgctccaagcgtcgcttcaccacgagaatgtacaaccacgaaacgtaggagtatctggtctgtcagacacaaccacgaccagcagtgtccgtttcttctggagaaaccgtgtcagcgtaaaaacgatgcaggtcaagagacagaagtctgcacaagtgagcaatgggagttgcacggggcgtacctctcgacctaaatccataaagtcctcggctattcccttcccaatttgagagaccgtgtccgccgttctgtttagcttttccatgacttgcttgtgtctgttccacggatggttgcaattacacacccacggagagtcgaacttgttgcaggaacaagaggttctgccgaagtaggcaaccggacacaagtgcacattgtgcaggatatacgagctctgtcagctcccatgtaagtcgtaaatacatcccaaggagaggaaccagtcgaataaacatgtacaaatagccacaactctcgcgcttagtgcgaaaggacgggcgcagcatagcattctcgtcaaagcactacactttctgtacatgtccgatggtgaaatgaagtaacattcccttggagcgctacccacacctacgcagcacaaacctgttatcgaacataaatcgaggagcaaagacgaggtaaaccgagctatctcaaacatctgtgttagctagcggtttaagtaagaaggagataagttttaggagagtctgtgtcgggagagagtgtattcaccacaggggtgatttcgtttccaacatgcttaccgtgtacacttgaaggtgactggatcatgttcgatgtgtttgtgtttgcacctgcacctgttcacaagaccacccccaaaatctgtcttaagaagtggtatgcctttagctattgcagggctgtcagtggccacggtgctggcagacacgaaacacctgtcggcaaactgaattcggcgccacggaacacggcagtcagtcaagctacatcaagaacgacacctgcattcaagaaacaacgcgacacaggaaatcgacgtacagcaggggaaatgttaaatcgcgcgggcgagccctcccaggatcacaaaagaggcatgcttttcttgtctgtcttcaaagaagtcctctcctcccgcatgttctaaggatctccaacagcaaagcgacgaattctcagatgtttttacacgatcaggatgtaaatagaccgccgcaaacagatttcatttctgcaatcgccacacgcgtttttggattgttgctgatgctgcgtctgcatgtgatatatacctgcagccgtgcgctgcctgtttccgccagtatatccacgtgaatgtcgcaccgagatctccgatccattctcagccaattccgtcacgtcaactactccccgcgtcgcctaccttaaaatccacgcaccctctgcaacaatatagaagaagtcgcgacatttgcactttctattggtgcatccaaacgggtgtggacgatcgacacccttggcaagaccctttgtgtgttctttcaggcggtgaccgcacaaacaccggcactcctcacgaatgacaatgcacgctttgtcacattcttcgcagatccagcgccctttgagactcagaggtggtactgtagaagagagacgacaacctgcatttcccccttttgtttttttgctgagtgtatctttctggcaattttcgtccgctctttcatggcgctcgggtgtgctggctaatgaagcaacagtcgcaggtgtggcgccgcaaaaaccacttgaagttgcaggtggaatccttttctccatcggtattgctgaaagcgtgtggacgttcgaaagttgcgttttgtctatacagtcgggtgaaatcggttgcacctggtaaatgctgtgaatggtttttatcctgcaataatttcttgtggccttgcatgaacatgcctggaccgcggagctgccctccggccagttgcccagagaaaaacatcagaacaaagcaaaggagccccggaactccttctctacaagcccccgttgtgtatgatatgctatgaaacgactcgcgatcgtgtaattgagccctgacagtgacggacagatcgttttgcgaccggaggggagctgacacctcatcagttggtgaagctgaaaaacactcacgcaaacttcggacgggtattcagataactgataaaaacgcgaatacaagcaactaacgtcacacataaaaatgctataaagtaaaggcttctggggtgcagtcatgggaatgcgcagttcactagacaacagttcattaatcgatggggcactgctccaagccatgcagccgagcacgaggagccactgccctgtaaaggacagactctaacaccgactgggttgaaatcaatcgctgttcccgctttgagatgtaacgcacattaaatccagtgctttttccggggaaatgacagaggactttcccggatattatgtcttcctagggcaccaggaggatctgtgttcacagacacgcgcacacagtggcacaagacactcgggtcactgccggcgtgctagcacttgtcgtgtctaatgccgcgaacaattatgcctgatttttgccgagttattgcattgaaaacctcagccagttttgcttcttgggaaaagttgcctgttggggatgcacgtggggcggcaagcgtctctcaagctgcatgttcttgccttgacattcgatgcaacaggcgggaagcatgtcttcactgagttaagtcagtagggacaggccaaaataccaccgccaagaaactagctccgtctgtgtcaaaacatggaacaggtaatgctgcacatttgtatggaattaaagattgtacaggagttaagcgaggcgaaaactcaaactcctggcttgtgtggaggtgcaggaagctcacagacactgttaaataccgaagagggaaccgcctagccgcttccttgtctgagaaacccagagtcacacaaaccgggcacgcaacacacggcttcacctgcgataggagttgttgaatccggtgaagccgtgtcatgcatgcttcgctctgtctgacagctcttgcatgattcttatacgccgatattttattaatttagttccaatgacttctcggaaagaatggcgagtgaggagccacaactgccgagtgtcgctgctgcctaagtgagttttcctctttagtacctcgctgagattgaaagattctttgctaaggggaaatcaacggttgtatacttctgacgggtcataacctcattctgcctaagtatcggaaactggcaaatgtgaagagaggccgtccgtcgtgtaaagaagtcactttaacacgctcatgaggcatggcttcactatgtgtatatttttggagtcaccgatgttttaagggcgcagttctgttcgtgcctagatccggcaagaaaggtgaaaggctggtgacgtaggcatcgtcggccgcgacaacattttgggggggcttgcaaaaagtatggtaaatgcggatcctttggagagacagaatttcatctactgaggtggtctttcgtgctccatgaaagtgccattgcatccgccatcgacaaaaacatgtgatgagacaggcttccaggtactcagcgatatcctgtggaaagtaggggctgcagcgatctgctgcgtcttaacggccgttgctgctcgtcggcctggagctgggaccgttttcattttgaggttgttgcttggcaggacctcggcaatgataagtgatcatcacacgagaacagaactagtttctctcttcgtatcaccagaaataggaggtgtccctacttttccccttggggaacatactgttgcatccgtcgttgactcgactcttggtggctgtccgcttcagaccaacacgagcactaccgcatattccttgcatgctcagaactatgatttcatgttcttctttgtattgctggtccacaaaacgaagaagtcttgaatgaacgggtggcagatgttaactgtgggcaaaaa

SEQ ID NO: 1177 - DNA, 3758 bp, Toxoplasma gondii
  source 1..3758: mol_type = genomic DNA
taaaatgccgcatcccacctcagactggcgtgtaccattttagagaccagagctcttgagtcacagaccactgcgaccgcaaggaagtctgacatcggtttttccaatctggatgaccatgtctcagctactgatagcgttttgtcgtcgttttagatgcgtcagtggaggtcgtgttcgaagagctacgccgtgttctgttactcgtattcatttggtggccgcgtacccggtgtgttgagcggtacaagagcggatcacacggggatatattttgtatcataacgccatatttgcgcatgcatgccagggacacatggagccgccacaggtttgcgagtgtaataacagatggtgaattttcgatgtatgttttacacgaagaaaatttttcctccataactttctgtgttttctggtgtcctggtggacacctggttttgtgttcttgacgcagaaggcttttttgtcggagacaggaaaatacgaactacaggtgctatttttttaaagtgttgttgatttacgcagagccaaagttcatatgcgcatcagcataccagcgttagataggaggaggctaatcgaacatcgaagaattgggggagattccaaggaggagagacgcagcaaaaaaagacagctcttggaagacacgtggtggaacctctagaatcatgagacgacaaaggagcacaatagcagggtcatgggtgggtcagatgtgttacttctttgcgtagaatgggtctgctatgcagattgagtggtggccgcaccgaactgtcccctgggtagtattttcgtccatgggatgaggaaagcagcgataagtacgcacaatatgttgtcttactcaggaaccggagacgaaaccgcgaatggggttttccatagaggcgagtactcgggtatgtgattgagaagacggtgatgtgtgttgcagtggttgctgcacggtgtgaggagtcgctcactcagttagcctgtccgcgcgaggagcgtagtagtcaaacgatggtatgtttgtgattttgttgctggtgcgtgtggagccgcttccaccatgtggtcgaggcgaggtcacaccctttttgtaccaagctgccactctctgtcggaaggagtgcttgtgcttcagcaacccctcattcatacaacgtgctgtgcggatgatggggggacaaggcggcatcctgtccaagcggaacgtgagacggcggctttgtagggtcctcgactgacaggggagggaccaacctgcgatgtcattacatgaaatattacgttcgtttcctgaaaaatgggttgattcatacactcagtcggtagtaggtgttcaactatggcgttagtgagcaacgaagcgacttacctggtgttctgctcgcacgtcaggacaccaccaccatctcgatttccgtgtctgatctagtcagtcaggattatccatcagcagccaagttgcatgatctgctctcgccattagcaggagcggtggatgaaaagatataggcagaactataagtgacgagaaacgttgtatgttacaggaaacagtagccttgattcactggggcgatggaatacagccgtcttccactgcagactcaacttcgcctggtcccttcgtattgctccacgttcgctgcttcctcaccctcgagcgcttagggtccttcacgtggtcgtgttccagcgtcgttgtcgggatgttgttcgttacataaattgaactagtcaagcgttaaattagcccgtttgcgctctcaatcaacgtctccgtgtctagcgtgcaaacggttgctgctttgaaatgagtattcgtcaccataaagacaatgtaaaaaatagtagagattataagtccgtcagtgtacctggggagttatccggagaccacaggaggacaaacgtcatcgctattgggctgttaaggactgcgaaccgcagctagagataacgatcgtacatgggactagtttttccaatgaaatacacgtcccatgttttgggtagtagatcttcaacgaaataacttgatttcgcgcgacgatgttcctcaagtccccagcatctttgtgtttgtccctatactgcatctacatcagtttggccgccgaagcatatatcgccactgaattggggtttcgaagagtgaagcatggtgaacaatatagcttcttcgcgctcctgtcgaatgggtaaacgcacctgacacgcaatgtgaacgccggtaagatcctgaattacccaactactggcggccagaagaaaccggttcgcgtagccggtagcccttgcacaaccgaagaaagcgcactgcgagcgccccagtttgcataatacgtatgcgccgcgaggttttgtatgtgatataaaataaatgtgccactcacacagttccacatactacgcgcagcaccgttaatctgcttccacaagttgttctttccttcacagcaacggataggtaccaagactagagctgccgctgtgtggcgcgttgctctttcgaatctgcaccgcggtgtcttgagtgacggcagaaagtgtcaccagaatttcatttggttcctatacatctgctgcaccgttatttttcccttccagtcgaagtgaggatacgcaaagtcgaggataaatcgtcttttggtgctcgcccgccgaaaaagaattgcaaggtttttctggatgggcgaggacgacggtttgctgtataccgaggaggggttgcgccgtacctccctgtctgcattccagagtacgtttcgtggaccgacgccaagctgttgtccagtccttcgttggagatgccccaggatggtttatcttttactatatggaaacgtcaaagcgggcctccaattgaagtaaggaagcaatccagctgagaggacggtggagttgcctgccaccctcacctttggagtctccgatgtctcccgcatttcggtcgccctctcgttctccagatttcctgtccagtgcgcgtctccctcaaggagtacttgttcacatgtgccgcgtgaaatctttctttgtggcatcttggacctgtttaaaacattgtgtcgtcttcgaattggatctgttttggctattgatgttttgtgtatgggatagtagactctgcttgccgccacgcgttccgcaagttttccctctcgcaacctgcttggccatcagccgttagaaacctgctggcaactgagataagcgaataaatctctagagttactaacggtcagcattgctgcatgcgttgtttgcgtggagtgtccgcagtctttcggtttttttcgctttccaacgccgttcttcggtaacttccggctgcccgggtggctgtgccacgttttcgatgcgtgtttcttcttggtccccatcgatgaaatcctcagtgtacgacctcagccacgcttcgcaagcgaatctgctgagctgtgtgaaattttgttccggcagaaagctccacggcacttgacgagttttttggcacatgagcgcagtgtagtcaccccgcctttcttaaggaaagctgtagcacagctaagaagcggtagtacgacgtattcttccattgtggcgttcttggcagggctggttcttctagtagtgctagctggttcactgttgccataacctctcgcaaggctgttctactcggtcacgctaggtgattattcatatacgtctggttttggttttttggactttattgcgcccacgtaactgaatcctctctgccgtcacca

SEQ ID NO: 1178 - DNA, 2668 bp, Toxoplasma gondii
  source 1..2668: mol_type = genomic DNA
ctgctcacattgcaaaagatattagaagggagaaatgggtacggcattacgccggccattaacgggggtcagaaatacgttgggtctacctctagttgcgctatcccatttgacagaacgctgagaaccttgaataaaggccactcttcagcaatttccggaagatcccgggtcagttcacggagactggtacactctagaccgcgcaatttgcaataatcatgagtctgcttgtcgatcaacaccactgcatcctccatggcttcattcaggggcatgcccgcgtcgacgaacttcttcaaggcgatgaacagctgattcgtcgcattctcattcacagacccaacaccaaatgcaccaccactgctgggctgtgaatacccatattcagccaacggtcgagtgggcgggatagacccagagccttgctgtggcggttcctgtaggtgggtcaagtgtggcgctatagcaccgagcattgaacagtggatatcggagaaccacttctggtggtcttcgtttgcgtggtgaagcagcgacataatatgtgtcttgtccgaagacgctcgtcctgtctcgagcgtagcctgagagtaccgcggcataccgctgagcaaatatggtaaagcggcaagtaagcatggaggctgctccactggcaatgtcccaccggggaggcggctctgaatgtttcgatacagtgtggtcaggtggccggggacgagagagtcagagagtgtattggggccagtattttcgtcgcccgtagggccactgcggtaaatatgagagggactcatactttggggcaatatcaaaaaactgccctccctgcgtactccggtccatggcattttgccttctccgagaggatgacgagccagcacgggcagcatcgtggattgcagttcattgctccatgtggtttcttgaagcgagacaggattggaaggcacatacgctgaccaaacatggtccgaaaaagcaaaccccgggtgcacatcgcgagatgccctcatggatgatgctgtgcatgtggcgaacgagctcgagaccattaaaacgatgagcacgatattcagccagaccgctggtgtagatgtccttgcccgtgtacgatgttcggaatccgcaggtgtcattttgcggacaccacctctgaatgaagagtgggagacggcaagcttgcaaggctggatgcggtttagaagtcatttactgagccatggtgtgaataaccgatggactgcagttcatagtctgcaggtgtgccagtcagtcaaaacaaaaagcccgagctgcggaggccggatacgttcatctcagtagactttacgcccactgttttcccctgacagatactgtacaaagaaagaatggtgatatttatgtgattgaaatgacgactgaccacaaattacaagcaacaggctcaacggtctggcgcagcaggggcacacacagctccgcaggtgaccacgaaaagaaccgttaaaatggtgccactggtgactcacggtggtcttacgattttcttataacagctgtacaattccctccaaataacgtgcaacagggcagcagagacaaaggaaacttcgtcgtcacgaacatgaacatgtggaaacaaaggaacacaaatgccgggtgcactgcagcaggttcctgtcgagtgatccaggatactggctagcggcggcggccggccccaaacgtccagctcgcactgtttacggggtaggatgggcaaaactcgggagctctagcgttagtaaggaagaagtcacattatctgttaagcgcgcgcagagctgacctccacctcctcatctgtgaacacagtggaaaaagaacaagtcagggatagcggtaatcggcttgcagagacatatcgcctgtgactctgtaaagcagtgaacacacagtcacctcattcgcgcagtgtccaacgatggccaccttacataaatcgacgctccccccccgacagccgttgcgggcagactgttgctgagacgtccgtgcggtcaatttgattgctctcgggtatgacttgacgagaaccagccacaggactcgaatttcaactctcagatgcatggcgacctgaggctttcctgttgcagttttttacttttttgtgtccccgttgacttaccaagctgccaaaagtcatgaagagattgttttagttcaaaaatcagtttgtcgcgcgacatcgtcgcgatgaactagaatcctgccctactcatcatctggcaccacatttgaatcagatcatgatccttccactgcgtggagaaatgtgacgtggtgaggtagctgccagtaagttcggtaagcttcatcgttcttcgacgcagatgtatgctaactcttcggaaacacatatcatgccaaccctgcgttacgtcagtgttttctccatcaggaagtctttttgcctctggctaatcctaaccgacacctcagcagcgcgcacaacacatccctgagaaggtcgtgcgtgtcccgacgctgctcggagtccgtcccgtttgtttctggtgcacactgtgttgtgcctgaggggttgactgcctcactgcagaacaacacacctttttccaggtctaaatatcttcaagttgaccagttccgcttcgcgggccctcgtgtgtgtccatca

SEQ ID NO: 1179 - DNA, 4915 bp, Toxoplasma gondii
  source 1..4915: mol_type = genomic DNA
atagtcgtagagaaagatgcaaaagaaaaggagagaagaggcggcagaactggggacggagaaaagagttatgacgtacatggtgttttccggggaagattgtctccaccacatcgttaaaagggagaagcgaaagagccggaaggctggtcactaggtggggaaggctgcaggctcaggactgctggtcacaagaggcagttcgagaagccaggcgaagtccggcttcctgtcctcctgcagagcggccgagacagcgaagaaaaagaggaaaaccccaagaaagtgaaactaaagaagctgtcggaagagagaaataggtcaccatgtcggaagcaagccgaaaccatatggcgggaagtgcgtcgagcttgcacagagtggaccgggtgtgtgtggtgtcgctgtgcctggttgccttctccatcagaaaatcgacaaacgaactttactcgctccttcccgccaaagaggtggcgagccaccagagcgttggtcgcagtttcatcttccgtgtctccaattttttcaggctgtatagagaaaagcaagcctgggccagaccgagaatgcggtacaagccccgaccgcggttgtgggacgatgaggaacctcgggtacgagccaaggacacgaaaaaagtcgctgcagcttggttgtttaagtcaaagaagcaattgtgttaaaggaacccgaaaggaactgttagcacggcgaaatttgagagttctgcgccggcagtgaatccaggtgaggctaccgctagatgcggagggggcgggaaaaaaaccaggtaggcgtcggcaggacaaacagaagcaaagcccttgtaacggggatgatctccggcgcgtatcgacggaaacgaggaaggaagacgaaacttcagagagaagctcaaaattaacgaaacgagcgtccagcgcacagcagctccgataccgccgatccagaaccgagtcgaagcgtgtgaggcggccggggaaactcgctctgtgatcggagcttaccggcgctcgcgtatcgagttttggatgacgcggagaaggacaaaatctgtgcaacttggtcaactcgtcgatggcggagattttggagaaaagatcgacagaatcgcgatccagaagcggcgcgcaaacgggaacagaagccggtccgcggcggtgcatgcgcagaaccacgcgaaaagccgccatcccagaaggacgccacagagaagcagcgacggtctgtcaaacgcaaatgacagcaagtttctgaatcttcgatatcgagcagacgtgctcttttctcaaaaggctgttcgagggaacttcccctgcggaagtccgtcggagttcacagcctgttgggtgaggcacaccatactcacggtctcgacgggagagtctacacagttttctcaggtcaaatacggggagacgctgagagaggcttcagcacgccgacccagctttgtcgcttctctcaaatcaaggaattcgcggttgatttcaaaagggaaaactcggcccggaaagctccatgatatctcgtggatgcggtgcggtcggtggccccgtttcgtccgcgaggtcactttcttgagacacaactgtctacagcgagagacctttggattctttccgttcggctctgcttcatagaataacttttttccagtgaacagcaagaagttcatccgtgttttctcctgcccagaaggcaagaattctctctctttatgccagacagcccggcagttgcaagaactaaaaacgcttggattggtgaccaaccgtccagaacggaagcttccgtttgtcgctggttaggttagcctcgtctgaatgccttccgagataaaaaaaatgtgtggcgcgcctcgtacgctcaaagttgccgtttatccttgcatttgaatgtcagagagggttttgcctgcaatcatttggagtgcgaaggtcatcccggtttcgggtggaactactttcaacatcgcagtttttttattagtgaaacgcagagatacaaaacagaaaacgagagcactttactgggaccatttaaggccacgatgtctttttgtcgttgacggtatcagaaaaaccagagctcttccatctctggaggaggccggctctagtgaatttccccaggggaggaacatttcagtccgttcgctgcggttcagcactcgcactcggtctaatgcattctcggggaccgatcacagtagaattcgtgaggaacttcccttctggtgaaacagagcactaaactactttctttgcttgagaaaaagggccattgtgaagttcagggctctctattacctgccatgaggggcgcttctgctgctctcgcaccttcgtgttcgacagagagcatgatccatgataaaaggtgcttttgtaaaacgaagaaagtgttcgttctgtacagacaagactatggtattgacgtcgtttagaaggctgccacccggggtataacctcttccgcgacgatgtccgcactaacgactcgacagatatccagatgttatttctgtgaagatcccacaagtgtctatggccgtgcaaacggcttctgctgttgatttcagaaaccaacatgctctgtagagcctgtgtacctttcgagttctctgacaaagggaagtaaatcctacagaaaagcgggcgtctctagtggaacaacagaaaaccctgcggtgtattcccgtggctacatggtttgggacacgaaatccgccagtcccgatgcatctaactgtcgggagccgccaagatcacggaaaaaggccggtgcattcccagtcccttcttgttttatctcgcgttctcgtcgatactcgtttgttactcgctctaccccctctgtcggcgtttccaggccaggtctacggacttcagtctgtgtcgcacacttccatggaaaccttttcccgtgagtctatcgacgcttccttctgcgagcgcccttctgtgaagttcgtactcgtgccgcctcgcgtgtctgctcgttctccctcagtcgcggcaggaaggtcactcctggcccattcgcgttccttcgtcagaagattcactgccgtgagggtccttgcatgttcgacccttcgcgcggatgacacgcatggcttcgccttctggacgcgaatgttccatgaagttgaacttccgccggagagtaccccttctctgccacggggctgctttggagtttcctcgcgacgcgggagctcctcttcgtgagctgtcttttccacggcggttgcgcactaggaaacgaaagcgcactgttctggttgctgcgttctccagcccgtcagcgagttcttcagagtcgactgcgattttcttgagcgagcgtcttttcccctccttttcgcgtccggcgtccacatgccgcagcacttcgtcaacgctgacgagttctgtcgcggttgacgtggctcgcgccttcatgtgagagtctttgtgtcgaattcgaaggagtctcctctcaagcgcagccggacactgagcgcggcgacgagaaaaaaactcgagtttttttcgtcatccgtcttcgcaagggggcgactcctcggttgccgccagcacgggggaggtggctgcgttgtaagcagacgcagacagcctctggctgcgtgtttctccttcgtgagtcgtttgtttccttgccttctcgtcgagttgttcacgcttctttggtcgaggaccttccgcgggtgtcaaatgctctctcttctgtctgagtctccctccctttttggcgtgactcgcgcgtgtcgaggccgcggcctcgcagggggacccaacgacgcgcccggcgctgcttttcgcagaaaagcaatagcgaacgcgagattttcattgttcttgtgaacgcgcgctccagcactcctgctcgaaaaagtcaagggaggatctcgtcgaggcgcgcccgggttgtcggccagttcgagctcctcagagacacggcaagtgactctcgaaatcgcgccccttctgccgctctcaccacctctcctgcaaacgctgtccagtcaaacactgtctaaaagaaaaggcaaaacacagagcgagaccccttccgatttgcttttttaccaccgactacagccgtcgtctctgggtctgcatttatcctgggtcgcagacctgctccgataaaaccgcgcgaatcctggaagaaacagctgagtgcgttctctcggatttcccgtggctctttctcgctgccgaaggttcctctttgcaagatttgacttttgtttcgttggaggaaaccccaattcgacttccgcgctcccactctacaagacaccgtacgggagggtgtggcggtcaatttttcaaactttcagggagtcgtccactcatgtcaaacatttgttaaccagttttttcccctccgtctcttattttccccgagcccctttgagttcttttggcatctttccacgcgtcgctctcctccgtcgttcgttttctgctgcgctgccgcaggtttatcccgccctcgcgtgtctgccctttcggctgactcacctgcctctctttccacgttctcctccctctctttcgtatctctactttctttgcgtctcctcgttgctctccgcagaccgcttcttcccttccgagagagaccatcccttctcgattttcaggctctgctggcctcccgcaactcgttgctcccccatcccttctgctcagtctgtttctttcagaccctcacttccttctccttctgcgtctgcttctcctcttcgtcgcttccccttcttcctgtctccttcttcgtcttcgcttactctgcctcctctcttcttcgtttcgtttcctgtctccaacgtttttctctctctctcactctctgcgttcgtccaccttcgcggtttccctctctgcttatccaa

SEQ ID NO: 1180 - DNA, 2454 bp, Toxoplasma gondii
  source 1..2454: mol_type = genomic DNA
ctcaacttggatctggccaccatctcctgtggctcggccactcgctgaagcgtcgctggtcgctctgccgacccccgtctgggtcgtttgccgaaccagctgctgatacacagccggctgcgtgggattcccccgccgcggagcctgcgaacgccgtcgagctgcgtcctcgtacatttgccctttgcccacgtgagtgttgttcgcttgatggttgtcagtgaggtggacctgctgtgaaggcgctccagtattttgaggcaggacaaggccgtggaggtggtggccgcctgaagctgagatggacccacgcagacccggaaatgcatgatgtagcgccacggactgctgttgactggcaagcagccgctgctgctcgtagaagtactgctgctccggcgtcggctgggcctggtcccgacggtaggcacccgttgcaggccgtctgtcgatttcccgccccgagaccacctcctggtgtccaaggagcgtcccctgacacatctggaaagcagggtccgcaccgggagtcacgtgctgcctagactctggttgcgctcggccagaagccgccgtggcctcgtgcagagcccccctagcaaacagatcaacaggcccatggggaaggtagtggggattctgcggcaacagattcggattctgcagaggcgcctctggctgctggccgtgcgccgcctcgtcagagtggagtgaacgatagggaccttgctgcatcgggaccatgtggccggggccatcggtacgatgcatagcagaagctgccggctttcatgtgcggaccgcgccggctcctgaactgaagactgctgtttgaatgtcgggctctttcggaccaccggcggcggagtcgtgctatggatgcccacttgcaatgggggcgcacgctgtacgaggagacgtgtaaattgctttcagtcaccacgctagaacgtagccagaaaagagaaatgttcaggtggctggcatcagcctcacattacagtcggcgtcatgaagaggaagcagtgccacagcggcggtgtcgaacgccgtaaggcagttcttgttgctggactcagaggcgaatgtagtgaagagaaggagacaccggcactctgttgaagtgcgataaaaaatcaagcacagacaggaaaaagctccatgagaacacaggaaatttggttaaggtactgtggccacacgacgtcctagctcataccgaagcgtacgccctccgtggcacttcatttagggggttcctttgaaaggcatgcacgaaagaagaagcagagaagcagataattcagaaacgtgaaacggtggccggaattgccgagatcgcctgttacatgcgcacaagcgcctgaggtgtcgcactagaacggtccatcggacacaatctaaagcacaaagacagatttttgaagctttacaacgtcaggaaaaccagtcagggactaaatacacttctaacccattaacaagaaatagccttgtcgagactgtggttcgagattcccgccactactgcacgcgtttgcaacaggcacaccaaaactgaatttctcgctaccgcagacaatcacggataggcatgcaaggtagaacacgaccacgcaaccactttgaatgactgattagcccgcgcactgtgcggcattcgaaaagaacaatattctatgatgggtattctcattccatgaaaaagcgaaattgacgggccgttccggcacgctggtgtaagctgacggggaaggtcgcatgcgcggagccacttcatgtcatccaacgatgtggccaggcaagcagcgtagccattaggtaaaaggataagctgaatgaaatcagtgcgtagtgcgtctcttcggaaatatccaatatcattttcctgtgtatcggccgcgtgacaatcagtcttgcaactgcgcgtgttcgcaattctgtgcgcactgctcttctgcttttggtatgagctgctccaggccttcctttgtgccgagccagcgaactgcaaagctggacgtcgacatcggctctctgtcttactacagatacaaccgtgttttgtacagttccaattacatgaggtttttcgtgttcgctgctttcatcttcaagcgctattacgctttcggattcgacgagtgaccctgcgataggtcgacgcgtttgctacggccggctccctgtctaggctgggaatgaaaaaggctgtagcatattcgcccgtgtatgttgcggcctgccggatccggatggagaaatggcaggccaaacgcatagtttcctctctacgcggaaacctgagcctgacacgttttgcccgttagggggaagcgcagttctcaggtccgcaagatcatactctttttacagttaggatcggactttcagcatgacatgtgatcgtgtaaactcaggagaaacgttggtagacagtcctgtctggcaaaa

SEQ ID NO: 1181 - DNA, 2444 bp, Toxoplasma gondii
  source 1..2444: mol_type = genomic DNA
ccgaaacgagacacacgagaagcactgtcgaggtcgggacaagagcctgcccgcctcagcggtccgtactgcatttcttcttctccctctcgagactgcaagcctgcgagcacagccccctcctcaggtgtgtagctctcgcggtggatctcaacgcttccgtaggctcttatttccccccagatgctcttcttccccttcgccttcctcttcggtgcatctctcggcagagccctgcgattcacgagttctgtcggttcgtgctctcctctgtcacctggctggaccctcgcactgcctccgcatctcctttcgatcgagctaatttcctcctctgctctctcatctgcttccacgttcgccgatgtcccccactgctttccttctcctgcctgcgactcttctctgtctcgctcttctgtgtctctctcctcttctctccctgtctctctctgttctccctcccgctgttcgttatcttctcctccttcgccttcctctttgtcgggagacgtgggcaggcgagcccgaggggaagacgcagattcctgcatttcttctgtttccctttctgcgtcaatcgcccgttcgcggcttgtcctccctgcttgaaaggaaacagtgacgcctcacaacgggagacacgctggcgcctttcgcacatcgacggggcgcgcggtgggcagcaggccagacgaatgaaaggacagagaagcgcagaagaaggaagagaactcgttcgagtgctggcgcctcttcacacacagggtcttgctggacggatgcatgcaaggacaaggtcggaataagtcaggaacatgcagtcaagccgacggagaaacgatgagagggggttgccgaggaagaagacaacgacgctcatgaaggaaccgaacagcgagagaagagaggaattcagcacagcgaaagaggaagaaggggacaaagaggacttgaaaacagcggggaattagcgcgtaacagatgttgagagcgatgaggggaagcaggctcgctacgccatgtaactcaaaatagaaacgaacttctgaaaaagttccgcactgtttgctctgggcgcggctgttccatcgtaaagttctcaactgcggccgcatcccatcccgagcgtcgcgtaggtgtgagcattcggacaaccacttggtgtatttccatagacggcgggagaaagcgaaaaaaaccatgcagcttttcttcttgacccttctctccccgttttgacgagagtctacagccttcgagcggtgctcgtgttgacgtcgtccgggcgcggcgaggcggggctgcggcagcttcccctctaaagtcggacagacggaatcgtttttccggttgagcagaggattctggaaccccgaaaaagattgggggaaacggatcgcctctcgcgatcagctgccgtggagacgtaccgaagttagcagagcgctcgtcgcactccgctgctcgagagacaaccaagcttgagaaaagcggattgggaaacgaggtcctgcctggtgtttctgcagagggcgctgaacgcggaacaagaattgtccacgcacgaaagaaattcaaaaaaatcggccgcagttccgcggtcgagagatttcctggagaacctcgcgttctggggatcctatacatttcccagctgctctgctagccttccctttcacgcgcttctctcaacaggggagactccaccgcagcgttgacgtcgcctgcagacagaaaggatctggatcgacgtgttttctcagcgtcccgctgcgtctccccgttgacttctctcctcactcgaaattgcggcaactgccccgcacaattgtcctttttggctctttctgcgcggaaacgccttccgcgctcgtcttccccaactgagtgttttcctcgcctcccactcggccggctggtagaggcgggcacagacaaaggcacaaacggcgaaacggcgtgcgcatgcacactctttttcgtggcttcttgcttttgcactcttttcgaaacctcgcaatcactcgtctgatttccttccgcggcataatgcctgacgttcccctgcagcgcctaacgcaacgcactgcctttttcccgtcggaaactgacaggtccatttgaacagaacagagacgtttgcatccgcgtagcgtttcatcgctctccggcgtttcgcatttcctgcagcttcgcaaaccgttctgccggcttcctcgtgacttgcctttgctggaacggcgtttcagcccacacccccgttccgctgcttctcggcgctccgccgggtgtatgtacaccacacgctttcgcttcgtgtccagtggccactgctgctcccaaggtggcgtttctcccccattttctgcgttcttcgcgtttttttctgagcatgctaaggatgggtgcacccaggcggctcagatagacagcggcgaaaa

SEQ ID NO: 1182 - DNA, 1516 bp, Toxoplasma gondii
  source 1..1516: mol_type = genomic DNA
atagacggaggcacagtgctcgccctgtgacagtctgagctaggaactccagagggagacgcgcaagaagtggaagcagctgcctgcgagtccggtgacgtcgaggtcgaagccggcgccgcaatcgcagcaccgtcggccacagaacctcctggagaactcaccggatgcgccagaaagcttaacattgcgggacgggctggcctgtacagcgatgcctcccagaattccagtccgttggcgcggacaggaaagcgaggaggctagcaatcgagaggcgtgtgtctggcaaagcaacaagcacacacaaagtgaagcgtctggcaaagagcgaaaaatcgacaacgagaaacagatatacgtcgacaatgtggtctgcacgcagtgtgcaaagcagtcaaggtcgctggacaccggacgcccgtcccagttagcgtgaatatagtttggacaccgcgacacagtaaatgatatacgcggatgaaacgagttgttgactgtgctggacagccgtcaaaaagaagttctcccgcccccggctgtctgcgagaagccaaagttgtgcgttccaatcgctgtgtcacaccggaattctgaagacgcatgtgcaggacgaaactacaatgaccgcactactacttcgggtggcttcgataactagaagaggatgaaattcagaaggaacgttcaggaaaggagtaccaccagtgcacacgcatgctcccacaggaggacgacggcgtacccgccggattccatcttcgacggggcacgaacgagaagaaaaatcagagacggcgaggcgacacacatgcgatggacaggagaacgccagccaaacaggcaaaaggcagctgcgacggaaaagatcgaacatgcacccctagtacacccgtcacacgaatggtgccgcaatgcgtcggtccgtacagttcaccgcttctccgtggtcagaaaaagtgtcacggatagaagtggaacgcacaaagaaaaaatgcaactgtgaacgccaatgcgcttatttctttgctacacagtcgaaaaaaaccgaggccgccttcggcaaaacacaaaacgtgacgaaactgccggggagcacgcaaacggcggttccgtcaccccgaaaaacttccgtcgctgcaaacgtcttaccgaataaagacgccgttggccaattccgaaacccgctgtgttccttggcgaagcaccccgagttgcattgcatgccaaaagaacttttttctaaaatccggagtgcatgaaaaagcatgcggggatattgcgttccgaactcatgcagcgcctgtcgcactgcagacttcgccatgcattccgccgagaacacgctcagagccgttggtggccgcaggttgccgccatccacatttgtttggaatcggagtaatccaaaagtacttgtgggaaaatatttggaaaagattaggaacacttgcagaagagtccttcacacgggcgggcatgcgcactgcaggcgcgccctaatcccggaggcaca

SEQ ID NO: 1183 - DNA, 2162 bp, Toxoplasma gondii
  source 1..2162: mol_type = genomic DNA
tgttttctctcttttgtccctcagccgttttctcctcgatctgtcttcttctctcttctcccttcctctcggtgctctgctcctcgccaggcttctcctccctccgcctcactgccttcctcctctccgtcaatcctcctctcccccctgttgctgctgctcacctgcgagcttccctccgcgttggcgagtcggttgaggaggcgaacttgctcgttctggtcgacatggtcggagtagtatccactgctggttgcgctgagcgccttcgcagtctccttaggctctagcatctgacctctctccatcctcactgcgcgaagaaggcaggcgggaggagccgcgggtggcggacgcgcgcgaaagaaaagcgcagaagaagaaagggcaccggagggaacggcgaagtgaagcggcacagagaagctggagctcccgctttccttcgtcgatcgacactggcgtccttccgtctgaaaacgatgaagtcgcaccggcgagcaaagcgcgcggaccgcccacttgcgacgaaggaaggagcgcgacaaacagactgtaggttcagggagaaaggcgcagaagggatacaccctctggggcagcgagaggagagagctcagacacacctttagagaagcaaagaggaaagagggacgcagcctcacagaacagagagacagaggcagaaacctctcttcactcctctccctgaccaggcgacgtacacaaaaagatattcacctaaacctacatataatatatatatgtattttcagatgggggaaggtcatttagcatcgatggggggaagaaaagaaggaaaacgcttgaaaaggctgcacgctgttgcgagagggcgagaggctcgtacgagagcgagagagacaggtgaaacaaacgaaaagagagacggagaaaatccccgtcgtccccgcaagatgaaaagaagacgtcaagagaaccgaagacgacccgagtttccggagagccttttcccccgtttcgagttttcagttgacgagaggcacaacgctcgcgtcttcgccgtcacaaattcttctattgaccgcagccacacaactcagaaataggttcgccagacgcccgttctccatctcgcctctctctctgcgtcctccttctccgacgaacaagggaaagggaaggcagaactatcttctgaaaagagctgaaacgtgatgctggcgtcgctgcctcctcgcgatgtcgagagcggccgagccgcaaccgccgcggaaaaagcttgcctctccgttgaaagaatctgccgcagagagaagcgacctcactccgcttcgctttgtcctgttctcagctttcgcggcactcgggagcagcagattgacgctctgaacaaaaaacaggcacatgcctctcagatgcaaagacgacgacggcgaatttacctgagaaagaagagaaggcagcaggtctgcagcgctgccagcgctctgtcggcatatatacaagaacaggagggagggtggaaaaacttttggccgcgacagccgtcgcgtctcgcgttttcactgtcttctgcctcctttttctccaagtttctcttcgtttcttcctctcgtcttcttccggcactgccgctgtgtgccggcttgcttgtgaggctttttttcatctccctctcgcttcgccttctagcatccgcgcctgcgcgcgctagcactctccttcggcgggtggtgtgtgtggagttttgcagaggaacgccgcgaacacaggggggcgctgatgaagacaagcgctgctcgctctgaggaggaaacaacagcagccgctgcgccttctctcttgcgtactttgtcggctgaagttcctgcaggttcgcgcgaaagcgagacaactccgaagcgagagctgcaggcgatcaagaggaaaacggagaggctgacctcctcgcgggcagctctgcgaccgcacacaccacacactgtgtccagcatgttctctcagcggggggggagagagaagcaaagcaagcgacccagtagaggaaagagaagaaacgcgagtcgagggaaatcctctacacacaatcaaagagcgaaggtcgccggtgtcgctgctcgtcaaacggcgtgcatgtcttgcagagcatcttcgacgcaagccatcgcgagagctga

SEQ ID NO: 1184 - DNA, 2352 bp, Toxoplasma gondii
  source 1..2352: mol_type = genomic DNA
gaagagcttgcaagacgcttcgcctcctctgcagctcttcgttttctctgccttctcgcctgtcgtctcgacagaacaggggaaggcgcgagggcctttgtccccatcgattttgtggagtggactgaaggcgtacgtttaggtgaaggcggcgtctcaagagacgccgagaagaagcggaagtcaccagaggcacttggcagaacaggggacctttccggttctagctcaaggggagcgacaggcggttggcccacagaaggaaaggaaacgaagagaggcgatttcctgttttctgcttgtgcgtgcagggggaaatccgctcgtttcccagtgtgagaagtcgagtacgggcgaggagctgccggagaaacagaaccgcgcagaagctgcagagaccgccacagtcgctcacccaagagtgctggggagggagacggagagaaggcgacccacgggaaagacctcagatgtctgccgtcgatctgagcacagcctctttgctgcgacgacaaagcaagacttggagtgaaatactcgtacctaggagacgggcacacacacgaccgtgaagacgaagaagacctttgactcaccagctcggttgcaatgtcttgcgcttttccgggtgtcttgtcttccagaagatcggcagagagtgaccgatcgccgcgctctgcagcataggccgggaagtccctcctcctgcgtggtccgcctcttggtgccttttctcgctctttgtccgcctctcgcgttcgctcggtcggcgtttccctgtcgccttctctcgctgcggcgggggtggacgcacggctttccacgagcgcagaagagaagaagagcggcagtcctgagaggtgggccaggacctcaagaaacgcgttgtcaacttgagatacagagagagaaagaggcacttctttcggagctccgctgtcgtcttggcaaaacgggcaggcagccatcgtgggacttctcttcagcgggaagttgcggaacgaggggctagcgggactggaacagccgacgaatggcgcgccgcctctccatcctcgccttcgacgaggcggttctcacttctctcctttcgcgtagatgtctgggtggtccttttccaagtttcacgcttcaggtccaaccgaatagacatgggagacgactgcgggaggcgttttttctgtcgcgcggagaaactcgtggacaggcgggaaacacttacagggagggagaaactgaggagctgcagacgatccgtgaggggagggaaccgatcgcgaaaaagacgagacgtgagagaggagacacaaagaaccgaggttttcagggaaacagagacgcatcgagcaaaagtgaggacgatcgatgcaagcatgcgtccgcgatcgcacgtgcaggaagactcgagcggtgttgtccccgccgcagtcgactcagacagatcacgctaaatgagggaacagacgcctttttcttctttgcttcaatcaaacaacatatcccctgagcaatctacgcacatcatctgcacacgctttgaagaggggggctgctcgagacggcctcaagaggcgccctagagacgcacaatctcttaacaggagttgcactggagctgcagagcaagtccacgagtctaggtcttttcgtagtgtgctctggtgggaatcgcggaagaatttcagcaaggcaaccttcagagcaatgcctgcgattcagacgagttcgaacttttaagcgcactgtctgcttgaggggaataggacttttttcggtcgggtaggcgactggcaattttttgcatgcgtctgggcgttaacagcgaatgcttcacgtggcattcggtctacacattttcttgtccggcgttttaagacgcatccagagtttcgcgggcatccttctacctcggatatcgaactcgtggaccgacgacgcgagcgcctgcggcgctgcgagagctaggccattgtgccggccctcgacgcacttttcctttcgttccgtttctcacttgttcgcaatagataccacaaagcattccttaaaacgcggaaatggcgcctcgtggatggagagtcgccacacggtgcatgtaggttggagtcgtgtcgcacaatgcgttttttgtagctttacaggcaggcctggtgtgtcagcttcgtttttcaggacgtactgcaaagaatatgaagaccctaaaatacctaaataagagctgacgtgaattctaacaagtacatcgagtcgttcttctggacgtccatggcacttcgcaaatcgtccagcgagactgagtcgcacctgcgtcggctttaaagttttctgaggggtttccgaaaaaacgaagaa

SEQ ID NO: 1185 - DNA, 1678 bp, Toxoplasma gondii
  source 1..1678: mol_type = genomic DNA
atctgactgatctccttgaagcagctgagctcgcgacgaagatgccactgtacggtgttccctgttgaagaccgcatgaggtgaagtcgcgaagctccctgaagaggcttgatggacggcgaacgtagaaggaatacacggcgccggaacgcgtaaggatgatggcacgccaaagaaataacgcgcaccagaatcgggcactgacggccgaggaacccagcagcaagaggaagtgcggggttgaaccgcctcccgttcgtgtttgaagattttcctagcatgcatcgttctgaatgccggcgctgagaaaggttggtccaccattggaaggcaccacggcaagcttctatcggaataaagcgcgaatttcgtcgagaattcgttgatttctgggtttaactcggtagaactgacaagacgctcctcgattgtctggtcatgtgcagagccaaacttgccagtcaaaggcgtcgcagttcccgcgtacctccaccggaaatgtgccacagcatctatcccgtcttctgcctcaacggcggcaaaaggtgctggtatcatccgcgttcggcgtcgaaaaagcgtccatttccgcgaatctcgacttttctgcctcgccttcctgaggttgccttgcgtgcgcgcttgtcggtcccgcagtgaggcaagcgagcgaagctgctggagaccactccaagcgctggggccctttctcggcggactggccgcagttggcgtgcacgtagctctgaaattcatcgctggaacagaatcgccaaccccgggagtaaaaagcgccagtccgcaggcagaacgattaagtctgcaggattcatcctattgtgcgcaaaaatgcgtcggaactggagaaagtaagtggttggctccagaagtcggcacgagcggacctcacggaagccgaaaactttcgggtgtatgtacacgcagacttccacttgcatccagtgctgccagcgaggttgtccaaaatatttgttcttgccgcagttattagcgtttcaacgaggacatgaatggttcgtggcgtgcagaacacaggaagaagggcgcgccgataccgatgagctgccgcgtaggcgaccatgcacatggttatttccagctgacgtttgaaaaaaacgcacgaaatgagcgtcctgagaagggttgtacgcaatgaaagaagatgcaagaccgggataagagaaaggaggaagagaaagctggttgaaacgtcaaaacaaaaggtcacaatgcgtcagatgttcgatgcgctgtctgacatttccgcgagcgtgacctgcccggagttttcctgtccgtgcagcttgtctgaaaatggatcaggatgggaaattcagacaagacggacaatgacacagtcaatgacagtggttttggccacacccggcgaaaatcgaagcagatttttgttgagtcgacctcgacggtcgactggggctgcatgcacgctgcatgcatgttgcttagaaaacacggcagttgccacacgcacaaaccaagtggtgaaagcatgtagcatttagcagaactccatgggtaagatttttgaatgttactgcagcaggcactctctgaaccgtcgaagtctcctcttctcgggtagggagcctgtagcgtgtcgccctccgtccgcgagtgagttccggtactacttgaa

SEQ ID NO: 1186 - DNA, 1603 bp, Toxoplasma gondii
  source 1..1603: mol_type = genomic DNA
aactctggaggccgcttctcgcagcagttcgcttctttctttcatggggagtccggccgcgaaggcgccttccgatcccgaggagggaccctgcgaggaacaggacggcgggaggtaccagcgcgaaagccggaccttgccctgtctcgacaccaagaggagaaagtgaatcattttcctggagaacgcgcagacgcatgcgaagggaagaaggcgcgaaactgcgcctccagcgacggggacagcctgtgtgtgatgaggcgaacaagaagtctccgttggaaaccggagaccaagaagatgggggaagccgaggcaaagatgaaaaacttggcagccgtcagcgcagtcgcttctcttgccgagcgagcggcagacacaggagaggcagatgaagaccagcgggatggggaggcagtacacagatcatgtgagaacagttgtcgagaggaaaactctcctccggggacagcgcgcgcgaggccggaggacagggaaccgttggttcctctctcaaagagtggagagacacacagtgacgaagcgaaaagacgaagtcaggcttggagactcctcgcgcgtcgaggagacgcggcgcatcccgagaacgcgaagcagagaaagaagtcgcagaaggaagaagtccgagacctgtctgtgcacccgatttggtggaaaggcctcccaacctcgaacggaagcgcgcgaaagccccagacgccgacgcggcgttgaacgttctctgaagaagattttcgctgaggaaaactcgcagtttttcaaccgaacgacgtcacctgcctacgcgactcacacacaccgcatggccggccgaccagacagccagctgcacagccagctccggctcgagaacgagactgtgcgacacctgggcttttccagccgcatgcgaaaagaggttttggacgcaggattcgttttgcgaagcagcaaaattcgctactttcctgaatgcggaagaagacaaagacgcccggaaccgcacagtcccggcggtgtgacaaagggagagagggaagccaggcaagacgccgaaccggcatctgcggcaagaagcgaagcgagctagaatggaagcctgaaaggttcgttttttcgacaaacacaagcgctttctctgcgggtctgcaccgaaggcgacaacggagctgagggtctctctagcggtgctgctgcgcttacagaccgcggcaggaaaaacgacgaacgacgccgtcagtctcacgacgattaacagcgagccagctcagaggcacagaacgatcatctttgcagtgtgtgaacctaactttgttctgtgttcagagctggagagtctttcgttgagacagctgggcgcgtgaccggagcaggccgttggactcgccgaccttcttcgcgttcgagagaaacctctcgcttgttttccggaaaaaagccgagaagacaccgcgaggagagccggattcggacctcgacgaacagggaattaccctgagcagatgagaaaaaacagacgaagccctgcaaagaagccgcggcggaagaagacaggcggcgcacgagggaggagggggggctgttgacaacacagaccaacgca

SEQ ID NO: 1187 - DNA, 2878 bp, Toxoplasma gondii
  source 1..2878: mol_type = genomic DNA
gatttgggtctgtttttcagtcgcagccactgtacatgacttccgacgcatccacggcgacctcccatccgggcgggtacgcgccgaacatgcactttgtctcgccggtgaactcaaccaagacgcctccttctccggcagaattttcgggttcgacttctttgaagcccagagagcagctgccgctgcacgtgtaccaaggggatgttcaggatttctcggacctaaaggcgagtaatgggcagcagttcttctcgtacccaatctccgcagccacccaggcggtgtatgtacagagtgctgccggcaacggtgccttctaggtcagcccgacgatgtgggtaagatggttttcgagtttagttttaaaggggggagaagagaagcacgaacagggaagtcacagagaatgcaaacacctgcgtcgttacctcatctaatctacgagccctgtttccttgagacggataagtggttttcgttggcggacacaaacgccgtatggagcggcgaagcgtgcaggttttgggaaaggaagcaggtcaatacagtaggcatttacgctttctcatctgctgttttttgttttcgttttggaagagtaaatgacacaactgtggggaggagaaacgctacgcgcctatttcatcgccgacaaaaacgcacgatgagctttagacatctttcgtgaccaaccgtcgcggtctctgtgtgcctgcctaagctcgtctaaagtggggtggacatgcgttgcttgaatggcattctgtgtcaggagttttctcctcacggtcgccaacgccgcattttacgtaaatttttcgaactttctggtcctccgtgctccggtacccccacccctccaagtgaatacaacatgaagagattccaaaaacaaagagggcgagaccgaacaagggcacacgccgccccgcattcgggacgggcaccttcgtagttgaagccatgcctttctgtgtttcttaccataaaatgtggtaaacaacttgcggttcgtttcttccggcgcaagatgtcccagctgtgagtatttcactttgttgccgtctcaaggtggctgcgtgcacactaagttttttcccctttgttgtctccctcgtcaaaccgagggggagttgtccttggcatctgtgctacttcttgcctcttgcgcttttcggggaaaagtcagatctgctgtccgtttcatgttgcattaccctgtgtgacacgcacgcttctcaggctagggatgacaagtgtgctggcaaagatctttcactttacccttttctgatgtttgaaaaatcattccccccggctggggttttcatcggcagacaagcttgagcaactctattcatacttctcatgaatgcgaccggccgttcactacaaaccacatcttcccacaatacacacatacggatgttgttgtgcgggtggccgctgcaaactacgcagtttcaggttactgagagaacaccgtactccacaccatggggaagaataaacacaaatgtctgttcgatatgccgcgtgttaccctggaataatgtgtgacaagcacctaacacagatggccatcagcatgaaagcatgtaatcagttctgttgcggcaccgcacacgatgtatttgtgtaacttacgcatcccatgtgattcaaaaaaactgagggacgaacgactccgaaacgggcaggtggtcttcacattcaagtcttgctaggaagctatagcccacctcggcaacggcactttcgcaccgggaaaaacacgccagcgaaggcatgcctcaaagggattcaggcaagcagacacgcagtcctccttgcctctccggctcagaaaacctcatctgttcagttaacacgacaggcttgtcaagcccaagacacaaaagtcatctccagtgccgaaaaaggataaatttgcttacgccagagattcagcaacctccgacggcagtatctactttgtagtacagcagaaggcagatggtctagctacgatctccatgttcttattgaccccagaggatttggtaacttcttcaaaccattctatgttgggggtggagcatacaactgtaaacgcagtcgcctctacttcctcatctgtcacgtcgccgatgtgccagacttcccggataagctggaacgggtgaatctttgttggcgttttcgctgcagcacgcagtctctccagccgaccttagtgtcggtgaagcttggctagtgataaaccggtaccggatcgccgttgtgaaaccgtgccagtgacttcgttcgagcgcaaggttgttcgtttgcgattgcggcgtttctctctggcgacgtcatcaggcggttgacatttcaaactaaagtgtcaaaacgaagcttccagcaagcgacgatcagggtagccgaggaacaccggcaaactgggcgggtaagttcgataccgtgcttgcgtcgcaacactaaccgagtttggagggcgtggtgtgggggttttgaatttgcgttcagaacaactttctcgtttgcattctttttggcaatattgatcaatgcaagctaacatcgtggtgaactcggaccgaaacgttcgctgtgtctcgttccctagtgtgggcctcggggagttcggtgttggaaggaggttgcggctggtcgcccgacccgaatccctcggcattgttttggttgtggagtaggataaaaagttgcgacgagcttcttttcggtacaattttccacagagtaacgttttgtagcgttgacgtttttcgcttattttcgagtgaagtgagtgtggttaacacctcgggaggcgtctgtttgctctctccagatcttgccgtttcaacagcactcaacgtggtggcaacga

SEQ ID NO: 1188 - DNA, 3579 bp, Toxoplasma gondii
  source 1..3579: mol_type = genomic DNA
ttcgattttgcatgtgtctctcctttgcagagcgaagcggcgcaagcccctgcacaggtgtcctcggatgccgccaaaggtgccccgacgaactgaacgggtgtgtggagactggggaaagtgggccgcatataagccgaaagcaacacatagagtcgtctgtggaagagactgttcgtccacgtggattcgcgcgaggtggttttcgcggcggaacgtagtgtcgagcattttaaattgggtagacttcgactctgttctgcgctcctgaagcaaatgtagtgtttgagtggggcggtcctgcgccaggcacacgacaaaagtccgtttaacagtctgtttgctgccgtagtcacagattgctctcaaacacgcagacataatgtgtgagtgtacactacagaagtgcacacacacacctatgtgcagttgtatagaataggcatgtacgcataggtgtacacatcagaaaaaccttgcccgaggcggcgctgtccagaaagacagacaggatgcagaaaaggtcaggcggtggtaacaattatctagtatcctctcttgtctcaagcgaacttttgattcgtttcctgttgagacccaaacaaggcgagtacggaaatgtgcgcgtttctgaaagaacgggaaccggcggtcatcgcgtgcgtccggttttttgagatttcgcgaaatgtgccaggcaaacagagctagcccgtgaagccgttgttggaactttaaactgtcaacttgctgtcgagtgcgcattgtgtgagcatcgatacttcctagctggaacggaacgctatcgcgtacggcatgccgggacatcagaacatccgagaaacgaggtgtcgctgcaggacggttgcatacttgattcagtttttctattcgaaagaaaccctgtcgaacaaaacttgcaaaattttccgtcccaccgaaacagcacgcgaactgcacacaggaaataaccttcgtctttaaaacgtgcgccgaaaatcgcagttcctcttaaaaactgacacggattatgcacacagaaaagctcaaactgcccatactcagacaagttccgtgagacgaactcggtcactggtcaacccgaaacaaatgccgagtgtagtaaaggagttcgtcgatgctttcatgtatgtcttcgagtgcgcggtggttggccgccttcttgaccagtggcaactcgggtttccaccgcatcgcgagttcctttatggtggacacatcgattattcggtagctgagatgtgctatgagtcggggcatctgtttcacgagaaactgcctgtctacgtgcacgctgttcccacctagcggggcgacgcgcgtcgtcgcgacgtgtttctgtacgaattccagaatttgctcctcagcatctgcgagagtcagagtcgacttccggcaggctgcagttagccctgactccccgtgggtctttttgcaccattcatccattccatctagaagttcgtcactggcgtgcacaattaggttcggtccaacgatgcgttttttgcactggccgtccgtcacaatgaccgcgatttcgattatttggtctgtttccacgtccagtccagtcatctcacagtcaacccaaacgatgggagcctgcagggtctcctcatcttcagttatcgtaacagctgttcggatgggggctatgcggtttgcatcctcgctcgagacgctcttgaagcgcgcgggtgcctccatcatgccctccatctctgctgaagcgaactgtgaatgaagtgagtgaaagtggaggtcgcacccggtcaacaaggaaagccccaatttgtcgactcttcgtgaatgggcgccgctgctcgcagtgaggagtgcgggagtgttttggtgatagttcactcgtctcccgtggcagggatcgtgaaactctgttctggtggaaacgctcttgagcgacgcttggtagagaacaggcttttcctcgaaggtggtaaaaaacacaccgccgcagcgtttgctccactgcgaccaattcacttgaaacgaattcgtcctacgcggtccagacaagcagcgccctaactcacccgcgacgcagtcttgtgagcggatgctccgactgtcccacgcacacaatggatgctttaacagcaccgttgatgtcttgctcaaaggtgggtgggaaaatctggggaacaaacgcattccaagctatctcggggaagaccagtgactgcgaagcactgtgtgcaagtctcccccaagcaacttgcatggaaagctgaagccagtggaagtttcagcctttgctggggctcttttttgggacaatatccgatccttacgggtgaaccgtgttttagccgcccgcgaggtcggacacactgcgagaaacaacacccactttcaggacatgatgcaagaactgtagctgcccttagcgtgttttcatcccttctgaaaaccacaccagtccacgacaggagagatgcgacgctacacacggacaagtggcgacgcacacactcgacaagttccaaatgcgaagaatcgtgtgcgcggacaaagagccgaaagttgactgctgtttctgctgcagttagcacgaagtcgaaaacagaagcaagggatacacacacttgaactcgagaagacctgtcaaattttctcggagtttctcaaccctgcaaacttgcgtggggccgggtcgttagattcccccgctgtgcaacactgcgtgcacccgcagtcgacaaaattccagaacgcgcagaaatccagtttcactatcactctccctccaaacggcaaatacgacaatgtccattcatggtgacaatcgaggggaggagagtggtcgtcgagtgccaccgttgattcaacagccggcgctgcatgcgtattccttgaatccctggaaattgagatacacccggggtgacctggcctcggtgaattcccaattcggcttggtcacacgtggctcctaaaatttttcgctacccttcgcttcatagcataagtcagctcttctctgcgggatactgcatccttgtgtttgcactagcataactgctgatgtcctctgcacgacgattcgaagttggaatcattcctgaatgtgtcgagaattcccgcctatgcagaccctgtttgtaatttcctaaagcgaagtaaagtgtagacgaacggactccgttgttttgtgatttgtatccttgagaaactgtcaagagcggagagagtcggggagacggtgacacttgttcccaagtttccgttccagcatgacaactctgtggaaagtgcttttcaactaccgcatcctttacttggggtgcagccggtgcaattgataaaggtactccgcatttgctgaggaagcatctgtagttcctgtcgatctcagaatatggcgtgctgcacagcggtgtgtcttctcattacattgttttcttgggggttgggaaacgcgtcttcatgtgtttagagggaaccccccccccagcaatcaactagcgagtggcacatacccaagcgatcgatccgaacacgggaccgcgtctgcttcttagcaaagacggcccacca

SEQ ID NO: 1189 - DNA, 3628 bp, Toxoplasma gondii
  source 1..3628: mol_type = genomic DNA
agactcacgactattcctttcgcagaaacgtagctttcctcagtctggacagctgacgtggaagcctgtgtcgacctgctcctttctgcttccaggtgcctacgctctttcgcagtttgcagccaccaaactgcatgagaaggcgctagcggttcgcacttcgcttgcacaggctctttctcgggtgatcgatgagtctgaggttctcctttgggttccgcctgccaagcaaagtgctcggactgaagaagtccggcatgcgtcttcagaacctgcccctcacgcgaaccccatggggactgttggcaggccggaaaccgaaccaccaaacaggacacccgccgcttacctcggcgaaatgtggatgtacactgctgcagacctgctgggtctacctttgcttcaactcccctgtggcgtcacgctgctggggcctgctggaaccgaccgagagttgcttgaggtgagtgcaagcgggtggatcgccaagggcaccttttgggcctgggatgaagtgttggagcgtgcgattcagtgagtcggcggttccaagcgtatagacagtaggcagggcctcggataatgtcgcacagttgggtagaaacgaaatgaagtggggactcctgccaagcttcgtcacgtagcccagaggccgtccgcagtcgtcttggacgcccagatggcgtctgcgtggcctggcgaaagcgaatgaccatacagagatctagacaagagatattttacatcagatctcttcatttgcgtcatttcaagtgcccgagaaagattgcacacgagttggatgccacaacatgacgcgagaacccgtaaaaactgggtgtctctggtagactctaacttcactgacgcgctagtatcactcttcttttcaggtggcacagaaactgacgagccctctcacggaagctcgtcggatgaatttctggtcggtatgactcgaccaagaggtgtaacggaggcggccttctgattcagcagcaggaccagcctcccgtgggcggcaatagccgctggtaactagagtggagacggaaaactccaagaagctttcgtgcgactgtggtacgctgccacttgatggtctttgctacctgtctctgctgtccatattcgtgtttacgaaaagaaaactgttcgttcgcgtaggagtttctagtgtttcaagtagctgccacaggatgatgacgcaacaaccattctgtttctgtgcgccagttttgctccgaggtacggcagcaggaaagtgtcattggagcagggaaacgaaatgtcgacacaggcagcctttctgtgtgaagacactgcaggagcttttgggttcgtcactcaatgatatcacgagggcttcgatgtccaaaggccactaattcgtcgatacatgcgccaccgttaattattgcagaccaggagttccttatcactggaagtttcccgtgtgtgaagaggaaaagtgctcagcgaagtggaacaagagacgggcacatggtgcgtgacacttttcgcggtacttgtaaagttgacggcccggtaactaagaagacatttgtcccgccagctgtaggccgtaatagggaagtgccatgtggcgcctgtgggtttcgcagtgaagtcaacgagttagcaagcaattgatttcgagccacgtgggcgagttctggcccacatggtacgcagtcgcattggctgcacttcaagtactgacaagcttcaggtaatgatgtacatcagggattgacaaacttcagagatcctctctggataatcctttccttaatgccgcaccagggtgacgcggcgtgtgggaccgcagtccctccctcttgtttcctcactcaaggctggacagacacttcttgatcgcccttgacgttttccactactgtactgccctgcccagctttctcaaatggatgtagatatcccagtccgctgtatacatgggctgcggtctttctaaaatgaggagtctcaaaatgccagcaactagcattttctaaaactcctgagattcgttaccgccacttgccataacacagccctcacagccactgcttgactactgcagttgagtgccgcttcaaatggatggtacttgaaactgtgcggcaaaaaagaccaaatcgcgtcgatgtcttcccgctcctcttccagggttcgaacctgcagggaagaagtgatatgcacaacagagtaaccctgtgccacacgatcttcgggttgtcacactgcgaaggcgcacctctaatttacagcaccagcgctaattgtaagtccaattatggcggcagcgttcgggcacactagactgtaccccgggcaatcgtttaacaacgtggcgcccacgtataacgtatccagggacatgcatccgttaagtttcacgaaacccacgagcgtgtgcccctgacggattagcaaggcacgacgttgctgcttgacgatatgcgacactctcgaggcttcaacctcgtcctccggtgtgcttccgttccgaaaccacacctgctgctaaagctactcgacctagcaactcgcgatgaagcacgatgtacgagtatacgtcttaatccagcgacagcctcaagatttcgcatttgactagttgctcacccctggtacacttaatgttgaccttcgactgctgtcgaagttggggccgccgaggtcgcccactggtcaacttgctttgctggttgcgggcaagagtactgaatgggcttgtcgccggttctctctatcaggattctgacagttttgccggcggcacggaaagcgtagtaggctgcctgcggcgggtcaagttcgtacccagcaggttgcaccgacagattgacgaccggaccctcaacgatgtattgccgcgacaacggcttagtcacatgcttttccatttttggtgtggaaggcggggtaaacaggaaggttactgcacacgctgccgtggatactcgtgaagcacttcggctttgtgctgacactggcagtcgcaaggcacactcgccgaaactcgccgatgaccgagtgaactgtttcacacaactcgaggagttcccgtccgactacacacttctgtagcaacgaaaaccacgaacaataccaggagaggtcgggccgtgatgaaggatgaaatgaagagatgacagaagctaaccgtcatgttaccgtaacgcgaaaacggtttttccgggaaagcctgagcacaggctgcaagctatgcgacgcccggcatgtgcagcccggttgtgtcgcgaaagatgcgtcgatggagacaaccgacacacgcttcgctcgtcccgtccctgaaggaattccgattctctcccgcgcacgggaggcaaaagccagcagagcctgcctgcacgagtcctctgcctcctgttggcacaggagtgctgtgttggcacacttcatttttcctttcagcacgtttcttccttcattccagaagtccctactactgcaaggatttcttttgttttccccccaaaggtatataggttatcggtcatcttgaccgctgcaaggcacaaatcgacgccagtgctacagcttgctcgcttgcacgcgtgtggctagcccctccagatccccactcgtctttccacaa

SEQ ID NO: 1190 - DNA, 863 bp, Toxoplasma gondii
  source 1..863: mol_type = genomic DNA
cgtcgagagggataaactatccttatgaggtcctgtcacgattgtcttccatctcgctgggcatggccgaacacatctcatgtggagatatttttctcctggtactgccacccatacagcgactgacccacaatcacggtgccccagaaggcattgaatgaagccgatcaactggttttctccgcatgctgactcacacttgaacatgaagggcataaatgtatgtgaactgttccgcctttgcacatgcaacttcaactgacaacagatatgcggcagtcatactaatcctactaacgcccgaaacgaacagtatgcaagcaacacgaacgaaccacttgggggcgcacaacacatgtaccttcagcgtcctgaaatctacaattgcccctcgaaaagtgtacagtcgacacattatgagcgtgggcagccataaacaatcaacactggtgcatcagcgtcattttttccgcccttcaacccgtgggctgcctgtatgctcgcgacggcaacctttctgcactccctgaacgatgaagaataaagggccccgcagaatggttaggcattccgtgtctattaactctccatcaactcattcctgtccgccgctgcacatttcaagacatggcatgcccgctggtgccgcgacgccgatgagggtcagcagcggagaacagacgaaagccacaccatcccgacccacgcaagacgtacagcagatttcccaccatctacttcgacaaaatgcttgagaaaggtacatcaaggcgccgaaatcatttgtccaatgaaagcaggggaaaaacaaggaagctcaaggagaaccactcagcaatcgtgaacccccaattaacttgaga

SEQ ID NO: 1191 - DNA, 2123 bp, Toxoplasma gondii
  source 1..2123: mol_type = genomic DNA
ttctgtgctgcactgtgtcagttgctggatagtcgcatgaagtggatgtgaagggtaaatggaagttccgttgctgatattcgcaatatgaagactgcgtctctcgtctttcctctttgctcactgaagatatatagcgtttgggtacgatgcgtgtgcggatggtggatgttttcgtggaatcctcggaagaaacacctcattgggtgttaggtgatactgaggtgtactttttcaagcccttcaaaatctactctatcaacctgcacggacttgtttccgagcgtcagcttttttatgacgcttctgaagtcattgccacagagaacgaaatcgcagtacgctttaaaatggaaggttccccttctcacttcgtcgacggaacccatcacatcgtcgcacctgaaagcattttcttagacccgcttgattgtagggagtgaagattcacaaggtgaaacgtagacatggacaacccgcgttcgtgtggaaccaagcacggcttgctatgaacggtacgctaaggctgtagccggggccgctactcgtgcttgcccagcaatggcgagatggcgagcgttttttatgtcctgaaaagggaactgaggcccctttcaggatcccatatcttcttcctaattctgcagggggtgtatgatgtgtacgcagtaagacagtgccacagagtcgtattcaaaactgttctgagtaatcggaaccgctggaagtctgccgctacaacggaaatcgaacatgcgaagaaagctgcttgattaacgtccatatggaccacacggaccgcgtgcagtactgttgtaaccagagtcgaagtggctgttccgcgatgctgcgtcgcaggcactctgtgatccgacttaccttggtttccgtcttctaccccttcgtcccaacttcgcatttcctagtttaagccgccagccctttagtagcaagcttttgaaacagcgaaagccttcaagaacgtctgtctctcccataaaaacatgccaaggttccaagaccgcgctcaaccgagacaacgtggcacactcaaagcttcaacagtgtgttatgcaaataggagccacacttcaaccatcccgagcaggacatgacatctgcgaggatcgagcttacgcccagaatcaaatgtgaccagatgaaaaagccggtaggcattgttatcaactgaatgctaacgccgttggctgcttggtcgagcagacagccacctacaaaaggcatttggcgtttagctcttcaattggcacttgtctgcgctggaagtttcatctttctcagctttctctgcctcaatgtcggttcgactatagagctttttaaaggtttccaaagaaaataagggttttctgtacgttttctcacagctctcgagggctgccacgcaactcgcacagcacatgcgcatgcagccctacaggaaggacgctgtcgtatctacggaagtgaccaacagcagtttttcccggcatgcgtcgattcggcagctgcagttgacctgtctccctttttcgccattctttttgcttacagttcgaacactgacttctagtctagcgttctgccacagaagcgctttttcagtacctaattgcgtcatgtctacactcgccgccaacgggtaacaatttgttccgtctcctggcaccgaaattctatgctcctcggtctgagtcgctttgcagtcccagtagcatgtcacgtctgccaccgaacgacggcaactcagtgctgcacatgactcggatatgttgacactgtctgagcgatttgccggcgaacatcccggtgtagtcaaacaagaaaacgccgtccctcgtctcgcgctgcctcagaaacattctctgtgttcggtcttgaaatgaccggtctctcagtccgcacaaagcgtggatgcgttcgaccaagctgcgaaagcactgttgggtgtggggtgaccaactgggaactgtcaactttccgtgccactgcacgtgcgctgttcagtgccaaaggggaatgccgcgagcctttgccgacgtttcgctgattggtggagcggctcggggtaactccgtcctgccttttcgcctattcgtgttgcgtcgctgccctcgctcaaa

SEQ ID NO: 1192 - DNA, 3833 bp, Toxoplasma gondii
  source 1..3833: mol_type = genomic DNA
agccggcggagaaccagtctttcgctgtttcgtgggcaaggaagtctccccaggagaagctgtgcggcctctctgatctcccgagctctctgctttcggcgaaagatccgctcttctctctcccgacgccttcttcccgagtctctctcgcgacgctccgccctctgttccccgcgcggcgctctctctcgctagaaacctggcgccgtcgccgggttgcgccgcgtctctctcttcgcgcgtctcctctcgcctccgcgcgagttcgtccttcaggccccgcgcctcctccgtccctgcttccccgccctcgatgcctcgcttgactgcattcaccacatccgcggcggcgccggcgacggaggccgcgagtccgggagcgaccgagacgacatgcatgagagagcgcgctgtgaaggagagttgctcgagaacgactgaggccgtgatgttccccaaagcgcgacctttctcctccacgctcagcgggacgcctgcagcgggaggcccaaacgggatgggccgccctcgggaagcgagctcggcgccgactgccagagacgaaggggagacgggagacaccgtggactgggggaacggagacggcgcaaacgcgagcgacggacctacgcgcgaaacgccctccggaacgcctgcagcgctcggccaaaggagagagagctctccagagagagctgctgcggcggtcgcggcgccaggattttgcagacggctcgcgaggtgcgggtcgagttcgcggccaccggagagagaccgagagaactcagattcgtcgccactcgaacacgcgcctcccctctccgacggcgcgcgagagctgaacgccgaggcgccccgcatccgtggactggaagatcgagacgcctctgagtgactctcgatgatgcggtccaccacgccttccataaatcctccaatcgcgccgacgaccgctgctccagcgttggcggcggccgcacccgcgctctccgagaagctccgcttgacgcccttcgctttgtcctttttcttctgcctccgccgcctcggctgccccgcggtcgcggcgaagcgccccgcgcccgagactcccggcgaacgcccgcgctcggggccagaggcccgccgcgagtccctggccgggaggtactggcgcgagggcgacagggcgagtggcgaggcggcagagacagcttgggcgccgggaacgggtgaaggccccgcgaatggcgaggccttgaaactgccggagcctgggatatacacctggccgtcgctgaggatccgtgggctggctacagtcggctggagacatctcgagttgggactgtccgccgcaaaaaccgtctgcggccactgctcgccggccctcgggtgtgtgtacatccgggcatctggcgatgtcgcagttgcaggtctctccgagaaggcggagaaaaacgaggagacgatcgagggactcgcgcgagtcggcctcgcctccgcgtcagaccgagagcccgcctcctctccaagagtctcctcggtctcttcgcggtcgctgtcgctttctctgctctcgtagaaggcctgaagctcctcgccccaccggccaccccacaggcgcttcttcctgcccctgctgcggccttcacggcgcccggagaacacaggaggcgccgccgagccggcagtcggatggagacgcgcgcctcgttctctcactgccccctcgcctccgcgcgtgtacggaccgccgttcgccgcggccgacacacgggagacaggcacccccaggcgattcgcctgccccagcgacggcgagaaagagcagggcgagtaggacgagggagagcaacgcgtgggtagcaaccgagtacacttttgcgggcacagtgggcggagagaagcagccggtgggaggggagaagcagccggtgggaggggagaagcaggtggagcatgggaaacccccagggggaggcccggtgaggcgacagaccggggcagatagccctgtgtctccgaccagagctgctgctgagagcgggattcggatgcgggcactgccctcgtgtagagaggggtgggggtagagagcgagggcgccgcagaaaagacaactgagggagccggtaatcctccctgtgacgtgaaagtctggctggagtcgacatgcgagaagccgactgtactggggacgtagaggaacttgggctcggattcctggcgggcgtcgccctgaccgagagcctggacgcgcggctgcgtctggcggcggagagcgtcctctctgagccgctggtgcgtctgcagcagctcctcctgctcccgcgacagcgtctcgccacgaggtgcgagaggcctttcttcctctctgtctccagcaccgggcgagtgcgaaggagagcgtcctgcaggggggttctgaacggacgccgcgagagactcagacggctttgctccgtgcgcagcggtggcgtggagcgcagagatgttgtcttgtctgcatgcgctctgcaagtcctggaacgctggcgaggcgccctcgacggagtgtcgccgcgagaagcagggcgaagaagcgccggcgccgtccatggggcgggcatggaggaagagcagagaccgtttgtccggcagcgacgcgtcggagagagaagaggtgaggacaggaaacaagtccaggttggaggaagagtcggtcttcgacaggggagaagaacctggagggtgcagcgtcttcgcagcgagacgggcgcctcgctctctccctggccgctccatttttcgtttcttctgaagcagcggaagagcgaaactcgcgcgagacgccagcacgagccctccgacggtctgcgtacgtcgcgcggctcggcagtctcgagcggcggcagaggcaggaaagctcgagcggaggtcggagtcttcgtcgagaagggagaagagaggaaggagaaaggtggttggaaaggcgcgccagggtgtccgcgagagagaaggaagacacgagagtcgtcagcgcgctgcggcaaagcgaagcgggagaaaaaagggtggcgagaaacttctcgggtgtatgtacacctcgcgtcaaggtgcggctttttcaacaaggcagaggagagcgcagagaaccaccggggagtcttccaaagcagccgcagtgcgcggtcgcggcttggccagtggcgaacgcgacgaaaaacctgaagtgaagttgcccaaatgcccgtggagtgtggagaatggcgagtctcttctcctttcggcgtttcctctcggcgccccgctgccgaacacaagttcgctgcacaagacacgctcgcgcgtgaaggggggcgctgtcgggcaagggcagcggggcgcgacacagaagccgaggagaggagacgaggagaagtcaaggatttgaagaagagcgcgctctttcgcgcagagaaacgcctgagcagagggagaggtgagatggcctcgccgaagcggccttgggggaacgggggcggacccggcgtgcgagagaaaagcgaagaaggtgaggagggagatggagagaaaccggggtgcttggcaagaaaaaattcggagccaagacgcaactgagagaaaagagtgtgcgtttgtcgaaggagaaacaactgccgcgaagcgagaaatgcgaggcctcgcaggcgcgcgccgcctctgccaaaaacgcgaagacggaggggagtggccagctgcgagcgagcccccgagaacggcgcggcgattgacgctgcgcagagcgccggatcctcgagcgcatgtctttatcgtcctttcttgctggaatccctgaaaaaaaacgacgagccgcgcagagagacggcata

SEQ ID NO: 1193 - DNA, 1392 bp, Toxoplasma gondii
  source 1..1392: mol_type = genomic DNA
gctcctgaacaacttacatctctggcgaaggctgtcaggacgttctgcgtcaccaaaatcgccctctgtatatttctttcctccattcgctccgtaagcctgcgagtgatcagcacagatgcaagcgaatatgcctggaaagcatgatactggcgactacacggtatcgaagtagacacgtagtgcgctcagccactagtgttcactcatcatatgcactgcgatccaaaagtcccgaccgaacacttcagcaaatccgcggtgccaactgttgggttaggacctactctctgatcggcttcacaccggtcttctttgtctcatcggcaaagtagacaataacccgattgtcaggatctactttgtgtgatgcgattaaaagcattcgcgaacggctgtagacagtcagacagggaaaatcacaagaaaacaacgccgttcaattcctaaacagcatgacagctgcgaacccatatacgccacacaggccgtcttcacgcagctcggctcttccttggcggcagtcaaaaaagagactacattcaacagatacgtttactcttcgattgattcttcgttgctccgtcttacttgcactcattctctttgaatctctgcagaaaatcattccacgattcattcttctcctgtgcggacacgatgtagccgcggtcctggagcatgtcacagcacgtcttccgtgctcgaaatagtcttcttgtgctgtcctccatcttctttctcaaaggcagtcaagtgtcgaagggtcagtccaatttcctgttcgtcacaggacaccctactgctgttagtaccgcctcatcatccagcctccccacaagttaaaccatgcccactgaatcctcagcctccgcacggcagagttgctcctccgtaccagacagattggttcttagaagtggtatcgacaactctgttgaattcaaaacattctggcattcattagaatgaccagcaagactgaacgttctactcgggtatcgatctgtggtgtacccacgcgccacgcaggaatcaatatcgccacggtggatagtttgcaccgaaaaagcgacacgcaaaatggcacttcgataaattaccgcaaaaaccagtagaagaaactaaatttgagcccgttaagtttgcggcgttcgcccttcgacgttcaacgactgttcgcggaaccgacggtgaacgctgaattgtcgttacaggtcttcggctggcgcacgcgactttgcatgcagaagctatgcgacaacggccgtcctgtctccagacacgtctcctcgtcgcccgtgggaagaaactcaaagcaaaaggtgtctccgcagcaatgaaggcactgcatatttgacataggcgagacgctgttttcaacggattgga

SEQ ID NO: 1194 - DNA, 2444 bp, Toxoplasma gondii
  source 1..2444: mol_type = genomic DNA
ccactggcagatgaagggaggcagtgaaacgcaagatagtctagcaagggcctctcaccctgcacaggacagttcatctgaagctcccagaaaccgcgtctttctccgctcacaggagcctgttgcgtttacgtgtctgagtcttcgtgcctcgggtcctctcacacttacagagaagacgcacttagacacagcctcagtttctcttcaggttgtgtcagagaatgagtcaaaagtccagttaaggtgatcggcggcggctctccgccggggctcgacagccgtctgcgaaaaccgcgacagcatgcggctgaaaatggcaacttttccagactcaaatcgacatctgtgtctctcccttcgagtcgagttgcacatgctgcttcgcgaatcctttgtatagagaacaagtgaatggcgcggcccgctccggccgcgggggtgtccagacactccgacagggccgcgtgcgacgcagcaatttctggctgagacgcctgaggcgttgtttgccatctcgaacttttcggatccctgcgaagggcacgcagatcgcagctgaagcaagtgttgccgctgtcgcgtgtggagtcgaccgtgtctgcgtacaaaggattcaccgtcccgcgcggtcgaaccgtttaaaatttgcctctaaaggcagcggaactcaggcggttgtgtggaggcggcgggagcgagccttcgctgcccatcgggatgcgtcgacaaagttgacatgtaagactgtgaaggctccgaaaggaccttacacaggtcgccttgctaactaaagttcaacagtttagtgataagagcatgtgactcgagagccgcggaaacagcgacagaaaggaattccggcgacagtggcagtcgtatcgactgccgtcttcgttctcccacaaaagtgcgcgagtgtgtgtgaaacccggcgcatgtgtagccgtgagtggacaaggaacagctcaagctccgcggcagatgcccgaggagccagcccacagaggcgctacgagagaacgctcaattcccccgcggtctctacacctcactccttacagatccgagtgtatcggtgtcctgcaggctgtgagggtgcctctgttctgcgctggctcggtaccttcaaaaggcctgtcgcttctcaggaagctctttcaactcagcgcactcggggacgtgtgtcaagttgcatgcgatcgtctgtcgctttgcttttcgagcaagcagttcagtctggagtgtcgagacagcaaggaaggcagcgtgtgttcgaacattcgaggcgtctcgaagagagaactctttagcacacttggcacaccgaagagacgctgagttctccagcgaaggcattctcatgagattctccagaaaacggagaaaagcagaaaggctcttttgcggaaggaagctgtctcgggcgatcgccgctgacattcgcggggctcgagtctcgaccgtttctcccagagcatctgcgcggcgcatgcggggtcgcttgtcttcgtctctccccggtgtgtgtccgtgcatgcgcgaacagaggtcgtttagagatcgcgaccgcgagaaaaggggacaaggctcagcaccggcagaagagtggaaagcagaacaagtgaaaaacggcgaggaaaatcagcgaagcctcgaacttctcctctagtcgaggagaaagggaggccgcgtatgccgcacgctctcccggtgcccagcacaaaagtgtgtgactttgacctcgtagaaaagacctcgcgttctcgcctcttctttacgacctttcgtctcttttcaccatgctctttctcctgtcttgggtacctgaagtcttcgtcggacctcagtccccgtccgctgtctgcggctgcatgctcttctgccctgcaaggagaagccgcctttgccgccactccggaaatccgtgctcctcgcagaacgaaaaacggagttgagctgtttgtctctccaagacctttcacctcccggtcacctccttcctcgaccttcgaggctgccttcgtaattctctcgacgagagagagaagaagcttctgcgtcgtcttctctctctgtgtcgcgtttttctcttgcttcttcccgtcatacacttctttccaccagacagcggaaaccgttaggaccctgtctgttgctttcctgccgattttgtttccttcatctctcgaacgcgtttgcctctcccctcaactccgtttccagaccctctcttcctgtctcttctctctcctccctcaccgccgaatctcatctccgagctcattacccttccaaatacagaaccatatcgagtcgcggacaggcttcgcagagacgccggggtgcgcgctctctcctgccccttcgggtactctcaagagactccgtcgcgcgaattagcctgccgagttccgatttcgtctcgcttcttcggtgaacca

SEQ ID NO: 1195 - DNA, 1934 bp, Toxoplasma gondii
  source 1..1934: mol_type = genomic DNA
acagtcttgcataatgattgacatcttctaagctacagacaaatctattagcatgtatatgcgtttcgttatttagtctagttctgggacgaccgcttggttttgaggtgtgccgggtttttttggaaaagtgttctaggggaactcgtgcataaatgccgagttctcagttggcgctcatttatttcctgctgaggagtagccggaatatcgtttggggatgctgcagaccatatgagctctaagtgcattaaaaacatgggacctgaacataactcaaaagcatcctcatggagtgacccggtgcttcttacttttttcatgtctcaaaaaccgtagagtgagagatactcatgtttcggtacttctgcaactttcgtcggactttccttgtttaaagccatccaataatcgtagatgtgttgcttgatactttttgtgaaggccgtatctgcccgcagactttgctgtgtgcattagtcaaacaattcgcttaatagcagtattcattcgttcgtattggtactttcaccgagtacgtgcacaacactggaaccacaaacacagaggccgagtggcctcaaagcgacaatggtttatcgtgccagcttcaagcagtctagggcatttacgaaatggcagtcatattcacggttttggatgtgcgctgaaaatagtacagatgcacgcaaagcataaactgacatttccaaatgcgcaagcatctggtttcacgaaaacgattgtttatttcagcatacgttgttcaaaactgttttcgctttatgtaggaagcgaatgtgctgcccacgagagacgcgcacaagttcgcacggcatctactgtgtcacttcagaacatactgtggaccaaatccggtctacatgcgtaatatgacagtcagacacatgcaggtacctaggcagtagcaatttttaaagtatagcacttagtcttcacctcctgacaacacattcaccgaagcagtcacgcagccagacactgacgaaaactgcatgtatgcagtactcgaggcatcgcagtaatctgaccagacatggaaacacttccccaccggcgaacaaactacacatgagatcctagaccaggggtgacggaacgggtcgtaaaccacctgcgtcgcctgtcttgtagagacgaattttaggaacgtagtcatagaatgattcagacagtgcgcaaaagccaaggtcttttcttcagtacgagagttcctttcattgtcagtggaaatgaagataacttcgactttattggttcgaaatcgtgggctacaaacctttgtcttgtggctgacaagacccatgacgcgggaacggaactcttctaagagagtatggatagtactcgctgtcgcggcgttcagggggtcgcttgcacatgttgtgcaggtgcgacagtgtgactcaaacttctgggggagggagagctttataagagacttgtgggtctgcacagccccacagttattagctgtcgcaacaacgggctgaaaacagcgtgtccgcgacgtgaaatggaaccagaattttgttgcgtgtttggcctcaaacatcgcgccggaagtcgtgaagagtcttgcagcctcttagcaaggttacgatgcatatcaatatgatcaaataatcgcctcgttgatctgctggaagcgacggcttctgagttttaggaacactccttacagtgggctttccaaggagagccgtgaagacatggacaaccccctgcctcaagtcttgcgctgctgccctctgcagtgtttccccgtctcgaggaacggcagagccccgggtgagggagcctttctcggcagccctcaaaaaaccagccgcctttcaatgatagatttctcgtcttggagtgacgccagcttttcggttcgtgtgcaggagtcgcgccaagagcaactatca

SEQ ID NO: 1196 - DNA, 2395 bp, Toxoplasma gondii
  source 1..2395: mol_type = genomic DNA
atgaagagaaggaacaggaagaggaccaagactggaagagacgaaaccgagaaggaaacgggtgacgcgaggagcgggaagcgcgcgcaggtcgcttcaggcctctccccgaagccgtcaggtgtacattcttctgagggaaggcgaggccttgactggaataagatcggcgctggctgacatgccgagggtggacgcctgaggctggcaaagcaaacccaacgcgggtctgctggagaaggcagagagcaggaagagaactcacacgaggggcgcggacgacgccgaaacagaggaaaaggctgatctggaaaacgggtggaggacgaactggtagaacgcttcgacaaagcgcgggccggcgaagagatgcagctacatgttgacagtgtgccttgcggttcagatgagagagagtcagagcacgctgcaatggggacagctgtcgcagttgaagaagaggacgaagatggagaagaggaaaactcagatgacgagaaagttgcaggtgagaaaacacatgagcagacagcgcgagttcccgctacccgcgaaagaaaccgcttgcctgctgccattgcatgcgagaagccaaaagaaaagctacgttccctacggtgcatgcgttttgacaaactcctcagattcaaagtcacgagcggccacagccctgagtttgtacacctgctgaacaaccgagcaggcgctgttcgagacctttgctcgcagtggatacggaaaacgactgcggatggcagaaaacggtggtggggattcacaatggaagtcaaatgcgcttgatgtggctaagaacaaaggtcctggcggacaggatctgagaccctactgtagtgtcagacaccacaggacacgcgcaagtcgagcggttccggttggagtgagagggtcttctttgcaacatctggaacatgaaaagcgacgaaacgaggagatccagggaacagaccgacggaaaactgttattccaggttattggctagacacgaaaccgcttctctgcaagccaggctctcctgtcaggagcagcgcactggaaaagaacgccatatcgcgagacggccgaacagcttttcacggcccgatttgtggcggtggaatcggaagcaagtggagaacccagaatctcgggaacgcagaaaactaccgcctggagaaattggcccagaaactcgctcgaagaatcagctcgtgcagacgttcctgcgttttcaggaatcggcgatgaatgtccaggcagagccactcgcgctgaagtgcatacatacacacagcatggtctgctgtcacgacgaggttcctgcagtgctgtggcgtcacgcaaagcgcgaatcggctttgtactgctcttgccctaatcctggagattgttcttccaacctcgtttcttcttacgctccggaaaacgttctgttggatctctcagctgcaacgtgtctccagggaagcgcatgcagcctgcacattgttcgcaaaagggggcagcgaacggacggctttgctcttcgctcctctgcagtctgcgtcttactgccctcgctattcaccgttagaatccctctcctcttcgatttcggaccccggttgattctgctgtgtcttttctgccttgtggcaacaaaacgaaatcgagaacccgcgagtccaggcgctttcttccgccttcccgccgttgaggctcagccccaaacagcgcggagaccggccgggcgactttgcactgctcgagtgtgttccgtgcacctcgattttctctccatcgtcaaaggcaagtgccttgtcaccttctgaatcgagtgctactgttgtttttctgtcttcttcttaagagggggacccaacccatgctttctcatctaatacccgtcgctgcgaagcaccgcgtttcttcgcgcgcggcctctcctgcgctatttcattcgcttctcttgactgtcgattgacttttcctcttcgtgaacaagtgcacatacaacgttccaagtggcatgcatgcgaaaatagtcactccatcgtgtttgaactctctcacctacagcgtcgacctgcctcgcattattttctcctccacccgcttcatctactatgttgatacgttcaccgaagagctttcatcgttactgatatttcactgaatgtatcttcagtctttctacgcctcttgttctgttgtttcctctttcgcctcgtggcatcgccggcttttccacttcgtgtggcgtccccaacctccccacccattcttcaagtcttgcagcactacgttcacccccgcgttttttcagagtctgtccaccattaagttcctttctagttgtttccacctccattttttctgtccttctgttcccccattccctcactagcgtctccccca

SEQ ID NO: 1197 - DNA, 1572 bp, Toxoplasma gondii
  source 1..1572: mol_type = genomic DNA
aaatttttagttgaatactcctcatcggcgcaggaggaaacacactgctttctctatgttgtgcgtagatcgtttttggttctcttttttttgttggctgctcttccggtggaacgcacgtccttgcacgacgctcaacataacagaagcgcgaaatgtttcgcccagagtagtgagtttcgcataaaagtgaaagagggagtgtagcaagaaatcgtttcgaagccagaggagccaaaactgagaacgaagtgcaagccagtgagagaggaagagcataacacgacgcacacagataggaggaaggtcgtgataaggttggtacacaagacagcggagagtctgtacttcgatgggaagcaatggcatggtacggagacaaagtcattctgttgcgtgtattgaaaacgaaaaggcgaaaatattgtagtgcaagagaatggtaataactccagcaagaaacgaaaaaaatagctgcaccaacatggaggacaagcaaacggtgaatgctctcagtgctgaaaatgaaacgggggtgcaacaattatacatctcacgggtgtgaacagttgccttcttccatatgcgtgtaatttgaggaacaaatgtgaataatacctcatatcaagcttctcagaccctctgtgtgccaccgtccacgtgtcattccagccaccgccgctctcgtaggtgtttttaaccggaaaagcaattacaggtcaaagccatgccgctgccactgacgtaggcagctaggtgattgttattttggcagatcctttaaaacatatgttctcttgaaaaatgtaattcgagtggcggagaatccagcatgtgtgttgcctcgacaagtaatttgtagacgtcatcgtagtctgttcgccgtgtcccgcgccgacccctgtaagcgagttgtgtgcctattgccagaaacgcaggttcaggattttttcaaaatcgattctgcagttcatactgcaatgacacacacgttcttcagtcggcaacgtgatggaagttctatagcatagcatctttccggaactgagaatggagttgtcttcattgactgggacctttgttgcacacgaagcatcagacactacaggatgcaaagctgcttcttccttgcaaatttaaaagtgttgtgtcttcctcctttatgacgtcttcctattccgtggttacgttctgtaacctgtcgtcatcgacatcacactgtgtgtttcgaagacattttccacaatgcgagattgacgcacgcaagcatgctggtgcagttcgcaccccgcggtgtttttgtttcgcgtccaataaagaacccagtttcgtacgtcaaatggaagagtatctacacatgcgcatgtaggtgtaacgatctcacgtccacatttatacaggtacatgcatacactcacgcatacgtacgctgtcggtaaaaggtagaaagtccgagacgccgcgcattttggcacgcccctttgctattctcgggtttatacaccatcaaggctcgtacagtgcgccaaaataccgccggaagacagggtaacgaacgagagcgcaaaacga

SEQ ID NO: 1198 - DNA, 2543 bp, Toxoplasma gondii
  source 1..2543: mol_type = genomic DNA
tgtataggtatatttgtatgtcggcgtatttaccagagatgtcttcgtctgcactcacgcacagtggcctctggagccatgtttcgttgtgcagcgcggactgaagctggggaacaagaagttgaactttaacttttgcaaaaccagcgaagagctcacgggatttgtctacaacgcagtgacaccgtttgcggccaagacagacgttcccgtgatcgtcgattctgcgctcctggcgctcgacccaccgctcgtctggctcggaggcggagaagtcgatttgaaactcagagtctccgtggcggatcttctccgcgttttcgagccgctcgtcggatcggtctgtttcgaggcagaagcgcccacgatcggagaagaagcggaggaacaggagtagccggaaccgtcagacaaagcgaggatgtcgcgacgtcttctgccggcttctgcacaaaccgagagagagacgccgcagctcgtgaggtcgctctttctcgctcctttcctcgcccactcgacggccggtgtcctcgtttttggaaagtctgttcgcgcaagagcagagtgaaaaaaggaacgcgaccctcttctcttttcctttttgccgcgctgtggaggtgccttgcgtccgaagccgagatgcagagacaacagggaagagaggaaacgcatcgaaacttggaacgcgaagaaggacgaatggccgcgtctcgacaacagtcgcgaaacgggcagattcgagtaccttccctctctcccaccgactccggattcgcttctcagtatagatgcatttctttgagagcctgagtcttctctcgcgaacactggagaacctgcaatccttgacatgaaagactctctgcagcttttctcacgaaaaacacagagctccgttgtctacgcaactcttctttccacgaggaaaccatttcttcttaccacctctcttttttgtcactgaacgctgaagaaagaaatcggaaatctctctgaaacgctgaaacgcctacaggtcgacaacgctctgatcgacgaagcattcctcgtcgtctgccccagtctccgatttctcgagcaccttgcatttctttcgaaggaggctctacgagcaactcttcccgacgttaaaaaacagtctttctgcgagtccagcacacgcaccccagtgaattcctccaagttttgtgttactacctgtaaaaacatatatatatacgcatatatatatacatatatatatatatgtataaatgggcattgaaacagatatctgtatgtttatacgcgtacatttatatatccaggcatgctcattacatccacagacgccacgaataatatacagaagcacctgtacgtgtatagatctgtatacgcatctgcatgtgtacgtatgctaacggcaatacgtactttcatacatatagaaatctacatatgtacgcagtttgcgactgcacagttccagttttccgattctcttgctttggttcagttttttttttcaagatgcaggatctttttctcagtcggtctgcagctactgcagctaccgtggagacgacaagcaggattttcataacgcttcctagaattctaggatttttatttcgcatgcctcgaggagtgtcatgcagtagcagtacaacgacctcttttctttgtgtactttttttcaagcggctcgacgactgcagcacaaaagcgatggtcacaagcatcgattctcttccccctgtgcgctcggcctccgctggcatccagttcgcccactgcagtgccaacgaaagaaaggctccggttcgtctcgctgtcgcagttttttcttttgcctcctattcttgttgtgtgaaaaaggtagaaaaaaaagaaaggagagaaaagggggacaaggtccggaggaaactgaggttctgctccgcacaggtttctgtgtctcctcagtgtctccaagcgttcagcaccctctctctcccccttttgtcttcttgggcgtcgataagctttgctcgtcgttttctccggacttgaaaaggcgtggaagcagacaaagtacctctctgcttcttcctcttgtttcatgtctttatctctgtcttgtcgggggagggggggagggtggggacagcatcgtctcctgtctcttctcctgtctcttctcgtgtctctgtctcttcaggtattttgggggctctcggtttcgcttcattctttttccagaagcttcttctctcgttttctcccgcatcttcctctctgtttcttgcccccgctgtcttcttcgcggccaccgatctgtctcggttgctctcctgatcgtccgtctctttcttttctctgtttcgtccctcgttttctttcctctctcttctttcctccatgcgtttgtgcctctcttttcgtcttgttcttttgtccgatctccgtgtgtctgttgcccttgcgtcctttcttgacgaactttccctgaactctagaacgacatccttttctcctcgtgcttccttctgttcttctcgtctctccgcgtctgaagaaaa

SEQ ID NO: 1199 - DNA, 2094 bp, Toxoplasma gondii
  source 1..2094: mol_type = genomic DNA
aacaagccatccattaaactctgctacatttttgttcgttcctcactggtgaagaagcttcgttgcgcctccaaacacaaccgaagaacacgcatgagaaaccctacaatgacacccattccaaaagcctgatgagttcacggtaacaattgtctgcttctttttaccccaccaaaattgcgtttttagccgtttccaggatactggtatagtgcctggtttccggccccgccgcgaacaaaagcacgcgccaacgggcatagaaattcaaaatggaggtgacgctaagtttcacattctggcaagtatataactacaatgctgtacgaaccaagagtaacaaatcccaggatagcagagacgacaacatgtgcagcaagaggtctcactgtctgcgtgtttctctttgctggagcccattcacattttcacattccatcgatggcacgcacagagcaggtgagtccgaaaattttcctccatttcctctgttttttcttgcttatgcaagtgcgtgcctttaacaagattcatgtgaaacacacaaatggcggtgtgacgtataaagtgtggagtagagggacgacttactattcgatcaacagggagtagagttccagattcttttcaatgatatcccggtcagttgtgacagtctcgccgtcttcgtcaacaccagctaggatgcgaaacggtatgggaattacagttctctgcaagcgacggacatcgatttgtccggtcgatggatgagcagccatgctttcgctgacgaagagtcgactcttgccgatgtcctcaattttcaccgctgacggcatcgaagtcacggagctctcagctgtagccatcgtgaccaaccagttttcttggaagacgaaagggcgaaagcggttgccttcggcggacgggcaagaccctgcctttcctgtggcgtctccccttttctggcgtgaagaatatatttaggcgaagaagagaactaaaaaacgtcgtgcctgtcccgcatggcacgacagtctccaaaacccagtagtgagaggacgttgaatacacaggatgagcggcttttccttgcaacaatcaaatccgctaggatactagtgactcgctactccgacagcattcagcagaagccgtttgcggcagcgttaaaaaaacttcgtacctaagctacacgcgccagatgtacatctaacaacttacaggcacatgcctttcctctgttgaagagtacgcgtgacagacagctagaaaagagcgtatacagtgggttaggtgagacaaacaattttacaaacgatgagcgcggctgcctgacgagaacaagctagacgatgtttgcacgacgaggatctaacgagttactaacgagttacacatattcctggtagtgtcatcgaaggaatggagcgacgagaaagttcagttcgagaatagaggctcattcgatgcagtttccttccttgttgaggatccatactagcttttcatggctcactctcgcgaaaaacgacacggcagcgcgttgcgtttcatgcgcaacatcggattgctcgcaacgcatgcagccgttcaggcagaggcctagcggaacggacgaagggcaggcaagaagtccgcgctcttgaaacatggggagaaacactcttttgcttatcgaatggaaatccgtcagaggatttgcttcactcctcgtcgttctctgtctcgtttccttctcaaagcttgtgttccagaaacaggggacgggcatgcaagctgacgctggaaaacgaagcgtctgtaattcaactaccgacaacgtctcagtcctctagatgtgttttaatacaacaaagactatccagaaccgtggaattgacaccaggaaactctccggaaacaagaagagttgagttttcttggctccaccacttccacttaccaactttttctctgagaaccacgtgctgacgcctgtgcacagggcgggcaagcagagaccctcggagtccgtagaatctgagactctgttcaacaatcctggcgaatcgaagactcgtcaggagcttatctagtggaaatggaacctgactgaataagaaacagtca

SEQ ID NO: 1200 - DNA, 2624 bp, Toxoplasma gondii
  source 1..2624: mol_type = genomic DNA
tgctgtggcgatcaatttgcatctgtagacaagaccctgagtctgtgtgactgtcgacaggggcgcgttttttccgtgtgcatatgagcgtgctggagcatgcgtctgcatgcatgaatgcgatgcgcgagaaaatccattttcagcggcgcgggctctgacgacctaacggaaggagcggttttgtattttcatgttgctgctgcagaggtgctcccgcagtcgtttatgtcatccgaggccgagaaaaacgcggttgttgcttccgataggtgacggaaagcagagggcgtttttgcggccagccatctcccagtcggagacccgtgtgtacattcttgtctatttttccttcacacttttatcgccgacggagagcatttttcccattttctccgtcacttgcaggcgaacaaatgcggttcatctagtccagacgcagacacggcgtttttcagagacctgcgcctctcgtgtacatttctttcaatcaggtttccaatccaccgctcctagcaaccacgtgtacatacacatcgtgcaagtgcgtgtgtggggggaacatctgcgtgcatgtgcgtggtttcctcccggcaatgtacgatatttcctgtataggccatttgtaagcgttttccgcagtcgttaaacctcgtttttgcaacgtctgagagaaacagctacttgccgacgccattcacctggtccgtgtttatatcaggacagagagacatgcacacaggagcacgaggcaggccgcgaagtcctgaaactagctacaaacgcaacgcctaaaaaagtgattataagtatgcagtgagctacatatgccggccgtttgtctacatcgttttcttttctcggcaaagtcgagatgtcaaatgcgacagaaaatccagcagcaaaggaggaaagcacgtgaaaaaatattagtgtttctcacaagagaaatgcagcacgcatcaacaatttcggtctgcattccacgaccagaagtacaccaagcacgagctgtcagaatctccagtcatgcgtttttactgattcctttgtgtctatgtttaaaaagagggacttccagaactgaagatgacagcttcgtgttccccagagagagatacgtgtgcagtacacgacgcaacagaacaaatcgcggatcggcgaaaacgggtctttctcagttggtgagaatgttggaataccgcaggtcaccaacaccaaagacaaatccaccgacagtgaagtttacctcaaggggctccttcgttacttagctgtatttatttttgggatgcctgtatttgcagtgtcaagtatgttgttgtgccagggcattttccttggcacttgcgattcttgccagacgtaactgcttaagatacgtctttctgcaatgtctgtcgcaaacggagcggcggggcatgtctttcttccgcagacgagtgagttttctcccaggatgccattgagcttggcatttgaatgcgttggtttctcatggggttgcgctgatgatttgcctttacatgtcgatctttctcagagtgtaactttcctgctgccctttggatgatgctggatgtagaagtttttgtgcagcggttttccgcgttttagaatctggaaatctcattatcagcgttcttttctgtcgtttggtctttcagggaggaagacgagacgctttattgcgcaacttctgactccgcgcgtcacgcgcgagaaaagatgctcacttctagagcaggatcgttggacacacgcttttgcagtcgaaatcggagttcctcgaactgtaaagtttcaaccccattttcgttaccaccatctttttcagtcgtttacttttcactttccgttgaattcctcaaaaaattttcttacacagcgacctttcatctcctagagccttcagcacgagcagcgaatgcagagaaagaacaccgccgcgcttctgtgtctgtgtctcttttgcctcgacggaaaattgtccagaatcttgttccacagtacccaagtcttctcttttcctctttattttctcggttcgatttctttttttacctggcttcctcccgtccttttcgtctgactctctctccccgtgtctcacgacaggtgacgcaggcctttcttgcgtattcgctcccattctcccgttttttctcccttttccctttcttcttcctcttcgtttttgcgtgctttcaacgccacccggcgtctttcgtgtgtggggaagacgctctctttccaaccctacggggcgtaggtcagcgtgctgttcggccagcaccgggcgtctggcttggtggcgcagttcctctcgtatttcctgctcctggtccaaaggagtccatttttcaccgtcctttgtcgagtctttcattctgtgttgtctgcgactccgcgtctccaccatttctccctccggtacgtgttaaggccgtcgatcctcgtgtctgtcggcatttcttccggactttttcttctttcgattttcgttccttcttctcttggagttctttgcgttcctgcgtcttcctgccttctgccgcccctctcaccccgcttcgtccttcgtctattccccacgcgtgtcttctcttccctcttcgcgacca

SEQ ID NO: 1201 - DNA, 4477 bp, Toxoplasma gondii
  source 1..4477: mol_type = genomic DNA
gtgtctcttgtcattaaagagaatacagtcagtacgactggagagcgagcgaccctcgaattctctcccctgcgaagacgcctacaattctccctcaacctccccctcttcccgcccagaactcatcacttcctccctctgcacagctgttctacgacatagagagatcctgttttgcaaatatggaaaaaagcatgcaaggcacccgacaaatgctccttttaagagccccgactacgtgcagacagcggcacatgcaagcgcgacacacacagttataatacacacaactctacattatagtatacatatatatatatatatgaatatatatgaatatacatattgatatatagatgtatagatataaatagatatgtgtctgcattatatggcgaggaactgtgcgtcgtgcatgcatcgctctaaaaatgtgccgagagctcttgaaaggtttctatgggcatcagagttcggtatctcttgtccgcagcgtgcctttctgccttcgtccggcttcttcgatttccatgcagctcccaacgaaacgccggcggcgtcttcctgatctctgtctcctacgtccctcctgagttttttctcgcttcctggagtctccccactgttccttccgcccacccccctccccccaacccctctgatccccatgttttttctgctgagttttctcgagagaaagctggttttcccgcgtctttgcttcctcaccggagagcgctctgggcaccggggccaggggtcttgctgcgtgtgcctccggcagcgcggaccttgacgtggacagcagagattccaagttccttgcatcgcgcagcaacgtcggcagcagccatcatcgccgcatacggagagctttcgtcgcggtcggccttgactttcatgccgccagtcacgcggaccagagtttctctcccactcaagtcagtgacgtggatgaaagtgtcgttgaaggaggcgtaaatatgtgcgacgccaaacacgatttccccgtcgcgggtcgccggacccagaccggaaccctgagcttcgccttcctcgccagtggcggctttcgcagacttcttcggtgccatggtgacgaggagttttgcgggcgcgagggaagcgcgaaacgcgcgagaaaagcgcgaaaagtacggtctcagggaagggaaggacggcgccgggggcggaacctgcctcggcgaaaagcgggaaagtccggactgaaaaaaggagagaatgtcaggggattcgagccgcagaaaaaccagcaaagcaaagggacagcgacagagaaaggccgcagccacgcgcggggggaaaagagcgacaaggagaggtggggaaaaacgcgagaagtcagacactgtggggggccgagcgcgactgtgccggactcgcgtttttactcgaatataagccgatccagcgaaacgatggaaagatccacgaaaaacgctgaaaggaaagcagacgaattttcttttcagttccacgtgcgctttccgttccaaaccgttccagtaaattcccggtgagggctggaggccccagctggaaaggtgccaccaacacagggcggcggatgccagtctccctggaaacgggacggttggagagcctcccttcggagtcaactttgtcgcatgtaaaaaacgcgtgagagtgcgctgttggaacctaaagcgtctgcacactcttgcccttccatttaaaaaattttaaaggcgacagtgaatatgtactgcgcgtgaacaactcgagtagaaaagacttgcttacccgaatacctgtttagggagaaaagcttctgtgtcgagcagctgtcaaacttttttcggccggggtggtttgtacgtttttcaccggctattcacaatcggaacgcggcttccctcagtaagttgcagagttcttgtactcgacagacatcgatggaacatcagtcatcgaagttgtgatcgtagatgcgaggcggggttcgtcagacacccacggatcgtcgctgaagagctcacaaaacgctgtcgaggatgccggtgatagaaaataacacacgtttacacaattaggaaacgctgtgaccattgtatctgattcgcgcggcaaacatgctcgcagaccctggctgtatcgatgatggagagttgtgaaaatggcgaggcgggcactgaaaaaggaggggcgacttcagtttctgcgactcctccgccttccctgcatgtgtcatcctcgtggtgaccaagtggaactttgccgtttcccttcgtaggagtgtgtgtccgtcacgatactatgagttttcgtggggagcgaaagatgattactctagcatatggactagtcaacaacgggcttccttgaagtctgttggaggatccacctgcgcgcatgtggttagctgcttcatcagtgtctgctgttttcattgcagatcaagaaggcaggcaaaaaaatacaaaggaaagtctcacgaaaagcctctgagccaactacgctactctagcagcagcgccaaagcctcaactcccagaaaccatttccctgcaagaacgactcgtgtcgtacaccctgcaatcttcctaccagagtctcgcattcgaaaaagacgagtcccgacatctgaatttcccgcgtcttatatgtagagagtatgttttgtggggaaggctgcattccacaatgactcctttgtcgagggaaatgccctggtcgatcttcaatcaagacgaacggcggggaactgttctgcaaaaaacgtcttgtaacgtacagcagcgggtggattcgtgatgattctactggatttgcgtgtaaatacacactttcaagggaagagaaaaaaccctctgggctttgcgttttttggcgaggtccggatgcggcggcttctactttcgcttaaaccgaagctttagcttcacgaaaaagaatatcctgcacggacacggtgttacccggctccccgtgctggcagactcttcctgctgaaaagcaacgactctctggagccagtgtgaaatgcgagacagctcgtgtgacaccacttacagtgaagacagcagtagccacatttacgaaaggtgttctctcaggctttaaccgaaaagaaagtctctttgtcatgtccccaaaatccccgaaaagacagctgccgccgactgcacgcttctctcctgccgaggatgctccgcgacagggccctgaccccgaagacatgcacagacgcgctcgtctctctttctggtccacgtattcacagcaaagggtgacttctttatggggacgggaaaaccttaaacgctgtgtcgcgccacacaatcagcgcggaacctgctcacaacaggagttaccactccgaacggcgtgcgcctccagttccttggtaacgcgtgtagtaccgacgaccattcacagtaacgcagcaaactagaggacttttgccagtaggaaagcagtggactctgcggcatgaagtgaaaattacagcgaggagcaaccccggtgaccaacgcgggttcagcggctccagcgatgacggaatacgtcagcccgtgtatcgctaagaaaccgcaacatatctgtcagctgactcgcgttttctgcaataccctgcgaatgagttacgaagtggcctctgactcgatttccaccgtcaaataggacggcatttgcggcgaggcgacttccgcgggagcccgcgtcgcgtggtacgacgcggccgccgatatcaaacaagcggcgtagggtcgagacacgcgcttgctggtctcgaggagacggcggctggaatgcagcaccgacgaggaagaaagatgtgagcaggagcggcgtttcagaaagcgaaagcacgaacttttcacaaatgtgttgacactcgcgggaaagccgccagaaaggaacttgcagatcgagcgaccactcactgggtgtatgtacacctcaaattctcagtgtcgagggcagctgctcgacgttcgtctgcttcactttcttccggtgagcttccaccgtcttctccacgcttgatttctgcgtctctcttttcttgccctaacacctgtagaaaaactctttctctgttgcagaagcctcgttgtttgctttcatgtctccggtctccgccgacggggcgcctcgcgaaagttgcacgtaggggtgtcgtccgtgtgcgaaaaggcgcgctcgctcttcccttgtccggcagcggtttcttttcctcctcattcttcggcgtttctctgtctcttttccgccatctttccgggagtttctgctatctccacggagagccagacacaccgtttcgcagactacgcgacgctcccggtgtaccgctcgcgtgtgaggcacccgcgacagagacgagggcagttttacacgttgcagggaacggctttcctcagtttctcaaaaacttgaaattcaaacgccgtcggcctgggcaactttctgtgtggatcctcaccgcaca

SEQ ID NO: 1202 - DNA, 4866 bp, Toxoplasma gondii
  source 1..4866: mol_type = genomic DNA
agaagaagcaacagccacaggcaaaacgtcagatgaagaagacgaagaagacgaagaatcggaggaagaagaagacgaagaagacgaagaagcggaggaagaaaacgaggaagaagcagaggcagaggtgttttggagaaaggcatggctctgtggatgtggggcttcctcgccgtcgaaaggtactgtctgtacacttgaagctgggtttcccgcgatcgtcgagagtcccgcgttcggggggtcggttgaagcagcgattctcgaagaaatctgagacattttctgttgtgaaaaatcagaagaagtatcgccttttctctcctcgtgctcttcaggttcggcaaaaggggagggagttgcaccccaagcgctgcgggaagcggcgcctctcgtcggctgaaaccctggaggcatctttccacaaaaaagacgagtttaagacgcagaaatgcatgcactcatacttcaacaaaagaaggcatactcgcaaccatcgacgaagaaggaaacgatatacatgtcatgtttttgtctgtgtgtcatgaccaggttgcagtagaaacggaaaccagtggaagagggcgggggagatatatggaatttgtggaatttgtctgtttctttgttcgaaacgtctggcggtcgtctcgttagaaaagaagcctgagagaaggaggcgtgggaagaagcgaacgaaagccgcgaagtgtgcctgcccttcttgagctccgttgccgttgctcttctgttccgctgtcatgaacatggagctcgaccgaggagacaaatcttaaactttttcttggccaacctcggcggcaaagccccgcgactctgtgcttgagaaaaggtgctgctaggaatcgagttccgatagtcgtatcggacttttcccgcgtagaaagtctccgaaaaagcgacacttagagcatggggagacgcaagaaatataatagaagagaacaaagaagaaaacgtttctacagcgcagaaaacggcccagaaaaagaggacctgctggggttgggcggcctccgtgagcgcctgcgtgataaccggatgagcttttgacccagattcgcgggagaaaacacgaaaaattggtgagaagtggcgatgtgtgtggatggaaaagaacaggaatcagtgaaactgtgaaaaaaacaagttgccgggtgaaattttcttgttggggtcgcaaagaagcagcgcgcatatgcgtcgcacttggtgtctggcaacaatgaaggactttgcatgtgtgcatagacgcaagcctggggaggaatgaattctcttccgatgaactcgtggtgcagccctgcaatcaacaagtggaaacgcctttgcatttggacagcaaaagaatccgcagattgcttagacagtcttcttctattcaacatgtgacacatggtccggtttcgaagataggatttttcttttaccgtaggaagatatccttcgtgattgtcagaggcatttcacaagccacttgcagcttctttatgtcataaaccgtttcaagtctttcttgagcacgcagcaaaggtgcgatatcctccgtacacagctgtggggaactgtcgacgtcgacttacactggatagttcgatactaatactggcgagtcaaggctggtgaatcgaaggagaggcacagaaggaaaaccagaatcgtctgacaacaatgaagatacacagaattgtcttcagacatgtcagatgaaaaaaggagtactttctccgataatttagtacgcacccatactcaaaccaggatgccagtacacagagacagaatatatctatatatatatatatatatatatatatataaatatatgcatatatagtatgtaacttgatgtttacatgcacgcatgtagatatgtgtgtgtttgaatgtgtatttaaagggttgcatacttgtttgtcgtaaagttcttctccctcgaggactttctcctggtgcggctgcagtcctgcggactcaacagaagaatttgaccttccagtgtgttttctctgacacaggcagaacggacggtggctagtcagtctgttcgcagcactgctttatatcgttccgtagtggagtctggcgcattatgccatgctgaaatgggtcccaccctatcttttttttacgacggtttgtgggtggtcgtgtcacctctttctgatctgggcttgctgagactcgatccccagatctgcaaagcgttacatcgtttttttccaggacagggacgaaggaccgttcttgacaaaaatgcgaacatctcaactgaaatctgaagaatccatgcggaggcagaatgctccaaaacacggacgggggcttcctcttagagtttcgttgctctctacgaatctctggcgcattcacaggccacaccgtgatacatttcctagtatttcggaaaccagatcatatatctatcctcgaatagaacggatactccgagaaaaagagagaaatgtgcaaggcgcaagcgtatccaacagcgttcaaagaacccatcgccggaattggtcctcggggagttctcagatactgcagacttctggacacacaatcacagaaatactggcttcgacgagggtagaaagacatttgttgaactgtaaaggaaaggtgtggcagatccgtcaaaccaagagactcttgcacggaggctgatccaagtagatctggtaggcattttgcaccgtcggaggacgagagacaacagtgttaacctcagtccatatcctacgcgtgaaacataacagatattgagtatcctacgttacgcacgcatctttgaaagccttttttccgcatcgtgtgaacccttcatccggcgcaagtgttaaagaaacacagcagtacgcgcatgcgcctctcgctgtttaggttattctgaattttgacacgttgctaccatcacgaaaggagtgaaacaggcaagcgaggaaagactttctgtaaagagagcgagcgtgtcgcctccctgcaacggtagacatgcattcgcagttactctccataacaaaggcaaagcagagtaatcgcggtgatccaccggctttttcgccctctatcatttagctaacctatggaaccaagatcttccccaaaaactctgcgaagagaaacgccattgacacgttccttcaaacctctagtgtacacctgttatccacttaccgacaattgtttatcgaaatatacactacatatgtgtaaatatgtacctgtttcaaatgaagaatgtctatccgtgcgcagtggtgagaatttcttattacgtcctcactgggcactagagtctagaaaacttcacttaagcacagcatcaccgcgtacaaacgcttggagagcgtagaactctatgagtccgctgtctccacgatatgcgcctgttcaacagctgcgtgttacactctttcactggacgcttccaaggtcctctcatacatttcgttttctagagatggacttggtattgctgctaatgatttcaatttgctactggccctgaattcaatcttcctgttcaagtccctcctagtcgggcgcctctgttgtaaagaaactgtttgagtttcctttttcacagaagcactgcaactgtatttctgcttgacaacgttcgcatcactttcctctttccgtcgtttcgtcttgctttatttcactctacggatcttcgcaagagctctccgattgacaggcacttgtcacacgcagaaacctgtaaccgatctgacgatcagcgacggcgcctccgggatacttgagggttttttgccgatatcgcgttcttcagccaagcagaaatgcctttttctcgtcttcctggtcgccgagacgtcgaaaagaagagtagcgctccaaacacccttgatctgtcgacaaacgctctccggcaaagagtggcggtcagcgggagaagcggctcaggcgggttgcttacgcagttaggtttccgctttttgtgcattttcatttcaagcatgtagcacttgccaccagcatgttacatcatcctgtgcgtgtggaggaaatcgggtgatgaaaacaagaacatgttgatcacacgttctacaaatcctaaaaatgccgccgggatctgccgcatgattgaacgagcgtgtgagggctgctttccctgttgctgcgaatctaggaatgggtacatcgtttgcttttgttccaattcttcgattatttccgtgcttcacgcgtgtctcactctttttgcatacagggggttcgtttgtttttgtgaaaatggacaggaaacgaaatcgccattcattttgtctgccactgcacaggcaggcgccgccaggttttcactcgtttacttagtcgcttttactcatccctctccatggtttgcagaaggattctacgcgtggttttcctgcgctctgaaagtacattttcgcaggaacccctgttcgatgactgctctgtgtctgtagagtccaatcggaacagttccgttttggattcgggcgttgtcaacttccagacctcaaacaagagcctggtgtagttttccttccagaatacccgtccctcagtgatgaacgttttcccgggttgttcctcgcgttttacttttttccccttcttcgtggagctcgcctcgttcgactggctttcgtacggccccggcttcggttttgctctttttcgcacctcgaccgtcttttccgtcgaccttttgtgttcgggctctgcttttgatcccgaagttcagaatacttgcgtcgatccctgcactcagcgttaccttcgcctgcttccccacttcccacgcgttttctcccgtttttgtttgtcattgtctcctcccccgaacga

SEQ ID NO: 1203 - DNA, 4929 bp, Toxoplasma gondii
  source 1..4929: mol_type = genomic DNA
gctacgcgttcctgtgaatctgtcagttctcgcagcgaatctaaagtgacgccgacatcggtatctgccatctggtcactctgtattttgtctaaggaagttgcagaactcgaattcgcggaccggagcaaggcagttctcatgacatccagcactggccccaactcccgtgagacagacggctgtgtccacacacccgccgctgcattctcgttcgctgcttcagcggacgctgagatcgggagaccggcggacgcaagaaggagcaacgcaacagtagtacagatgaaagagaggttagagaagaaacggcgcacgccggcactttgttccattgtcccgagaatatgtcctagaaaacaaagacggcaggacgcgctacgcagctgggggcagacaaggcctcgtacagggcttcaataactggacatagatgctttctctgcaatacaaagcataaacagggcggcgacgtgacaggggaagcagcgaaaagagagaggattgaatcggatcttggaggaccaaaaacagcgagacgcctgtggttgctcttcgctgattaagcagttttcattacagcgccaagaagctgatccttgtggagggacacttggtgagagcacatgctggacaggacaagaaaacggtctatgctgtgccaggtgtagcttcacgtggaaacatgcgtgcagcagagagggctactcgcgtgttgaatcgaagaggcaagattaggaggaaatgcgccaactccactgagagtgaggaagtacaccggaagtggatcctgactgcatcgtccctgaaggccaatttcaagaagtctgacgcggataacgataactgtgcactgaacaaaagagacactcccgctgttcaaacatgcatggacatatgcggaggtatatctgaacgaaatcgaaagattcgctctgaattaaaatacggtggcgcaagaactcgctgttttcctgactatgccaggagtcaaacatgggcatgctttgggaggaagcaaaaagaatcaggaaagtacgacctatttcctggccactgttaaaaaacacacgcttcgctaaaagattgggaagctagagagtccgtacaagcgtgtgccgtgaactggctgttgacctcggtgtctcaataagaacacccgttgccccgtagtgggtccgccaccttctctaagtaaaccgaacgcgagggtaggactttacacgtgaagaaacaccatttccagaagaaaggtcctaggcccgtcgcacacagtcttgccctgttttatgtttttcaaaaggttgactgtggagaaagccggacaccgtctctgttacaagaagcgttaagtacaaagacgcccggcacaatcggcagtgcacgaagaaaaaatgaaaacgccctctctgtgcgagcagaaggaaaaccgtaggtacagcgtaccgtgcaggcaaaaaccccatacagtttttaggccccgatttgggctgttcccagatgagtctaactatgagacacaaatggacccgcgtctcgctccctcggcagacaacgggacggagcgagacgagatgtcgcggatgtggaactctcttgtacgacatcctacaacatctctgcaaaaacaggtaatgtcaactgaaaatataatagagatgcaggggaaaacaaagtggaccccgaggtaatgcgatcgcacgaccttctgtgacagtgggcaaaacggactagccacctgcggcgttcccctctttccttgcgcgagagtatggagtaagtagggggaaactcgctgactctacagagatatacagcgtactctgttgacgcatagtcaccaattacgcatcgggtatcaacgcgtctgtgatgttttgtcgttcaaagtctcagactcgattctttttgaaactgcggatctgcagaataaatcaaagaagctggtttagttcactttttacttgctcattgcgtactggcgactacagggtgtgacatacgttcgattcacggaagccaacacaattcttttctggagagcattcgtcctgcgtccgcgcaacatcgcagacttgcgagtgacagcataccgtcacatggtgtaggcgaggaggccgccagtctttgtgtcacaaggcataggtacgtaaacgtaaccgtttaacgaaagcgcgagcaagtcccttgtttcgattatgaacagcggatggagctgcgacaaagattcagcagtaagacacgatccagcccctggcagatacacagttggcagcgtgacagggtggaaccgacgattcaccggagaataggtcggcgagtacagagtgtgccagtgccaaactcgtttcgatgatagcaacacacgctggattctgctggcttaccgccctcaagaaatctggggtgatgcaccaaggctcggggggggggctgaatcagcgttgttgaccccggtggcgcctttcgttcctgtacaccatcgtttcaactgtatccaacacaacatcaaagaaattatcgctcacgatttagaacattggttcttctttctgcttcgactctacattttgtccattcctcgaacagcgctgggatagtgtacaatgagggctgaccctggggcgcgagaagggaacgctgccacttagaggtacggattttcgccgttctctgacggggtggaagacggttgagaagaatattcctcaaggagcgaaccaggaaagattcctgcagttccatcaagggcgatgtttcctctgtcctcattctttcaagaagaatccgccggtgacctggcacagagtgaggcaccagggtaaccgcttagaagcgatttccacacgccagctgacgaactcgagggagatgctctcgattgagtcgggcgtaccaccctagctgaagtttttaggcagtgcgtgactttggttcagtggcatcagttgctctccctacagctctcgttcgcctcaaacatgaatcgcgcatggggaaatggggagcagttatccgtcggcaattcagacgctcactctattggtatacgaggcctacggcgaattcgtgggtgccagtgtcttctctcgaaaccacttctaactttgtgtttttatttggtcgtccaatgaagaacgcgatcttgtgatgaatgctaggctcggccacacaccctaaatgcgttcacaccaaggaatcgtgggcagaaaacaacgcacgtgagagcccatctgtttctacatttctcttgatccaaagtggtttgcattcggaagagagcgaccgaaaggaccatcgtcccatgtaactatacacgtgcagctcattcagagaacatgcccctcggcgtacttaaacacattccgagaagcggcaaagcaacagcagagggactacctgtttttgcccgacgctgtgactgcccataccctgtagaactctgcttgttttaaattagcacagccacatcaaactggacacagggtgaagctccagagaccaacgcgcgactctatttcctctgcgtgctgcccagagtcacctcatgttgcatatgattctcgtcacaaccattgttctatgcaggcgacagcaactcgcgaagctgcaagaccaatcggggaagtagcacacagaatcaagaagctcagtgtagcctcacgaccgcaagctcggtactctttgctccacagccgcagaatcccagatttacgcgtgtcacgcaaagttgattgaatgagagaggaaacgtaaacaatctcgaaggaaacgtgtgtcggattatcccccaaatgcccgttctagcacccctaggtgacacgcacagatcgtctgccctaaactgcctggttgcttcagcgagctttccgagccgagaccttgcacttcaaatgggctccgtaccgagtaaaagacgatttctgagagtggtcccagaggagataacaccaacttgaagcaacaccttgtaaactcagcggaaacaccgtggcgaaaccccacctaatcttcgctttagtcagcgtttgtcgacagcaaagcatctcagccaattcaacgcgtagagacactttgcgggcgcctccgacttttgcgctgaggacagggcagggcgagtggcagttcgcttttctgagcgcgcgtaccttttctcactgcttttccctcggcttttctttgcggcaggaccaatacagagtgcaggacgggacggaatcgcgtaggcagccgcaatatttgctttgagtcgtctggagtcgctgtgaaaacgcaacgccaccttctggaggacagaacttctctttaagggaacacgcgggagacaacctccacgttccagcgcgtgtctccagcttctgttgtttcagatccttcttcgacgtttgcgttctcctgctccggttttctctgtgtttcttctcggcttcaccctcatatcgtccgctttgtttctcttcgcctcctcccgctgacttgcgggctgtctctccttttcctctcccatctccccgtcgcgcgacgtgtaggttcgtttctcctgaactccggacatccacccggtttctcgtatcctgcatctccgatagacaagaaactcgaagagtcttgcctccagatcgccgaactgcttgtccccttcggaaacacccacagaacaagcttgcactgcggccgctgcacccctcttcttgttttgatgctcctcaattcttccacagactcgtgtgcgcttctgttctcttttctcgcccgtctccatcccctttcttctctccaaagagcacctgccgcatctcactctgccccttcccctctgcatccttcctgccgatcctccttcactcctccgacttctccaccttgagcgtcgtgctccaccgttcttctctccaccagacagtctcccttcgtcgctccaaaacaaca

SEQ ID NO: 1204 - DNA, 1765 bp, Toxoplasma gondii
  source 1..1765: mol_type = genomic DNA
agaactgacgtctctacgtctccatagagcggaacttttgttctcgacttttttgcgcttgtgatgaatgtttgagacttcgtttctcctcagcttctccgcgcgcgccgcgagctctgcgagcagcgcctaagactgaaaagtcacagaaatttctttctttttactctcttccctctcgcctctgtcaacttgaagcgtcgccgccggtgactttctgtcgtggtcgatcagagtttcgggagtccttttctccgttgcgacttggctttcgaacttcatggaacagcatccgtgtgaggcttttctcttcgtttttcgagcaaaggcgccttcgatttgcgcaaatacgccttctgtcgtgaagcgaagcgacaagttctgaggcgctcaccctgtgtgccgcgccttgttggggcaggtgactttctttcgtctgcaaagacgcgatcaactggaagagagacacacacattccgcacataccggacttctgccgtcttcatcacgacaagaaagagacaaaacggcacaggcagacacagaaagaactctgcttagggttttcgccattctgcatgctctccacacatctaccggcacagatttaaataaacgttctcacacgtttcttcaatcatagatatacatatacatatatacatacatatatgtatatatgtatatgtctttgtatgcatatatatatatatatatataatctgtacatggggtgaataagcgtcaggagtttaggtgtacattgatgggggcatcatcgcacctaacggtgcggtctgttccggtgtgagatctgaactgagaagaagagttcatgttgaaaactcttcatggggaatccgtcagtctgtcagatcaggtccgtccgctccccctggtttttccttcctctttttcagttcagcgtcgttgcttccgtggagaacgggtccgaaagcgaactttcggccttcctctcgtttttcagggacgatctggaaggctcggttcgcttcctcgttttgctttcgttcctttctttacgactcggcgaagtccccttcttttcgccgcgcgcccgttctcgtcggatgtgtctacacgagcgtcggctagcaagctgtacagggctggtctttttttttgcgaaattccctcctctcctctttctgtccactgcacctcgaaggtggctgcctctcgcggtccttgtcctgaagttaaattcagcggcaagcaagacttccgcgactttgcaaagtctccgctgctttcgctctcaggttcctagcacgagccgtcggccctggggggcccgcgcgccagctcgacaagacgggtgcccgtgtcttcagatttcagcggcgaacctgcccgacaaagagtcgagcggaactttttttctttgtgttcttttctccgaactgttactcgacttctccccgtcttcatatagcgtttttctcgcttctccagtctgtcccccgacgcgtactcactagccggcctccgtgcacccgctggacggccgctttcttctggagaatttcctggagaggcattcgcccttctcgagaaaagttctccgtttctacgaagtcgactgaatcgattttctctgcaaaggtcgccgctccgtccactgctgcgccttctctccaagacgcacggaacctggagccccagcgacgccggtagacaagcgtcgagcgcgcggcgaaaagttctccgcgatggattcaggctggtgctcgaggctgaagaa

SEQ ID NO: 1205 - DNA, 2160 bp, Toxoplasma gondii
  source 1..2160: mol_type = genomic DNA
catctatgtccatatctctatcgggttcagtgtagaggttccgtggagaggggaaacagtagtagattcttgcgttattgcgaaggcctacgcacgaatgggatgcccgaaggacttacggataattcggacggggatccagtggtgaagttgtgcatagacataaagcataaacaggtgcctgttcgctgtgaaagggaattgcccgtatcaagtgatagcagtgtttgtaacgatcggttgccggagaactatcagcttccctaaaattcgcagagtcgacggatcgtcctgctgagggactgtttccgacccgagccctgtgactcaccttgatttttcgtcttgtacgtcgcattgagaaagttctcttcgtgtggtagttgaaatcttcgtcatggtacaacccggtctgtgacgcggctgacggttccctgccgtacgccttcacagggatcggaggaatgacttgccacttcttgaaacctcggcgggcaccgcggcccaccagccgcaggtacttcccccacaagttaagattcttcggcatcttgctggtgcatcttcactttctgacttccgccaaaattccaagcgacaaaggggcttttggaagacttgaacgggccagggcgttccaagcctagtctcatgtcacagcacgataactctcggctgcggaattgctcgttgcactgcctgctgttcacaggcaaccttcgttgccttcgctgggtgcgccggcgcgaagtgactataaagccgctggaggggtcagctttacaggaaacccacaccctccagacatagtcgggttgtttttaggaataaacgaagatggatggtgtcaaacagagcaaacgaggggcaggatcgcttagacgatcacttagactgcgcaggttctccgctgtataggtagacagaaacattgagcacggagtctatagacatatgcggcgactgcggtgcgtgcacattctgactaagggcaccttctatgaagcgaaaaaaacaggttaggggcgcgccagaggcgacgaacatccgcatctgaaccccgttaaaaacttttctgtgtatataccatgaagtgtgaaaaagaaaggcgccaacacacttgaaaaaaacacctcgcagaaccttgagcgcacgtttggacttcaagagtcaaagtcaagtgatctaccgcagatggtcacgttgtctaacgttaaacgcatagagtggagcgaagaaccggaaggccatgttttacgcgttgatgtggctgaagaccagcggatttttggggggactgcatgcagggagaaacgtggcacttccgctgcatgagggaggcacgccaacgcacatgcaacccttttctccgctatacctatttgctttatgagggaaacagaatgagtcttgcccctctgcaaagactgtgcctcgaggtgccctcatctcacctgcagaacagcttgtttttgtagctttacctggtgtgcagtggttcctgagaaccgtcgccgccgcgtcgacctgcatgcgtcgaggctcctagcgattcgttcgagttcctgtctctgagttccaacagtatagaaccgctgtttgtcacttcaagcgcgtcacgtctcacgtgggcgtctgaagcgcttcttggaagacgcaacgaagatacccctggatcttcttctgtctggacacacactctcgaggaaaagcgaatccttgaagcgatctttctgccccggcatcaaaggtggaagtttccttgctgtttcgacgttggtgctggtctgtatgccttggcatgccacctgggcgacttctgcttcctcagcttcgtttccgacgtttcgccgtcctttgtgtgcgctgaacatccaacgcaagctcagttctcttctggccgcttggctgtcgccttcccccctgcgtcttctcgccaccagtcagcgtcgccttcctgtcagcctgcactctcatccacttacgttccttccttctacatacaaaagccggtttctgcgtgtcgtcgaagccgccgctgctccacagacgtcgtgccccagacgactcgcgggtcgcctgcgcttgctcgccgggaaaactcgggtggaagtgaaagaaatcgcggagtcaaatccaggacctctccatccgactcga

SEQ ID NO: 1206 - DNA, 4935 bp, Toxoplasma gondii
  source 1..4935: mol_type = genomic DNA
taagaaaagtagtttcaagtacactttgagatggtccacaagttcctgaggtgcggagtccagtggcacatcctccgtcaggaagtctgcctcccgaagagctcgcaagagtacctctcgaattcccttgcggcaaaggctccccgctacacaggccatgtttacgagtatcgagagaaacggatgtttcaaaaccatcgacagcagcattgctgcctgggttgtgacgaacatgaaaggttggtagaacgtttgtctctccggcgtaagtcccatgaatcgaatgacagccgcagccgccctcccagctctgcttggctcctctctggcgctcctgccgaaatcctccgagcatcgatttacctttctagtgaattcttcgctcttgaacacgtccgaagagaccaacccaatgtatactggcagggagagagctgcgcatcccggaattctatccaggagatgtttgagcttgaccgtgaggcgcaaatctgttgcatcgaggactggaaatgacaaacgtcgagggtccctattgacgaaaatggagaaacttatgacagttgtgtgaagagccccaaacgactgcttccccaggatttcttggaccgtcgacctgcagtcatcaggttccgggctgcccttgcagagattctccaaatccacgagttgttcacggaattgttgaagacaacggtcaaggagtctccgttgtgatggaaatgaagttgctggatcaccgtcaccatcgggatcgggtgcactcggagtgagtgcagagcgtcgactggctttcctctgttcccactcttcttgacgctttttgtgttcctcccgtcgagccgccactcttcgctgcaggtcgctgccttcgtatttccaacctgggggccgggatgtcggtgggtttgtctcgttggtgccttcagtgaaagacagtgactgagcagggaaagtgctcctaccgagctccacatccgaattgaggggagacgacaagaacgaggacgcgtccaggtggccgaggctccgctcaaagctcttcgccactgcatttggtgaggtaaaagcaaacgcaccaacagccacgagggctgcgatacaaagctctgttctcttcatcctaagcgaagaacgagacagcgggggtacactgagcaaagaccgcgttgggcgccaggcaacttccggagagtacgccgctaaaaaagctgtcaccgcgacggcagaagttgctaaacatctatgcaagggtaggcaaaaaatcttttttgctgaaaagaaattggtcaagagtcacgcggccttccgctggaaggcggcgaaacagctagctgattttattgcgatagaccgcggtgccgccgttggagggcccccccgcacaaagaaagcatgtctaagtcgaagattgagtcaagatgacacgctcgcagaaccagttgcggctcttgcgagaaatgaaatgtgaaacaaccttgtgtcaaacgtggacgtgactgtgaactcaacgcgcctgtctggatctgcgcaagacagctcggctcgcgtagcatgtggggagggcgacaccctcttcgtcgcttcgtattctcagctttaccaggcgtgatgcacgtttctatcaactatgaacatttcaagacgcagacacaatcactcagctcgctggcgaaatacatatcgcggcccagctttgcgtctctcgatcgtctgaatgaacgtgaccgccatgatgcgtagacaccgctagcaacgacggaaagtgatctacctacggacagcttcctacgactttttcccagcgtcctagatcttgcttttgtgagagcggctatagcgatgagaaagcgccacttgagatgagaccgtcggcggcgatcgaacagcgctagatgaaagctcatctccgctaggtttactgcctgtcgttcattcgtgcagtgattatctgcgaacttcgcgcggctacgttgccgatgctctttcctgctcactgatgttctttctgttgcgtgtctcttgccatccaacttctcgcttctggtgccattctgccatgttcaacacggagagagcttacagccgtcatcattgtatgcggtacgaagaagccgcactgtgaccatttgagtattcttgccgcagagtcgggctgcgcccttgcgaacaaatgccagcaagatccagtcagaatgttcatgacagacttgatattcctaggggagtcaaaaaagggtggagggattcttgttgttttcctgtgtgtcgcactttgggcgtcgacagccggagtcacgcgttggagtcgccttgtcctttcccattaaaggagctcagaagaggcgtgatatacaactaagtagactgcaagtagacatgttgtcgcacctggtcgctcttgtgcatgcgttttctaggtctgctgccctgctgcggccagttgtgccgtctcgctgtgtttcgtggtttttctcgcttttttctggattgcgatgccgtcttgtcgatcgattctgctctggataaacaggacgggcaatagtgaagtaacgggctgcaccctgtctactgcccgtagtggcgtggaacacactgcgcttcctactatgctattttttcttcaattggacatggagcagaaagaagaaagtagcgagtctgtacgtttggtatcctgcaggacacactcgtctacacaattcatttacttttcgtttccgagtccgactcgttttttgagctcttgctgcaaaataaagggtctctggcttgccggaagaaacaccaacacagagcagcaggaatcttttcagagcagtgaaagttaaagtagatcttgggagcatatcgtcaagtagcaaaacagtaggttcatcgattttatctctggaaggtaaccgtcgactctcctgaaaccacacagcgctccaggggtagagtatcctgtagacgcagacactcacgatctaaaccagcaatcctgtgctttctccatcctcctcaggaaaaacggaggagacgggcgaaaatgtaattcttttcatcgaaataatcgaagtcagcaggccttttttcagcgcctaaaaccccactttactagcaacgctagcgctactgtcaactggatatttgcccggcgtcgagctctacggttgccctgctcgcaccaccggagaattcagatcatcttgcgatacttagtggcttcactgcacctttgctcttttgaagggaaacaaatggaaacgaagtgctcaaaggaagccgacatcagagatctgcgatgctgtgtggagtcttccttggagcggggcagctacatgcgggctactcctacgattgaccgttccgtttgtgggttctttccgactgatccttttctttctgaaagccccgaggaaacaaaaaaatacgctgacagtactcagaacgggaaatcgtgcttgtcgacggaagaacgctaccggctgacaggtatacgttgctacctgccctttatagacttccctctatttacggcagtcagtggcttcagacagtaattcttttgtaagtcatcctaaagacgagcagaacagaatttcaagacgtcctttcctcttggagcttagctgtgggtcactctcgaccgaccgtgcgacacacagaacgcccgcctttcgggggttttcttgaaagacggacgcatgcgctcggtgtcgacagtttctctctttgaacgagggatgtttatgaagtttcgccttcggtttcctcgcacgtctccgttcttcagctgtctcgtttttcacttgaactcttcacgcgcttctgtctcaacgggtgtcttcgttttgtccgttctgccccaaagcgcctgcttagctgacggtgctcatcgcagacgggaagaagttcgagcttgtcgacttcagagggtttcaattcagagtatgcagcattctacttgaaagtgtttctgcttttaggcgccacggattcctgcgttttcgtctttctctttttctcgggtggcttttgcgacttcttcaccgccgtggcgcgtgccgacttttccgtctccgtttttccaggagctttttgctgaatgaacacaacgccacatggccggttatttcttagagacgaactgtacgaccagcctgtgttttatgtatgtcgtttcagcagtcttcttcaggctagacgccatcagatattcgtcgaagtctccgtcattcattagactgcatgcagtcgacacgggcgtttcccgcgtcgattttccgtgtttttgttgaaattagaaggaaaaaccttttaattcgacgaccgttttttctcatgttcgattttcccttgtccaccgtaacaaagaaagccatctcgtcgctttcctctgtaaacagaagaccatggcagactccccggtgagacgttgacgccgagcgtctcgtctttgctcctgtctcaggtttccggtttctccccggtcttttctttttgactgtaaagactccaacagtacgcaccctttccgcttcgatcgttgagacgcatgttttcgctgtcccccgtagacggtgaactcggtgttttttctacgcaggtttccggactctccgttggttctcggcttcttccctttgccgacagagtccatcgctgaacgcagcgattaacgtcttggtaccaccggttcttggcagttcggaagccgtttcttcaaaagttacactcgatatctttcaggaacttggaacttaccgcttcgtttttcccttctgggtctgctcctacctactcaccgtccgacattccagtaaatgttttgcttcaataatctgacgattcgagcgtctgtgagtctcgacgcaccctgttttctccgtcactgggggtcagactctcgtttccctttattcctttttcgtaaaccacacgcttgagaaa

SEQ ID NO: 1207 - DNA, 2620 bp, Toxoplasma gondii
  source 1..2620: mol_type = genomic DNA
aaactgacgtcatccattcaccagctgaacaatggccgaaaaggtcgctttccctgtaaaaaatcagggttttctcaattacttgtccaattttgtagtcatcagaaggactctccccgtcgattatggagcgtgatatgaagggtgatggagctgactgatttatcaccgtgagattcgatactttgcagttctgaatctctggtgcgcgttaacgtttccactttaaaaagaacaagccagctatcgactgtgtggtcaacacgcggacacaccactagagacgcatgctgtataacaaaagtgaatcttcacacttacgtacatcacactgtcttacgtacaagatacttactattttaagctatagtggaagatcctgcaaggcggtagaaaatgttggtctaggcggcgcggtgaggaggtctccaagaacaagcgaaggctattgcgagaagacgggaatcatggcaacaccccgatgtggccagctgcggtagacttatgtcttgctagaaaagcgactcaacctcctggtgaacactgccgtttgcagtgaggttcgcataaaagtacattgtcgtttaccaacagctttgagacgcagtgaattcagtatagggttacagaggttgttttacaggttgtctggtttgtccttgcagtctgttgcttgagtgacagtaacctgccccgcctcatgtgtcatcggaaggcttcatcaacgagtttcactgctttgaggttttgtttgtttccgcgaccacgctcccccttcacggcgaacgcttatcttttcagcacattcttctgcagacatagatgaagtctcaaagccgccgtcgacaatgacagaaggatgtcccaacgctgaaccgatcttgtctgccagacggttcttttcgtcgtggagttgatgagtcagtcctgcaattaggtgtggaccctcctccttcctgccactgtgtcagaatgcggttagcgcggtgcgaaaatgacatgaagttcggcattatcatgcataatgcatgtatgcagaatctctaaagttctgagtcgcctaccattcttcagtttcagatgatgattattcggagcagttgacatccttggagggcggacctctgtaacaagcgccaagccttttttttcttgccgccgttgcctgaggcgttgtcgaactcgaaacgcgctgtttttagcagtagtcacagacctggctgtttcggtggaaagtgtatcttctggatgtttgatactgacaaaggcaaaaatgcattcgtaacttagcattgcatcggactcttctggttctgcagctatacaaagatacggtctttctgctgccctcttccctggtaaaagaagaatccaactcctagtacgacggtactcatcagactagcatctgagtagtagttttctctcggaccagtaacaccagtgtggacattgcgtcgcagagtgacagaatgacccaggggcaaggcacaacactcgagaacgcttcaactgacgcaaggcgggtccccgctcagtgtgaaaagctcccatcacatggagatggtttcccgtgctaacacgcaataagttgttaactgaagctgctgctgtgccacgaaccaacgaccactcatagcgcggcacgctgttgacaacatatcgattgatatgtaaacgagtattagtgctcctgttccgagcagctgcgacttgatgggttcgaactgagagtactccactcgcttctcatggtgtcacgtcgctcgactgctaccttacacgctagccaaaaggtgtgcggcacctaactaaaaccattggctacagaattgtcgtctgttgcaagcgtcaagttcaccatcgatctctgcaccgacaatggcagtttttgccggcaaaaatccaaactccagcgatgggccaccgctcactcttttgtgccctcatgtgtggtaggcaacatgtcttggatctgccaacccactaaaggagtgaagcgcgacttcgcgttcggcggcagtgaaaatccgtcctagcaacgcggtaatgggccagaaaactatcgtgaatgccacttcctgacatcgaaatctcttcttgggttgctgtggcgaacagcacagtcgttcaccgtgtcactgacatggtaaggagggtggtctatcaggcagtggtatcgcggcggttcggccttcgtatagaagcagggggggcacgggacggttcaccagctggctgtcgctccacgttgccgtcctatctcatccgggacagcgttgtgtagcttgcgtcccagtcgcacacactgaccgctgtgacccgcggcttctcgccagaaaatgcactggagaacgtcgggtagccgattgccaccttgaccggtgaacacagttggatcgtttggcactccaaagaccaataggctgtgcggcacgtatagttatagccgtagatccgattttctccgtggtttgcggattctgtttacatgacaccgttcgacggtttcgtgggaaacaagtgcatcatattctcccgctttgacgccagcgtccgtgcagctgtcttactcaggggtttttttggcgctgcagcgcacacccggaagaaacgaaaa

SEQ ID NO: 1208 - DNA, 1561 bp, Toxoplasma gondii
  source 1..1561: mol_type = genomic DNA
ctctaggaatcatcatgcagagcgagactcacggatgccgcccgactcgctccggcacaactctctggaacaacaaccgttgtcactgatttagaagcgaacgcgctttcctgaatctgcataactcaaatcgaggaggagcaagaggctccagttgtttgaatagcgctccggaactgcgttcgcttcactctgagtaaacgattgacctggtcctcgcgtttcaaagcaagagcttctggggagatggaagcgaccatcgagaagcggaactctaaatttactccgagagaaaacagatcccttgcatcagtgtgttctttcctgtggtccgttctgaaggagcaccgcggaacgctcagagcctgagcaaaacaaaaacagttcatgcgattcagtgtagacgccttgacctgcgcccacggctcgctggaaacaccggagaacagtcaatccggaagaaagacagacgagatgagaaaacggcggaggaacggagggccttcaagagtcagacgaagaaaagcaaaggaagctgacagagctcgacgagacagggggtctcaatagagagacctaatacggcacagcaagagagaaattgagataacatgggagaacaaagagtggagaacaggacgtctgaaggagaagacacacgacagacagaggacggagagacgagagcagagaagaggcaaagcagcgaaaaaagaagctccgtaacttcgacaacactgaacacagagagcgcagaactgcacgccagacaaggcagacaagagagtgacgaaacagcggcgagagagcggcgagagaagaagagacgagtaaaagagaggacaatggaagatcgagaaaaaagaacatgtgaggagggagaggaaagaatctgtttcagagccacaggcaaactttgcatgcacactggctgcgcatgcaccaggggacagcagctggctactcgtttgtctcaaaaaagtcttcgcggctcctctttgaccgttcttgtcttttgtctctgtctctgtccttctcgcggttgcctctggctttttccttcctctcttttcttcgcctgtctgctttcttcgcgcttcaaggtgtctctgtctctcggctcaaagaaatattcgcgttttatcctgtgacagatgccggggagccatgcgcgcgcgcgcgtctcgaacgggaacttcttgtgtcggtttttctcttttctcctggagtttttcaactgacttgtcaactagggatgcatacacactcattagtagctttcttggctcttctgcctcacttgtcgaggaacgccatgcagcagctctccccgtctcgccgtatacctgcgtctccacctcgaattatgcgcgtttcctttctgctggcgctgttgtctcttctctgtgtttcgtcctcgacggctgccgcctctccttctccttcctcttcgacttgcctttgtgcttctccttctctgcggtgtctacccgacctgagttaacgaggcgttcggttacagcttgcacagctgcatgcaagagcagagcgctatagtcga

SEQ ID NO: 1209 - DNA, 3934 bp, Toxoplasma gondii
  source 1..3934: mol_type = genomic DNA
ctttgcgccggcatcttcatgtttagcatggtcgctatgagaagtcggccgactgtccaagttaaccgtttttaagaaatggggaccgccactacccacgctttcgcaacttgcctcgactcttgctttgagtatcgagggcctcgcgtgtgtttctagagtcgattcgtcggcgaagtagccgtctggtctatttttaacagacgaaacggcgccctgggagaatcgagtggtttctcgtgaggcagcgccaaccaatacgagctcctcacgagtctgagatgcggcagggtgcgcggagagacggctgaggcatctgcagtcctgagctctcaccgatgcacgagaggcttcgagtgccaaggctcggccacttctctcaaaacatcttggtgcgacgctcttccagggaagacgaacactttgcatcttgaaacacggatgagataccttatcacacctcgcagaaaacccctccaaagacacgacccctttcacgttcccaccctcttcccctgtatccactgtaggtacgaggagtgaaaaacaggcacaaaacgcgtggcagttttaacagaaccccagcagaaacgcattccacgaataactgtcattaagaacaaactaccgtgtccttgagtgatgatgctgagaagacccattcagaatggtaccgaatagccacagtggtcggaagaaggacagcgagcgtggttgatgacacaaaagttcgcctgcagcaaccgacagaagcccgactatagaaataatgacaagacgccatcaggaaatgaacacaaaacactttcctctggtagcgcaacggtggcgcacactgcaagaagcccttaagaccggcatctcgtccaaatgcccaccaggttttatacatcaaggaactgcttgtgtgttcaggagagacaggacagaagtccacggtgacgcgacggcgatcggcagcttgcttgcctcaaatacactgtcttccgcaaccacgttgctccaaactacgcgagatgcgacactacttggtgaagttacactacgcagaatcgcaactgccacagcaattcgggaaatgttgccttctgatttaaggaaacgaccaatgctgcgtctcaacgtctctcgtacggccacacaactcatttacggaactgcacgaaaaccagggcacatgagccgcggtttttgccgaaaggaacgtgtcgaaacaaagccgtttctccaatttcatgaacagtaaatcaacactggggtcagaaacgaacatggacgaagaattttggtaattcccaaagatgcgaatgaccctcgtgaatcgacacgcatacgcaggtgcatgcttcgtgcatgcagcacacagagactagcaaggatctcggtagcatcgacctggggactcagagttatactaaaggaaaacggtgcttttacaaaatcagtgttgtgtgatagaggatcgacgctcgaataccgtctgtaggatgaaacaagagctccacccaccaatgtcgttgaggactctcgccggtctatccagctgtggacatgctgtcgagttgggttggctctgcttctgatccctcgcgttacaggctagtccttcacattcagcggttgcgcacttttgcttcattcgcatatcttccctttaatccttctggtgcactgttgacccttgttacgtgttctgcagttccgtctcatacctcaaggttgtgtggcgtaggggggtcaccacggtcccaattggcaatctgatccgtgttaccctgctggcccagctagttgtgttctttagcaacagtgtacgtcagtgcgtttcttttcgccaacgtatgtctgctgactagagagccgattctactggttgccttctcgtaggctgtagctgtgggtggaaagcgcttcgacaggattctgctgttttaccgttatgtgtcaaacactcaggggaacctcacggctttaactctgtaaaattagataacgagtgctgaatgactcctgtcaggtagatatcagcaagtgtagaactcccatgtggacgcgtggtggttcacaacagaaacaaaaggctcgctccataccagaggtaaacacatgcacggcgtggttcccttctgacatgttgtgaggccattcccgtactatttgcctcatttgccatcgccaccatctttctagtcttttgaggctgcgtgggtggtgaatgatcgtaggctttgattcactgacaatacgtgggttgcctccgcaaaggctgttgtggaagaactgtaacacagattagtataaaggaagccatcacatttaatgctattgaccagaatatggcagaacggtggcacatgcgtattccctttccaaggacaccaggcgtcatctaacgcactatgaaccccggttttaccggttggcacggttactggcggcgtggccgcctacttcattggttgtccagtgtctgcaagcaagggggatcggaaacactgttcgtgaagagtggcccagagttccggtatccagtttggtaaaacggtggtgcgcttttgccagatactttaatgtttttccggggctccgttttccatgccctcatctttgtcaaccgcattacgttgcaagccatagtttgctgtcagtagtgtcgacgtccatgcatcccgtggtgggagctctacggtgctgcagcgcagaaaacaaacttaccgtgcaagagaaaacgagcatggttcccccggtacttcgcgtggcaaatttgcaggccagtgctggtgaagtttctggcggcagatctttgatgaaccatgcgttcatgctgcctcggcgttgtcaataacccttgagatttgcccaaggttggcttcccattatgggctgactttcttaccaattagtgtcctatctgcgtgaggattgtgatcggcttcgcttcgaagcgtcagctgcgctacatggctacatcgcttccttacctgtattacaggtcaggcctcactcgacacacctcagtgttcaatcagggcattctccggtagtgaaattgatctcctgtaatgtgcgaacttctcgaacacagctaattgtccaaaggtggacgtgccggtctctgggccccgtggcacggcactgtccgtcgtaatgctgttcataactattcatcagtgtgtctttcaatacctataatctcgaaatatcgacgttccttcccgacggtgcgtcaatgaagacaagtaaaacagttaacgtcggcaactcgcgttgtatccaaaggcatgtttgggtcttgcgcacctggttgcaatgtcacatcaatttgcccgtctctaaacaagcgagcgctgattggatgcaaatgacttgcgggtgcatatgtgatggaggaactctcgttttcactgcgtacaaaggcattacacaagattggtgggggccagaaaagacgtggtaaagagaggagaatacttgaggcctccacactgacataggtgcttttagagcgccgtttgacacaccatcaacgcgcccggcgtttcttttcacacgcagcgcgatggtctcctcacaagcgcagtcgactgcgggcgcgtgctgcggagacctcgtcgttcttcgcgcggggctgtgctgtttcccaccgagacgaagttttcttctgtttgtttcaagagtcgcagtattcgccttgaactcccatccccatgcttttcctgttcatgttgccacgtggcgggccaggtcactaacacagttccaacctgtttgtctggtgcgtttcagcgttccgcaggacgcttccgtcgtttttctctacattttctcagtcgttgtgcatcaattgaatccttactcttttcgtgctccgaattgttccgttggacgtcgcgacccgttctctgtccaggccattagcttgcgaaatccgcaa

SEQ ID NO: 1210 - DNA, 3118 bp, Toxoplasma gondii
  source 1..3118: mol_type = genomic DNA
agagaagaaagacaactcgcttcgtcgcgtgctaagcgagccatgcgacggtggagcctcgacctcgcctcccgccttcctggagccgtcgaggccgtacagcctctggggtctgtgccgctcctgctcgctcaggcgctcggcgtcgtcgtccctcggactgccggaccgctagttgggctcgggcgccacagccccctgggctgtggcgcccattctctctccgcgagacacggccgcggcgaggcgacccagcggccggactcggcggaccgcagtgaagaggtcacagaccgcggctccaagagactgttctgggcttgcaggagctgggaggggctggagtgtctagtccatgcagaggaacgcgaaaactaagaggcggcgtctgtggcgctagtgtcgccaaatgcgacgggaagagcacggagacaactgactcgctgttgtgtgtgcgcgttccttcgggaattcgttgggaggctggggaggcgggggggagagggcgaggctccaccgtcgcagactttccgcgggatgagaagttccgttgtcatttcggtctgatcgggactttcaggagagactttcgagtcgggtggaacggagaagtgaagaagagcagcgtcggtggggcagcgctggagagcgaaaggtggaaaggccagaaggcgaccacgaagaccgaagaagaggggcagaacccgggggcaacgaaaaacgctcacggacgactggcaagacacagaatggagttcctgcatcaggcaggcatgggttcctcggctgcttgataacggctgcacctcttggcttccacagcgttgttcgtttctgttcgggactctccgctcgcgtggtgaggctcacacctggagtttgaggaacagaaatgcgtcgtgcagaggcgtccttcattatgagaaacgtacaagaacgcaaaagcagatatgtctggatgtcggcgggaggcaacggagacgcgaggaccgcagcgagcagctgccaagtcaaggttttttgcgcagaagcggccgagtcagttgtcactttcggaagtaaaggggagccaggatatgcaatggaaaaagacgtatttcttgcgagtctctcgagacactctgcgcacactcccgacgcatgttgacagatgtcgacacagagatagacacggcgatgtttactcagacgcttgtgccatggtactgtgtcaaagccactgacacagctgatggctgcagaggtagacacttttgtactgatacacaaatacatacatgcatacatatatgcatatatacacagaaacgaatatatttaaactggagggcgcaggcagaaatacgtatctgttggtgaacagagaggtgtaccgaagaggtgacacttccgtccgtggtggctcgtgtcggtttcgaaaagttcctctggaatctgtcctcgtgtatgcgctcgagtcgcgacggtgtttgttgcttcgctgcgtcctgaaattcccattcgcttagtctttttctgacagctctccacaccaggggaattgcctcagcttcgtctgcgtgccgagcatcacgagacgagtttgttctaaacagttcgcggtgtcctctgccgcgtttttaatccagtgctgcggatccgcgtcagaggggggtttgtttcacccttcacagctcgaagaagccacccattcgcgtttcttgtaaaaaactgtgcggggaactcctggctgctaacgctctgattttcgatttttagtgcccgctgcgatcccctaaactgcccattccacacaaaagactctggtgcccgcgacgaccagggccgccaaacgatcccccttgtgttgggcagtcccctggaggatcctttttatgcggaacgcgtccgacctgtggtgcccgggcaaaccacgaacagtgggatggcgtatttaaatacatcttgcgggggtcgtgaccagtgggggcttcaggttcgcacgaacaagcgaggacgagtgagactacactcagagagcgcgaagcttgcttgcaggctctcgtcgaactgttacgctttttataaccgtgtccgcgtggcaaacgccatagcaaagcctagcgactcttacataatttgcctccggatatggatacctctttcacagagacacccacaagaagtccttgtcaaggtctacgctttcggttcccgtacttgtctgtggtaaactgccccccaccatacattttccactgatctgtcggttgcgctattttcacatgattcacacgtatatccttttcctttcttcacggttgcgtccgggcaacctttgctcgacagtgtaacgcgctgctcagccagccgtaggcgcgacgctagacagaagcactggtatcgaacgatcttcagctgcgttagcaggctctgtctactctgactcatggaaggtgtcctatgcactgacgcagcacgctgcttgtcttttcgaattcagatgcgtcacctatgtctgtcgtctcgcatcgggagctcaaccagcgctgactctccactcgatccgttgttgacaccgctataaacgcctgtagagcgtcccgtcgaaaatgatagaacgacacgcgaccggcctgtgacactgacgtcagctcgaaaacccgcggttttcggttcgcacgccgaagctcgtgtggaaacgcgtcatcacgatgccgccgcggcggttcaggtatttcccggcacttcgttttgcgcgtctccattcgcagatcgcagtcatgtatcggaaaggaagtcgaacacagatcatttagcagccgggtaaacgcctctcgatgttcgcggcaaacgcgtctcttttattaagagccaagcaacgttgcacggtgaccctccaatcggcatcagcgcgtctcaatagcgtgttcgacgaggtgacagttcgttccggatttgcacggttgtttgaagaacacaggtaacgcaaactccgctgttcagagctgcaacgtttgccgacgaacaccgctgtctgctttttcggcttcttcgaggctgtccccgccgcagttactctaccggtgaaggcacgtgacgagaggacccagttctgtgggccgtggaagcccggaaa

SEQ ID NO: 1211 - DNA, 2935 bp, Toxoplasma gondii
  source 1..2935: mol_type = genomic DNA
atcagaagggagaagtacaaacagtgacaacaaactctcggcggtttcgctcgcccagacatcctggagaggaactgcggagcgtgagttctgcatgtctgtcgaaagcttctctccttctgaggaccggggggaaagtcgtctcaggggacgcgagagaggacaggcgagttttttttctgcttccagtgcgaagagcctgcgtcctcagcgtcgaccgactgagatccgcgagtctcatagagtccatgcctagatgcttatcaacaccgggagagcacaggcgtctcctcagagagggacagagagaagcaaagggtgtgccgtagcgcgtaccgacgaggacaacttgagagtagccgccgatcatcaccgcgaggtagacgatttggacgatcggattgttggtgtgaaagacgtagaagcaagcgcgctcgacgccccgacggacgcgagtcccgcagacgcgctcgagcaagtggaggaagcgcgcgggcagcgcgagaaagacgactcggtgtaaagtcgagaagggggaggagccgtcgggcgtcgagaaaaaccacagcagcgccagacagacgagaagcaaaagaaacacacacgcgccgagaagaaacattgtgcaaacgaacgatggagcgaagaagagagagaagagagagaagaaagagaagagagacagacaggagagagggagaagaagagagagaagagagtgaagaaagagaagagagacagacaggagagagggagaagaagagagagaagagagtgaagagagacagacaggagagagggagaagaagagagagaacagagagaagagagtgaagagagacagacaggagagagggagaagaagagagagaagagagtgaagagagacagacaggagagagggagaagaagagaaagaagagagagaagcagggaaaggagatggggacggcgacggcgtccgaaggtgacgagaggaagacgacgaggaaaggacgaagcagtgaagaactgtttccgggagaggctccgcctgagattcgcctctcaaggaaaagatttacatttgttcgcacttttgtttcctcgcaggacccccgggtcactgcggtttctttccaccttcagcgcgtcgtctgactcaggcgccctccttctcatctgttttttttctctctccttgacctctgcttgatcttcgtccagctgactgctgcgtgtcttcttcctcccgtcgctcttgtttttctgagagagacggcgggagggagacaggcgcggagggagagagagacctggagtcctcgagactggaggaaccaggcgaaacgagccgcaaggaagttccatacaggtgagggccggacgacctcactgaagagatgaaagaagagagggaacagagaacagacggggtaggagaaggatcgagagtcgacgccgctgcacacaccgcgagatggagatcacgcaggggcgtttctgcgaggttttcagggcagtgacgcgcttccacgcgcgagaagctcaagacgctgctctacgtcttccaccagtgtttatcgacaacaacaaagaacgaggaagacgcgagaaacgcaggaggtagagaagctagcgcagaagaccagaagaaaagatgcacggagaccaacgggcggtcgcacaccgaaaaccagaagatctcgcggtgcccttgacagccggcctaaagttcaaaaaacggtttcggtggtctctgggtgtcgatgttctctcggagtttcgcgagaagaaagttgcttttgtagaaacacagaacagcgcgtctcgtatgtctacaaaacaatgcgcgctgaagcgtctctcgaaagctcttcctcgcgcctttggttgtgcgctcaggcagaatggggaaaagatcggaaaatgcgtttttctccatgtgctaaagcaacagtttgaagaaatttgacaacgcagaggacgaaaccaatccgtttagggaacgcagtgtggcgtctaggattttcggcggcgccgtcttctcctccagccgtcggaaatccttttctgttcctcgttgcccatatctgctctcgcctttgcgtggaacctgaggttcttctttctgcgacgttgtgtgcgtccagtgcccttttttctctttctttcctttgtgcatgcgtcttcggctctgttttctcttgcgtttctgtctctcatcctttctagggagagagacaggtgcagagttcctccccggtgaccctcgcggagaggaggcgtctcgcgccgagagagatcgcgtgtcacatgaaaaagactccttcgctctcagacctttttgaagggagaaggaaaactccaactcgcgttctacgccgtcgcgctccggtcccctccccacctccccctcgcggtgtctttctctttttttctcccattctgttgcccgcgagcaggattggcgccgtcactctctgtcagttcttgtcttctttctagaagaggaacgacgcgtgtgtgtcaggaaagaggcaggcgcttttctcgtctcttctctgtttcgcaggcagccgctctctctcgtcggtcatcctcttctcacaagaagcttctctgaagaacatcggcattgcttctcgcctgtgtctccgcggctttttgcggcatcctgccttctcgcctcgccatccctgcaaaaaagagcctctgctctcaacctttcttcttttccactggtgccctgtgcgtctctcgccgcgttcctccaaacctttggcaaacttcagcttccttggcgatctccccaccgctccctttttgtcaaccgaccgtcttctcctcgccgagttcctcttctctcgttccgtctctcttctcttctctctcctctgccgctgcgccgcttgctgacgcgaccgtctctcgtcccccgcgcttcctgccacca

SEQ ID NO: 1212 - DNA, 2692 bp, Toxoplasma gondii
  source 1..2692: mol_type = genomic DNA
atgtacatgatgcacacagctgcgaacagatacctgtgaggatacctgtgtgtagaactgggtacgactagacgcagttggaaggttgagatcgggagacatcgagagcgggtgacatggtggctgactttgagcaccggatgcttaacgcccgtggacgggaaatctgatcttcgaggtcggagattctccgcggtactgtcggtcctcggtggtcagagtaaaagaggaccgcagtcaatttcactgtaagtttcaagctttgcttgaaaaagtttagctccgagtctctcacgtttttcgtatttgagtttgtttcgtttggcaaactcgagtggcctttggaaaagccgtccgcagttcaaaactcgagtcccgggccttgcaggtcttttctttgtgtttgccttggatatgtgtatcgattcgaacgcgcaacttttctaattgcacccgtgcgcacaagttattggttgccaccggcgaacaggaagcggtggtactcagttgttgaggtgagttcggagcttacgagctcaatgaaacgcgagagtttgcgttgaatgtgtactggaaattgattttgcatctgtacgcgtttgagaggacaatccagatgatgctctcccttgaacaatatgtggttttgcttcagacaagctcacaagcaggggaaaactccagaagtgtgattttagcaggagaaacactgtcgcttttcacttttgctgcttgatcggataagcaatgctaccgtccatcgtttacgcgtctctagagaaaccggatctgcggatcggtgaacctccgatgataatcactctccgggtccgtagaaacaatcgcaaccctgaaactcagcttcgttctgcactatcgaagcagggaactgtgtgcacttctgaagcgatgagaagtcacagacccttctgtgtgtttcgcgggatgcctcgcgtggcgagaccaggtaaacttcccgaaaaaaagagatgtctggtgcttctcctgtggccagaagcgtctttctgaagcaagagctgtcgtttttcctgaagttctcccgacctcagccgtttctcaacggtgagagaagcgcgcgacgggctttgccacttactacaaaatggtcctcgaagttgacggtcatgccttttctatgcaagcgaaactggcgtaatttcggaggaagtgcgtcgagtcggctctacccggggatgggcaggaacgtcgaacacgggggcaagaccgaataaatcaaatatgcatatatatatatatatatatgcacgataatcataccatctgtccccctttctctgtctccgataacgaagcatctatcctagcttgcaagtatgtacgctgatcttatccatcctgcgatccaaccactcgtcacctaccaatatcatggcaaatgcgatgcgctggatgcgctgccttcgttgttggcagtgtcttgcaagctgggaggagcgatggcgtagagggggggcgttctgaagagaagcttctacggaaagacagaaatatgaggaatggaaaagacaagggaggggaaagagtaaaaagagctgcataaagatgacgcgttgtttgattctcatttccacgtcgcgctcgcactattcccgacctccttctcggctcctttccttctccagttgcatgcacaacctcgctacttcacttttctctcgtttcggaaaaaaggcttgcattgactggcgtgtcactctctctcctcgacattgttttatgcgcagagacgtcgtcttttttccaggcacagacgtggatgcagttccagcggggttttcagtgttttcttcttcctcacgtctctgtggtgtcattgatttttctctgtctcgcgctgtgtttccttcctctctctctctctctctctcgtttttttctctccgtccttagctcttcccccctctccctttatccttgtctctctcctcgtcgttctctcctcttcgccgacggccgtcgctccctcctttcctgcgtcgcgcctctctgccgtcctccctttcgaagccgtcctcaactacctcagccagttcagccaccagcgtggagcgtcgtcgctctctgtcgctccggtgaaagaagagagcctgatgttctttccttggttcccttcctgtgccgtatccagttccttcgattgcccgtagacccccgagcacaccttggctcatgtggacaggagggatctacctcgctcctccttcccttctctctgtgtctgtgctgaggctcgaagtcaacggcctgtctcctcgcttctcccgcatttgcttcaggcccaatgggtgtctgcagccctgttgtcgaggttttctgcggcgacggtccgagacacagcacccagagaaaagcctctgagggccttcgactaccctccccggttccgcaagtgtgtcggcttcctccacattcttgcctcttctcagcttgacgctttctcttcgtcctcgccttcccctgcttcgtctgaaaaaaaagcgagagcctgtctcctctcgtggcttcgagcgccgctcggcggggcgcagatgtgagagtcagcgtagaacgcgggcgtttgcttccccgagagtccggagcttccccgcggccgcgttcgtttgtcctttcttcactgtcctctgtctccaggctctcttagccggtcgca

SEQ ID NO: 1213 - DNA, 1742 bp, Toxoplasma gondii
  source 1..1742: mol_type = genomic DNA
gaccgcagcagcgacaacatgcttttaaggaaacctgactagttcagtttgaatgagacacgggcgcgtgcaatcgagtacgagcttgtgttttcgggggttacctcgtccagttgactggaactgaatcggttttcggcggctggcagtatcatgcaggtagaagtattctcgatgcatacgcgatgtttacagagacctaatgccagcgacatccgtatttaaacaaagactgacgctggtagcaaaggcccggaagtagatctcgcgagagtaacgctggtagacggcatttcctcgcctgtttctgctaatgcctacattccatttggtgatccgctttcattcgcatcggaagctgtccggtttccgatgccgtccctctaaggatgatccgaaaacctccaagaaaagcctgaccgttacgacaatacttagaaaagtgaagaatacccaggaagctgtatcaaactatacaggcttacaaacggcgttgggtgcacgttcgcgctacttcaactggtagacacgtgaaaggatctcgagggtttgtctcccaatgtcttagggcagagagttgtcattcagcagggggttacgccttttcagcatgccgcctgatacacagattttaaactgtgagattctttatagaagcacgtctccattaaagaagcattcgcaggagtcccaatgagtactcaattattccatattcgcgtcttaccttttccagtatatatgtatatatatacacacatatttatatatacgtgtataatcggaagacatcacaaacaagcacaccaaaagttatccacgcctcaggacatctcataagcatgaaacattgagcaaaggtgactgcaaagatattttcgattcaatatgttgcagcgtagtttgatggttttccaccacattgaacgactgctttatcttgacgtaggcggggcagtgtcgaagctatagcatgctgaatacctttcatgcacgtctcgcaccactctcgcctgctcgaaggaaaaaaatatgtgaaatggagtgtttcctcttcaaccacgaatgtgttttttctggctcgagagaattatagtgaaacggaacaacgatgttgcttctctcagggtcatcgtgcatgctcctcaatcatgctagattgcatgctttagataaggagttctccgccctccgtcgcagtttccacttcatccttgagtgggatcttggctttctgtttcttatcttcaagatttttttctgagatatagaggggaaccggagcagagacgtttttcagaggtggccaggccactgtgctaccgcggtcaacggaactacgaataacagaaaaggagattttcatcccaattcatgaggacttgttgactccaaatgtgcttgcgagtacctattcaaaaaaaaacgtttcttttattgcggaatcagaaacacgtctacgccggaccatttgtcgccgaaattctgattatgcaagggcgctgccagcgtttccataccacaaagtggaacaggcgttggaaaatccaagaaagaagtgttgcgtccgaagcgcttggagtttgtcccgattgccagtttttatttatacttcgacattgaagagctgattgcaattgatcgttttaagtagagtagcttatgcgacgatgctcttgtgatccccgtgaccccgttagcgcctaggtgttcccctccttccgtcccgccgatcttcttca

SEQ ID NO: 1214 - DNA, 3165 bp, Toxoplasma gondii
  source 1..3165: mol_type = genomic DNA
ttttccacgccgttttccgcctttccacgagggttgtcttgtcaaccatttgggctgtgcctttgtttccctttttttcactctgtgtgtctgagtgtgcgtgtctcttgcgtgaagggtacgaagacgcacaagatgactggtgtatgtttgtagacgctgatctccagacgtctgagcgtaggtgtatgtctgtagagatgtaaacgtgagatgtatacatttctgcatatctgtagagtgccacaaatgcagccggtggcaaggaacggaggccaaggtctatgttcggcgcaagtcgcctccgtgtgaagtctcagcttttgagacaaaacggttcgacgcctccttccccagcaaagtggtgtcgggcctcgagtccctcactgtcgattttgagaaggcaaaaaaacatcgcaaatgaagccaagttttctcacctaaaacctcgaagccatgtccgcaaagatgcggcgcgcgagcttgcatcgcccagaaacgcaaagcacagtcgccgatttgttcttgctgctttgtagctcctctgtctggtcagcacctttctaagagggaaggtcggcggtcatcctgttttgacagtcaagcggagtcgatacttgacgtttcctgtccattcgtccaagctagagtgcccacaaagcttttccttgcctcccagaaacacgttccccagagaaatgcctcgcaaagacggccgttcacactttcaaccggggccgtgggaaaatgccgagtcggcacgatccgttggtgaaaaatggttctctgctccagttgccggacccatcaagcggaccgtccagagcaaatagcagatcccaagccatcgtgaggaatgcgtatatcctgtttgcacgatgaatgcgtcgtaaggcaacaacgccaatgctcacttcaacaacactttgttgcgaagaacaattgcagaatcataagtctcacagaagccttaaatagcggatggaaacaggaatacaggcgacacacaaatgaaaacagatctagaaacagtttcttcactcgatgtgcagcgcttctcaatgccgcggtccgacttcaaaacagaggagaacgtgattattctctgtttccctgccgaagggataagagtaaagcagttttgtgagaattatagacagcacattgttttttcgggcgttgcatccttcatgagaagtctgtctatcgcatcgagtctacgggtatcaagcgtattttccagaaactgccatttgcgggcgagaattacattgtgaacttcagtctggtagtccccctgctgatgtacatccatacggaatgcaccgttcggattactgttgaccgacctcgtgttgagggcccaggttatatacaccatacctctacagtgaactattagaatctggacctagaaagtcccgacgcgtcttgcaactttgcgccttttatttgtggataacctgaacgtttttagaatgtagccgctacttggaactgggtgacctcacgatatgctagaaaataccaatcaggtacgatatgaagtggcgttgcgaaccaattgtctggcagtgagttacgtgggtgttctagttccatcaaactagaagccgtttgtacatttctgctcccagtgttgttcctattagcaagaggatagaatttttgatgacgtgagagaactgtctgcaggacagtgcgatagcgaaggtccacacatgtttgagcaaactcctaaggtgctcgaagtgcgaagatttctccttctgcgtgactggagcagctgaggtgtcgaagaccactggaattttaccgacacaaaatcgatgtgaagagctgcgggcaaggaacgatctccgcgatcatgactaacaacccctagcgccagtcattacgcggtacattccagctgcctagttgaacgttctgcgtgccgaggcgccagactggttccttcgaggacctgcggttgctggtatcagtcgcgttctagttctgttgacttccttgtgatatgtgtttttagggtatcttctacaggaggtagacacttcatttctatgttgttcggtctctcacatctcgatttgcaggcctagtggtttcagcgtctcgcctctatttcagtccgcagaggaagcgatggcaacgccgctcacagagacaagcgcttcgttttgttccccgcattcttaaatcatccagcgtcaatcccattcccactgtaccgctattaacctgcaaagcgtgtctgactgtaaagcatctgtaacctgtgcctcaaaacgtgtcaccttgtggacgacaacgtggtgcgttgcggattcagttaatagcgggttgttggtcgcatcaaaggttcgtccttctttttgatacactatggcatttccacagatcccctctttgttgcaatattacaagataaaccctcatgaacacgacctcgtctgctttctgacagtactcgaacatcggcaacagcacacctttgccatgctcaagtgcccttgtcggcagcaaatgggatactgaagttggttcaacgcacttcgaagaattcatttaccctagcgatgtgagacaagaagttgtaaggagcctttgcctgcaacggctgcataaattctgcggaacacgaatagtggagagaagtaagtgagtgcagatcaagccgggataagaaagcctgaacatgcccgtgagaacaaggggatatgtgctggagagtgaactcactgcgtgccgaggaactacgaggtccctgacaaaaaagtcgtccccgaagctggaaaatgtgcaaagaaggcctggtggctcaagagggggggcactgcatccagctctgcccgtcagatgccaagaggaagactgacttggatgtcagtgacggtcaaacaatgttcatccccgcgtggtcggttttcagaaagcttttttctcctcgaaagaacccgaggcaatagctctgctccttctgctgtgctccatgtgatactgaggcaccccgatttcgagtcgagaacgttggtgcgagccacgagggtagggtgaaatttgcgtggctgtcgttttttctgaaattgactcgtggtcctccgttttcggaggttcttcctgcgtggaagctttttcttctgaaagaaattgctcagaactcga

SEQ ID NO: 1215 - DNA, 2572 bp, Toxoplasma gondii
  source 1..2572: mol_type = genomic DNA
ctatcctaatctgtgctgacgctactgctgcctacgagcggctcttgtttgttgccaaaatctaatcaatttggataggcatgatttgtgccgtttccattggccttttcgatacgatatacctccaattacaaactaacactgcagagcagaaagctatgtctcacagatgattgtagcgtttttctgttcgaggcttccactagtgccttgcagaaacctttagactgctagaacagattctccaaggggagccttttcgtccactcaacatttccatttacttcgatgtgccgaatgcaaactcagctaatctgcaccacgaaataaacgcccaaacagtaatcatgcagacaccgttggtcgacgtgactcaaacgaatgatgagcagccgtctcaaaattgaattgacaagacagtacgtccttgagaaataaagcaagtcctgacgagtttattcctgatggctgcttgccaatgcaaaagacccatggctacggccactcaggtagcgaagactatcgaaacaaaatgcataatccgtttttcagactcattccaaaatggatgcttccggaatcatgcgaatatgctttgtttcatgacgcagtgttatcagtttcttatggtaagaaccgtcttacacataatcgcgcgaaaactcagaaacagtgcagccaggcaaacgacaacatgagtggcgtcattaaaagcaggagagcaaatctggctgagctgctgtacacatacctttgacaaatgcagataatgatgacctacgaagaggcagacttcaaatggtggaggcaaaagggagaatggcaccaaccagacaccagcaaaacaaaactgtacgtcttttctagaacagaaaatttgacttctatcgtagatcccggtggaagctcgaacgcacgatgacaactgaagcgtgaaccagaatacagaggcaccggtgatgacgcagacacactccggcaaataaaataaaggtaaattcggagaagcctacgcactttgccgaattcactgactaccattacgttgtctgcttgagggtgtagacggtctctggtcgttagcacggtcgacatgaggaataaaccgaaaaattcttgcatgacagagaacggtgcgagttccgggggtgatagagctgtttttctttcaaccgaactgtaccgcgacagcacatgcgggacccacgggagttcccctcgaatatatccagctgaccttagcagttaacttgtcgaacgccaaggaacaacctagtttgttaccgtatgcacacgtcttctgtgaacttgaaaggtaggcactgatactgatgacgccgcaacctaagcaacgtggcatttgtcgaagctcctagaccctgtgaaactcaagctgtgatagcatcggcttcttagtgaaatagcaaattcgcaaacctaaaaattcgttggtgatccctctgtagatgcttcgttcgcatcggtaagcaacttgagaagactgccagagcgctgcacacattggagccatctgcgcatctacccccatcaatcaggacaacgtaaagaactcgttccatctggaagtggatttcttgtttggcagacagtcatatttatgcgataattgaaggtttatggtttaacaccccccttgtccccctccaccacccctcccccgcagcccgcccaatgttgccacatgcaaattttcctgtccgtgtaccctcggacagcgtcgacgacttcttgggacgacgagggacctgttcggtgcatcgattgttgtgttggcactcgggacagttcagctagcgacaagactctggacaagtggtaaatttagatagactagcggcatgtgatgcggggaaaattcttcgctgaattctgcgaagaacaaagaatcagacgcgttttacctttaattggcatgcaggcttgtgcatgtttctggtgcctgctgtgagagattacaacgatctgcttgttgcgctgaggcacgcccttcgcacacgctaggctacaaaatacggcgtctctgcgtgagaaaatgtccacaggtatttttttgactgcgaacactcgaatctaacgacaggcgttttttgcgcggttcggcttgcaaatctatggtgtatgacaacggcaggcaggttaggcacatgatacgctagcgacgtcctcgtttatccttgccgcactgccaccgctcagaacatgacaaaatcggctttgtcactgttcatagagacttgaagtggctgcgtgtcacttttgtcttaaataacaaattcacagcgggtgtggctatgtagactggtacggtttttgatttgtgggcaagtattgaaggcaagcccccccagaagttcttccccgtggcccaggagagtccccaagtctcgcgggaaggggaagagtttattagatccgtgaacactagttgattcctcgttagttctgtcaagtccggttgcccgagctgctcccggacatgccgcaggttgggtgttaccatcctcatcttccgctcgggcggctttcggacaggggcggaaacacggcatta

SEQ ID NO: 1216 - DNA, 2854 bp, Toxoplasma gondii
  source 1..2854: mol_type = genomic DNA
aaggtgacgaattccttgccgtttgtcgtcgtgacaagttggatttttttcttctccatcaatttgacgacaatgtcgacgcatgcgcgctccgaaagcatctgcgtcggcgccgcctcctggacagccatgaactgcctctgcagttcctcgagcgacaccatcttggagaagaagagagaaaaggaagagatggctggaaagacaacgaaaacggatttagcgcaggagacgcagcggcgcggagaacgagacacgaatgaatcgatgcggagtcgcgcgaaaagtgaagattattgcttgaaaagcggagaagagaagtgagagcaaagagaagagaggaagcagacgagagagggatacgcgagaaaatccgatggacagaagaaagtgacaaaagaacagagagaagagagaagaagcagaggagcagagaagaaagacgagaagcgacagaaggatggagaagagacaaagaaatgcatgaaggggagacagatacagaaaagaagagtaaacagcggggacccgtcggaagctcagaggaaaagagaagaaaccaacacgcgagaactggggaagacaagagaccgcctcggagctggcaggggactggtcgtggagtctttcgaacttcttcctcgcgagtaaaaatcacggagaaacaagacaaagaaagaaggagacgaatcgcgctgcctctcccggactggcggaagagggggctcgcggggacggcgaagacgacactggggagacgaaggaaaagttcttctttcacaggacaggcgaaagaagtgaacaccagagtgttcttgggggaaaccgcaagaagagagaaaagagagaggagaacgagaagagcgaaacgaagaacaaggcaaaagacggtagcggcgagagagtttttcgtgtgcaggaaaacccaggccgcaaagaaacgacggtgcaccttcctgtttctaagcgaacagaaaaagagaaagagcgcgtcgagaggaactgatgctcgggtgtatgtacactcgtttttctcgcgttcgaaaacgaagctgcgcttcttcgctggctgacgcaaagaagaacgaagtttcttttatctgcttcgcgcgagtcagccagagtcgtcgcccctgtctcgttcgttccactcaaacagcacagaggtggactgggagaaacaacagcctcttccatggaaacggaagccggatgcatcgttctgaactaaagtaaatactcactgcaactcctccctcctcagctcgctttctcgtctcgcagcgcacacagcagccgagccccgcgttcctcaccgacgcttcaaagagtggcttcttgtccctctcctccagataaaagagcgtttccggaactctccctgcatcatctgtttctgctctacgcaacttctccgtggctgtctgcttctctcgcgacgacctgcagagaggccggtgtttcctgtcgccttcccgtctgtgccgcctcggctgttggtttcctgtcggtctgcgcgttcgccggcaagacatcacagtgctcgtttgtccaggccgcccgacctgcgcctttctcgtccagagcttttcggactgagtgaccgagctcagtcacggatgaaggaactgagagtcttggggaagttcgccgcttggaaatccagagttttcagagagcatcgacgccgtatgtggctggaggcctcgcgctgtcgtcgctcgcggaactcgcgcgcgtttcgcgcgggcggagctgccgggtcatgcgggcgttcttggtggggaatcgtcatttgttgcgggtcctctttcgcttttctcgacaagggaggcgacgaagtcttcgataaaagtacaagcggacggctacggtgaaaaccgagaaaaaacgcgcaaaacgcgcaccaaagcgactcgacaacttcgcctctggacgacgcagcgagctggcgctcagctgtctgtacacccgagagttgaggcgctcggacgtttgctaaaacacccgcgagcgttttctgtgtctgtgtgtggcattttaatgcgcgtctttttctgtaattcgcgttttcttttcctcgcgtccacttcgtcctctcctcaacaggggactccgtccaacttcctccgcgcctcctctgccgcggtttcccggacaggcagccactcgaagagagggtgtctcgcgcatccgaggcaacggggacctacctcgcgcgtcaagagccagtaaaacgcactctttttcctttcgcttcacggaaaagcggactggagtccgtctgtttttctgcgaagtttttcctgttggcgtacctctccttttgcagtcttttccctctggggcctcggccagccgtacatggcgcgtccacgcgacgaagactggcaaccgacaggtcgagttctgcatcttgagacttgttgacgttcaccgagcttctgttgaggagactttgagcttctgctcaaaagtcagctgctcgacacctccgcgtcgcctcccggcgttgccgccccgcgcggcgtctgccgccgcttcgtcgtatctttctcgtcacaggatccttggcctcgttctccgttttccgcgtgcttctcctctttttcgttcccttctttctctctcttgacctcgcgactgtcgcccactttggtcgcgctcaccctccccaaccactctcgtttttctcgccgttacgccttcttcgctttcctctcttctgacgcgatcaggctcctacggggctgttgtgttcctgcgcttcccgctgctctcccttctttgtctcggccttctgcgtcgctgacttcctccgagttttcttcttcggactgctcaagctccagca

SEQ ID NO: 1217 - DNA, 2118 bp, Toxoplasma gondii
  source 1..2118: mol_type = genomic DNA
cttcctcggcttggttattctccgtctctccttgcagagcgaagacggcaagcgcctgtctcgcactctcgggaaggcggtgctcccatcgcgcctgcagaggaacggcggccgcgataccgtctcggaagcgtccttctttctcctcagcttccgcctcttcttctgcctcacttggcgcgtccggaacttctgcggctttctggggagtgcggcgcgagcgacgtccgaagccggggagctgtctgggggccttgggagtccccaaccgccgggccgtgtccgcggggcaactgacccaccacgcaggccccgcggagagcgaccagggaagccaccacggagccacagaagcggcagagggagaagcagaaggagaagaagaggaggtctctgcaggagcggaagcggggagtgcgaggagagaatctgagctgccgagggagaagaaggggagaagcggatggacaagagagagagaagtagggagagaagaagatggcgaaggcgcaaccacggtctgcgggaaggggagacgaagaaggagaagcagagcgactccgatggagaaaaacagagcaaacaggaccttgcggagaggagaggccgaggcgaggaacgagtcacgagcagacaggcaggatggcgaacgcatgcgggcctcctgcaagggagaagcagcagctggggtcccccccatcttcgccgttgctcccgacgagagtgcgggacgagaaggcagtgcagaagagcgcgtgggagacagaaggagaagaaccgctggagaaaaaggagacgcgaagaggaaggcgaaaggaaacacgacagggagtcgagagcgcggggaaaagaggattcaaggaccaaagacagggccgccgtgagaaggagcaaaacaggaccggagagctttacctggttcgccctctccgatgcaactcagggtcaagggggattttagggcatttagcgctccttgctcttcgatgcgttcctgcgcctcagaaagaccaggaagctggccttcctcgaaatgtagtcgaagtacgaaacctgccttttcgcctcatgacgcaggtgaagagaagtgaatacactcggaaggccttcagggttcacgggaagcgaggcatgcgaaacagacgtaaggagaccgtggacggataggggcgtacacgcatggaaaagacgatggagagagaacagataggtctccctttgagggaataccgcggatggagcatgggacaggaataagaagcgaggaaacgagaggtagagcaagaagagagagaagagaagctgtgcacacgcaggagaggaagggagaagaacagcgaacccgagagagacagagatgactcacgagtctcgccccggtgcgcctcgcgaggaggcccaggagagagaccagctgctggtatagacacagctgcaggagacctgggtgtaaaaatggggaccccagcacacataggaaggaggactgaaagaaagagaagaagaaggcgagagcgcccaagagaaacaacggtggacagggagaaacataagagatctaaagatagaagattgacgctctcgattctcgcctgtgcccctgtctgcagtgtgtgtcttctctcgatctcccgacttttcgaaagcgtcgatagtgcggctgtcgatccatcgccccgcggaaaaaaaaagttcgcgtttctgggtccccacttcgtcgctttgtttgcttttcttcttttgcccgctgattcgcttctggctctcactgtctccttctggaccccacaggaggcgaaccagtggcgcgagagactctgaaatccgccctggttcaatgctctccgtccggtctccctgcacaggttttcgcagctcgaccgcgggcaacagcaaagccgactctttcccttcttccgatttcgttttctgtgtgtcttccgttctccccttgtctccttgttctctgcagcgtctccattcggctcagggtctctcctcgccgttcgcgtcccgccctctgtcttcccttcgtcacccgtgccttgccccttggccctgtcctattctcgtcgttggaagaaagaacgttttatcttcataagaaacgagagacca

SEQ ID NO: 1218 - DNA, 2851 bp, Toxoplasma gondii
  source 1..2851: mol_type = genomic DNA
gatctctggactcggacgagaaagaatcggtttctgcagagattgaaacggcggagtttcgcgagggggaaactccattgcatccttgacagcctgcctttgcccgagatggacaagcaaactggcgtaggtcaccagacgaatcgagattctgttccgtcgacggggaagacgcggcgatgttttgttgagcagacatttccgcggcgtggttcttcttcgtccacgtctttgccggatccggatgctcccctcctacggcgctgtcaacgaatccttttctgccggcttttctcatggctgcgtcctcaatgcttatgcaggtgctctcctgcttcctggacggagttgagccctttgtgaaatgttacgacgcacttgacgcaccgacggtaaaaaggtggaaggcagatgcgaagctcttcggggagtgaaagcagaacttcgatggctagacgagaactttaggatgggggtggagtacagacgcccatgagaaacggaaatgtccgtggacggatcaaaggagaaggcaaggcggagaagagagggaaggaaggaaacatttcgcaacttgcctggtcgcttccacttggagtgtgcggcacttcttggggtcgatttttgagggaagccgagactcgtcgcagttggcttttgggaagcaaagcctcagagagtcgcgagccgcttgccatgcgccccctggacctgaggcgacaggtacggagcaacagaggaagcaaacggtacgagggaaacggtgggcgaagctggcgagacgggtttgcttttggaggcgcagattgccaccgctgcgccaccgcctgtgtggtgtacacgaagttgagttgtcttaccttgacagagaagttcgaacgcgccgagttcttcctctagaaagacacgttcgcttttcatggactcactacacagcagtgtcggagaaagaggagttgccaggcagctgagttcgtcaggctgacgtctttcagagtccagcgccgccaagtgtcactggtttcacaaagacctcccgtgtagggacgaaagaggaaaacgaacagccgttctgaaccggagagaatagagggtctacgaggcacctgaatcgagctccagaggctcaacaacctactcttcgctcagtggagaaagcatctttacacgatcaagacgataaagtgcgctggaaaggtgtgcacggggccgcgaaaatccccacccctgtgaggaaccgtacgtgcaccgcacactatcgctgagatccgcgtgaagtccagatttgcctcaagatgcctgtttcaagaaatggcgccacgacggacacgcaacgtgacaagaaatatgcagtagattctctccagtgtgtctctggagacgagaacaaaagtgctgggactgaaacggcgccgactgttcggtgtgcaactgtgcagcaagtgggtttggtcgggacaaaagtcggggtgaccgtgacgaatcgaaaacacgcatttacaaagatgtacgacagcgttcagtccttgattcaacggatggtagaggatacatgttccgacaaaagttgtcgacatggagagaagacgccttctcgagcacggcgggatgagcagcaagcactcgagtggagcctgggtgccggtgtctcgccattttgcgtgtggcgtctgtgtcagcggaagactcggcgctgcatctgagagagcacatccgacagatcgagtcctgaatttcgcacaggaaccgtccaaacgcctgcatgtgtcacatcgtgggcgaattatcccaaacaagactgtggagaggcagctctcagttgtcgtacggagaaaccgccgcaagacaccttttctcagaagcggagggacaggggcagggagacgaggatagaagagcctgttctaaaggttcttgcacaatgagttgcttgcttgcgatccttttctgtgtgtacctcccgtttccttacacaagtcccgtgtgtaggcttttcactggtccgacgccaccgaaagtatgccacagacgccctctcgccgtccgcgctttgtcttcacgctttctcgcctaggtgcctccagcaacagaggtcgtttttcgtgaaagtatattccgtctggtaaatgagcgtcgtttagaacattcgccacattcccagttttcgcgtttgcgacgaaaccgaagtcttcggtgcactgacgatccccagccgtctctttccgggtcgtcagtgctcgtgcaaaccgtcattctcgctttgtctagccgtcagttcctcttccgttccttctctcgtcaacatcttcaccaccgtttgtctcctcgcttctctgcgcgacctcgaattgtccaaaaccccgctgatcctgtcaccagcatgccctgcaccagcgagcacaccgaccatccgtcgttcacaccgagaataatggtcgttgaaaaacgaagccactcgcccgtcagtttcgctccaccttgcccgagtgtgcgaaagtctttccttcttgagacggggaatgcttccgcggccttgctgtatgctagacgtagcaagagtatgtagaacacggttttctgggaaagaccccagagagtcactcactggatcccacgcagccaggcaaccctttgttccccgtcctgcaagtgtcgccgaccattcatctacagctactccaactcttgtgtgtaaatgccggttagcttctcctcttcctttctcagtgtcttttcttcaccacgcgtgcttctgtagagctaaaggagcagctgttttttttttgagtgtcgcatcgcctctggccttccccctcgtcgccgcctcactgagaccggcgctgcctcccaa

SEQ ID NO: 1219 - DNA, 2008 bp, Toxoplasma gondii
  source 1..2008: mol_type = genomic DNA
atgtaagcctacttcagctcatttttatgggacgctcctgggcgagcgatactttcgcgaccgccaatccatcggcactaacaggtagaaagcgaatgcacaaacgctagatatgcgtgttcacctgaaactctcaacggtagctgctgtgctccaggtgccgaaatcccgacaaccgctcgtctgactgttgttccagaacttgacaaagcgagtagtctgtgaccgaaactggtgcatgtcttcttcaagggaagcaaacgtggcattcatcctgaagtcgtgctaaaggctgccagaaagctgacgatttcttctgttcttctttatgatttctactggttccccgtcgctgggtcctcactccctctattcctgtctctcgttcacttcccctccctcttgtctcgaagttccttttcccgacgtctatcatcctcgctgacttcaaaccgtccctctctggcttctcatggtttgcttgcccttcctctttgctgcctgtttccttaccccttgcagtttgattcccctcgctccatgttctcagttttctctcgctcccttttactcctttctgtcgcttttcatttatttgtttctgattcttcgtcctgcttcagacaggcgtttcataaatgccgagaatgaaaagggtgtcttgaaattgtgcagaacagactggcagcgacacctcccaagactgaattctttcctcgatttcaaacccgcccgtgtcgccatcctttctctcaggccattgcggttctgtgcacgtgtgttctccactaaccagctgaatgcttgtacgacagctctatcacatgcactaccaatgaaggtgtgtcgcagtttttctaatgggccgtaacatcacagccaacgatgtatatcatacttcaacggtactttctagcctatatccggtgttaaaagcggtcctattcgaagcagatgatttgtcagtgactacccggtctttacaagcgcttttttccgtaacacaaagtccactttccgctgctatctggtggtcattgttcagatatccaatctttgaccctctctcagaggcggtcagcaacggaggccgacgggtacctgccgctacaattccagaattttcgcggaagcccaaacctctacgaaatagtctccagagactctgtgatttcgtgccgagtttgccgaatcccgaaattctccattctgaagaagtgtgtaaagtgccatgtaccggcaactagccgcagcgagccggaagtcttttttcctgtgcatgcatgcaggtgtcctggaaaagtcggtccttccaagcgtccgtcctcgaccacccgaatccgggcatttcgtcactctcctgggaagttcttgtcttgtacacaccgagatgaagacatcgcatgcgttttttccgtcttctgctgtcgcgtatcggcacagtccagaggtgtgcggagtaagacccatgaccaggctggagacgcgaaaaaagcgacccttgacttatctcggtttcataccagccgttttaaagtctctccacgggctagagaccgccaccttcctcgtttttccggcggatccgctttccaggaatcgaccctccagtgtcttctgtatcctgtggcttcttcgtgtgcactgatgtcccagtgttgcacgctgcctggcggcaactggcttttttaaataaataagttctgttccacttcgcatcgtccatattcctggacacatgcttctcttcagcacggtgtctctctgtgccttctgaagcgttccagacatcccttcgactctgctcgattctgcacaggtcgaaatgcgccttctctgagcttttccagtggcacgaacttgtggctcgcctcttattctctacatctgcagtctccatcctctcctcgtgtcgttttctttatcgtctgtctctgtctcttgtctgtcgctcgtgactgtccgtcggcgagagtgccccgcaaaacctcgccggggcctggggcaa

SEQ ID NO: 1220 - DNA, 2522 bp, Toxoplasma gondii
  source 1..2522: mol_type = genomic DNA
gcatgtgaggtggaaggcagctatcacatgaagaaggcaaaccgataagcgacagggctgcagagctgggggttcgaaataagcctttctcttttcatgtgtttacccatgcacctaagtccgtgcacagtaggtttgccgacggatccaagaaaccgtatgtctgcattggcaagtaaggtagtgaccgcgcatagatgagtctctcttttatctacggcgcgtgggttgttcctcctttttcgaggacattttctttccacatgtttctctttcgcacattcgttgtttccgctgcttctgtattttgttgtcgactgtacaggatccctcgactgcacagtcaagctctggagctgcaatcgcgctcagcagaaggaactcgccgagaaacagttgaagaaaagtgaaggacctgcatgacgagatgtccactgtcttcgccttgagtttcccagtcaaatttgcccgttcccgttgccatttctgttcagcttctattcgtttcgctggacttacctagtttctggaccctgcatcgtcgctcactcaccgtacttttcctttgttcctccgacctcctctgttttggggtcgggagaggcatcccgaagcaaacaagttcacacaagttttcagagaagcacggggcgtccacagcggtcgtcatgctggtgcatacaagtgcatgcgtatgctttcaaaaatggatgcaagcacaccaatgtgtggacttgcgaggtatgcatacgacttaccccccgtgtgtacggcatctgctgacacccatggtcacatcggttgttgtctagtcgatgtggttctcggaggaaacaaatcttttgtctccgaaacagctggaaggtaaatccttgagaagcgcggctcataggagtcgaaacggacggagtttagcagacccccccgagtgagggcgcaggaccgagaagtctagtcttctcttcttccgtacttttccctgcatttcacacccctggtatgactccacaccgcgtgtaaatgtcccttaggtgacacccgcagcagcgcgtaggaggaagtagatgtcagtgtagacgtttttgagatgagagacgataacgtaaaatgccgccgataacttctgcattatacacactctctctccacgcctaggatgacaggtacggcggcacacggaggaaagtgggggggggggggggggcgaacagaaaggtcacatggaaggccgctcgactctccactcacgaagtgaaggcttcgtcccgttttgctggacaacgaatgcgaacttcttcactcgcttgtgacacacacaactccagaggcacagagatgtgaagcagaagagtggcgtgtgcgtcgcttctgtcggcggcaagccccgctccgtctctttggtggcgattctggtgtgcaccgtgtgccaagaagttgcgtgtcacgcgacttttggaaatgcatcaggttcagagtcgttatgttgcgattcaggctctcggcagagaatcatttccctgtaagctagttgaactcgcctttttaaaagcggcagcagtgcccttgtggaaggcctcactgtgcctactttcctcgtcctgagtttttccgccttcggcctcattttttgctcaccaaaatcgtgtcctaccgtcaagttttgccatagactcctacgggaaaaaacaagccggtcgacacggacgacgcccgcagggaagcgtcccctccgcagaaatcgggagacaactgtcgttgacggtgctgcgcgaaaggtcacagagtttccagtgtgttcatcagacctcactgtgcactgttagcggccgctgtcccgcctggtcaacaagtatcacaccctcgtccccgccattggcacggagctcgatgagctgcagtgtcgcttttaggggagtcgtgcaatcacgccgcaacacaggcgtgattcgatcttcaattgctaggtaaccactcgtgcttggtagctctgcaatggctcgagcgacgggggtgatgcaacatgctgctaaaaactcgacagacgtgtcaccggaacccacctaaataggagaccacgggtctctggtgtgtcgcgtcgcattctcgcgtcgcattctcgcgtcgcaatgaccggccagttgctcgacgtcgccagccgggactgaagagcgttcatcgagtcagcagcattgcgtccccttgctcggtgaaaaaagactctctggtcgagtctagctcgtgtcacttctgtttctaacctccttcgttcaccggtacacctccgatgtgacttttggtacacttgccctgtcgcacgacgcacgctgtcactcaacttgctgctagcgcaatcgataggttccctcgaaccagccatcacacacacaccttttccgggaagacgtttgcgggcggtgggtcgcagctcgtcgagagtgcgtttctgtgcatttctgtgggcagtgcagcgcgtttgcgcgccttactctgtgtgtaacttccttgtccaacactggtaaaaa

SEQ ID NO: 1221 - DNA, 2050 bp, Toxoplasma gondii
  source 1..2050: mol_type = genomic DNA
agcgaggcctactcctccgtctctgtacatgacagcgagtaagtccttggcaagttcctttgtctctttcgcctgccagtctgcctcgggatgcgcaggaagacgcaagagcgtatgtggcgccgccaagacgtccagtgttacatcgcgtgaggcttctctcggttgaaaagaggagttgctgcttgccgcctctctccgctgtttgccgcgttcctctctccctcgccgttccttctcatctcctctgaaaaaagccggcagcgcgccagaggcgctccagctgcgaaagcggtggagagctgaggcagaagaggcagccgaagaagaaaaccacggggaagcagacagagaagagaccgaagacgaagaagatgaagaaaagaagggatacgaggaaggaaaaggagaaaaaaaggatggggaggaggaagaggaagaagagggagaggaagcagagatagaaggtactcgccgtggtggcgtgaaagaggacggtgagacaaaggcaagaggaaagggagacaggagagacgagtgagattggacagaaggtgcattctgctcgagaagaagtcttcccttgaagtctccacgaacagacagacaagcagagggaaaaacttgggcggagagaccaaaggccagacacagctgaagcactgcaaacgacggcctgactgcattcatgtctgcacaaaaaaaagtgagaatccagaacaacgaaagtccgaaagaaaggaaatccgaaaaaattcggaaaaaatccaagatataagtctgacagaggtgaaaatcgggagaaaatgaagttccaaaaaaaccgaaagaaatgaagatcggcacaaggccgagaaagcgaagagaacgggactctggggtctctctctctctcgggggttcctggctgtctccggttgcgctggatttccaaacgcgagcagacatgcatcaacgcgacctcgaaagtaccacggaaaataaggtgaagtgaaagcggagaaaaaagcaaggaagcgagggaaagaggatttctcagaagacaccgacaagagcagaggccctgtactgcagcggcctccctgtgtgttgagagaagaacacagagtcacattttctctgctctctgacttctctgcggcaacatctgaggagagaaaacaacttgttgtacgaaatgtgaagaagagatccctctgggttccaaggagacactctcgggcatgcagaatgtgcatgcaactgctcggaggacagcgagacaagacgccacgagaccgcaggctacgagttcgacaaatagtcactttcctctctttctgcccgtcttttattgaaagagcctttacacacaaatccttcaaaacagagtgcgtccacgtcgcgtttttggcttggtctttctcgtttttcccctccctctccaattcgctcctagacggcggccgagctgtccgtgtgtgtcttcgtcgagaccccgccctgtgtctgctttcttctttcacttgctctctttctctcttttctttcttctctttttcctgctttctttctcggttcgtttctgtgctggccgttcctctcagaggcctcggactgcaagcagccgacgcgatacggcagttcccagtgcctctcctgggcttgtcttctttctaggttctcttgcttcctctctcccttttctttctgttttcttcctctttccatttgtctgtcctcgtttctttttttctcttctccttcctcctccgttccgcctcccttccctcccgtcgctgtgcgcgtcgcggggcagacggaagagacagagacaacgcgtcttcgaaaaacacggcttttgcgctccctttctctcttttcctcgcggtcgcgtttttccacttcatttctctcttctccgcttctctgcgcgtctccgtgacttcttggccttcgccgtgtgcctccgaaagcgcggactccgtctcccggttctcgttttctctttgcagtccgcgcgcctctgtcttccttcgcgtcgctctgctggaaggccggaagccgaaga

SEQ ID NO: 1222 - DNA, 2421 bp, Toxoplasma gondii
  source 1..2421: mol_type = genomic DNA
ctcatcatgcgccaggtagatatataaaagtacccattaatacacgcatagaattgccacattgcgatgaatgtacatgtatacatatacgtatacatggatgtatgaatacagatgcacgaatgttgctctatgtggttttttaagagaagcaaatgcagatgtgtgttgtttcgcttgactgtctgaaagcgtttcggggacgtactgaggagcaacgaaggctctggcctcggagggaagaggcttccaaaggctgccccacggtctgcttcggctgctgacccctgcattgtcttgaatctttgaaattctagatgaataatctcctctcaggaggatatcagaaccgtttctctttcttccgaattctcctccaagtgtcgcatctcggcggcgcccggctctgcctcagagataaaggatatacaagaaaagcagagagtaccgtaagtagtgaggagagagaaaaggaagtagagtgtaagatgtgagtagacctcgatacaaacctcaccaatagtcaacagaggttaagagagagagatgctcgtggctcgtcagcaattgacaaagtcacccacaaaaaaaagccatagaggaaattcccgcgacggacgttttcaggactgcactgctgcaacacgtaccgagatatatctacacagatctgcgtcagtccacatgccaaggacttcccggctcgttcggagaggaaagaaccgtaaaataacgcccaacaactgacgctgtagtaacacacgcaagcacacacataatatatgaatgtatgtagattgctagatctagagtaagatgcacgtgtgctgagccatgaggcatcgctgcgcatgaaaacgtctctattcgtagttgctgatgaagtctcagtctcccatttggctcgaagcgccacagaatcttttgaagtgcgcactgtcgccagtacaggtcgagggtgtgtgtgtgtcgggtcttacactgagaaagttgggcctccacttcttgggaacgcagcagccgcgaaaatagatttgtgtcagaatatcctctggcacctactcagtggtctccgctgccagcctcagagtcgagacggactctgaagattgcttcgcttgggggtcaacttcgaaagccacgcgcaggtagctccttaaacagtcgagaggcaagacgcaggcgaaagagagacgtcggggatctgcagttcgttcaaaagtccttggtaagaaaaaatgtcttagaaaacgagttgccgcgttagacggaatcgagcacaggcaacggtaatttgtctgcaaattttacgacgttatgccagcgcttttaatccttttaactgactgcatgtgaaaagccgcaaggggggcgacgctacctggctgtctctgtgtgcaaagacgagagctccgaagcgattcttggtcacaaatccgcatccgtctccgttttccgaggcacaccaaaaaagcgaagcgtctgcctcgtgcttcggaaccaagttgcgtcggcacactcgtaactcggatgggctcttcttttttctcgaggtctttcggaagcaatgtctcggctgcggcgcaaatcgcagtcgccgtttccgattgcctctaacaagacacatctgagcacatggtggagagttgcaggctactcaggcgactcacttcgagtgtacatacacgcgaggagtgttgaacagtggcctcggcttgcatcctttgacacagcaatcgagcgtgagcccgggtcggaaatgtggatcaagacacgaacgacgcgacaaatgcgtaaaagaaactgtgggcctgttcctctcgatgaacgcacattgcaaattcgtggcctcacctacacattctacgcactttggtgtatacaggcttcccattgtgcctgtgatgctcggcgtttccgcgcgtgtgtgtgtgtggtgaaaaaggcacctggtatctcggaacctgtcgtttttcgccatttctttcggaataggtcgctacggcgcttggtatgtgccagccaactaacccgcaagtttctcttccagtttctgtttttcgctggtcctcgtctcccattgtttccggagtaaaccgctgtcccgtctaggtaatcggcctccacgcgttctgtcgatttccgtaaataatgcctctcgtttccacgcttccgaagcctcttttctgccaatttcccccgtctcaatctgtttcccgcttcgttgttcccccttcgcgcattcaccgtcttgttatgcctccggggttccagccgctgctgccgggccgcccttccttgtttcccctggccttcccacggcctcgtcccgcgtttgccccgacaacgaagtgactgtctaaacaaactcagtccgtctggcatgcttcttactctccttcgtttccttgctcgaagcca

SEQ ID NO: 1223 - DNA, 1689 bp, Toxoplasma gondii
  source 1..1689: mol_type = genomic DNA
ttcctttctttcgtggcttcttcagttggtcgtcctccgagtcgttgccggagtcagaggacagtccatcggaagagtcagacgacccactgtctgaagaagacaaggagctgttagaccggccagagctgctgctgtcgctgctgctgtcgctgtcacttgaacctgaagaaacataaaacggagaatacgtgggcggatagacagcggttgtttttgcgtcgtcaaaatccgggaatacataatctaaggcgctgctgagacaacgcatcttctcaactagtacgaagaagtgccttactgtcagagaggtctccatcgcgccccgttgagcctgcaagtgtggcggtcctggcacgttgtctgggaggacccgacgacgtgccattcggaggtctccgctgagaggagtctgtgggctgagacgtcagaggagacctggatggtttcacaggcgcgtcatcatcgctgtccgagagcaatttgcttttagcagctgatctcggctttatcggtgaatcgtcatcgctctccgtctgcttcgggcatgcggacgcttgggtcgcctgagattcactggcctgcgacaaggtcacgctgctcgcagacaccgaggaaggaggcgcagctggtaccagcggtgcaacaggtgcggcagtcgacagaacttcgctcttcaccgccggcaaagagcctgcagacggagcgccctgtaggccaattaaacgcatcaacatcgcggaagagacgcagttttacaactgacatagaggtagcggttcgcgagtagaagcaatcacgacggtcgttagctaacaaggtgctcaagccacgataactgggttggttaataataatgcaaccagatgcgagaccacattcattaggtaacacctgccgtgaaggaactgtcaaccaccgacgctcacctccatgggtggatcaagcccgaaattgaaagagaagcagatggggagagaaaaaagagcgcgggcacaaagcgacgatagatcctagttcgtttagtgcctacgtgacaaaattgactttatttcattccttctcgtgacaaggctgaggcactgtcttacacggacctcctgccggtctgcagtggatgcagctagaaacccagcagacagatcctgtttctgacaaaagttatctgcgactattttgcaaagactatgctttgggttttcagtaaacaggcagtcatatgaggaaactggggagctgaagcatggacatcagacgaagacgtacaatgggtgcatgcatcacttcaccaccgacaacaacatacgaaggacgtctccagcgctgccagtcacgtgccaacaccatgatacagagttacttgatgatcaatcgtagatgcacttgttcaagaggtcgcacagattcattcagtttttccactgcggccaacttgtctgcccaggcacagacatcatccgctttggctagtgggcagaagggtcgtgtttccgggtgcatgcacactacactatcgagggtgagcatgaggacaaacgcagcacgcaaacattgtaacacggctcgacaccgctgctggacctctgcatgataggttcatgactcaacggagacacaccggccacttcattgaagaaaacgactaatcttaaaaacagtgaaacttcaagagtgccgtgcagatcgaaa

SEQ ID NO: 1224 - DNA, 2227 bp, Toxoplasma gondii
  source 1..2227: mol_type = genomic DNA
agaaaagacagcggaacgaatacccaagacaatcgccaagaaaggaaggaaaggctgcttttcccccatgctagaaatggcgtctttaacatagatttctcgacgctgaaactgtgttcagcgtgccaccggatgcatctgtggtgacagagttgacgaagaaaggagaggccgaggaagacgacagaaaaactgacacggcggagagaggacgagattcactccgatatttctttccaccgaaggtttacagtttgagttcttactttaaggagcagaggccatttactcgtatcaatggggggagaggagctgttgggctcaatggcgtagttgtctgttttcttctttttcttccctccctcggtgcctgctgaggccaccagaccggggtcgctggtcgcctccttcatggcggatacacgagacgagcgagcggaagacggagaggcagacgcagagggtgccggcttgtgctttcgactttggagagaaagtcgagaactttgtgtaaaaacgcagagaaagaggcaagcgaaacaagaccttcagggagaaagaactgtgcgacagcggaaaggaacagcgcggggagttccccgagagatggtcgcggggtcaaacggatttcttcacgtgtctgtacaccgcgccttcgtcactttcagacgaagcggaaaaaacggggactttggggaatttgcgcgacagacaaggtttccgaagaagtcgacgaaaagccccgagaaaaaggacgcatcaaaagagtaggagggcggggacaatcgacggaggcggagacgcttttcatgaggagacacggggagaacgagagaaattcacgacagcaaaaaagcggagacaacgcggaagaagcggcaacaaagcaatttcgtcgcagcgaaaacgatgacaaaagagcgtcgcgaaaagcacgattctcgagaggacggaacccccgcaaaaggcgtccaggttgtctgccgaactctgttcctggcctgaaaggaaggctagatcgcgaggcccaacgcgcaggcaaatacattagaaaagttctcggtagaaagccccgagagaaaacctgcgactgatgatgacaaggacggcagagcacggaaaagccagcgctgtgtggggcttgtctctcctctctgcgaagcctgggcacaccaccggctggaacgcgaatgcgcgaaaaatagcggtttttgcgggaagttgcccagtcggaacttccggttgcttgcgggatcgaccgagtctgagttttacagctcctttcctggacttcttcggcgtctcctcgacagaaaactactccttctctgtcgacgaaggccgtaaacacgctcttggcgcgcaactgacctcaccgctgctctccccggtcgctccgaaaaccttgcgaatctgttccttccggactgcggggattttcgctcagtcgtttgttcagtgcgagtcgcgaagttacttgcacagttcacgcgtttcccaggaactcttcccgggagcttgcgaccactcgaaaatcccggaagcccggtggactgctctcgccgctcatcgtgacacacttcaacaaggcatgcgagttgctgaaaaagagtttaacgggttttcccgttgttctttcgcgggtcgtgtggaggaaagaaagggagcggaacgcagaactcgtctccagggcgaacaagtttggccgtgcagaggggtaaaccagaggtacgaagaagctgtggcatgtttgggggatatccgttccagtgctgtgtggtgcgtttctcgaggaaacgatgcgcagtgataagttcaaatgaacacgagccagctgttgtagagttccttgtcttgaaagaaatcacattttctaggcgagtcgtaggtaaccagcgagacgcgctcgaggtgcactgttcgcaccacgatcttcgtgtagttcgatgccttgtccctctatatcagtatagagaaagcggcacaaagaagttagttgcaactccgtacaaggcagacaggaaggacacgccgatccgatctcgaccgtgtattttaactgcgtcagtttggggagacagtgcctttcttgctttcgcggttcgtgtgtcggccgccgagcaggtgagcgcgagtgtgacaaagcaaaccgagaacgtcaacctgttggaaagggagatgttttgcttcggtcctgacttcgcacaaacacagttaatccgacgaa

SEQ ID NO: 1225 - DNA, 1103 bp, Toxoplasma gondii
  source 1..1103: mol_type = genomic DNA
agctctgagaaacagtaaacgccagctgcagttttaaaccgaggggaactcatcttctttgagcgacttggcagccagaagtctcgagttcatgtgcaaagagaggcacagagagcgaggcagagagtcatgtagagagagagacacaagtggagacagagaaagacctgttttgtgtttacggctcctcgacgcgaagttcttcagcaatgtacgtgaaggaaacccgaattgtatctgcgtacttggatcgagctatcgttagagtcctacggacttgaagagttcccgtggaagcgagagatcctcggtcgacgcacaaagacccagagagacgtccacaggacggcgacagtaggaacttaaaaaagagaggtcgcaacgcatgagggaaatgaggaactgagacttcgaatctgagcgtctttctgaagcgcaacggcggcgtatttgattaccctgttacgagagctgcagataactcataggcaagcggggaaggcctaaacgacaaaaaacagggagaacggctttctgttgtctacctgaacgagtctcagcacagaatcttttttttgatgtgattaaacctaaaattacgatcaacaatggtgtgcttagtccttcaaaacctaaagttctattctgacaatactctggaggaaactgtcgagaacaaagagaaagcttgccgaagagaaaagagaccgaggttgaacagggcgcagactcgccgcggaaagagagacgaaagggagacagtgcgggagaggaggcagagaaacgaaaccagaggacaagaaaaggagacagaaggaaagcaggaagagacgctgagaggaaaagattaaaagaggagagaaagcaagaaaaacacagagaacagggagagaaagcgtttagggtataaaaacgacaccgagagaggaaagagaaaggcgaaaaggcatgcagtgaaagaagatcgagaagagaagagaaagttgtccgcgcgattgaaaaagagatctctgttgccggtcgagtcaggagtttcgtgtaagaaaaaaggatgctgggaatgcactgaggcaaacaagtctccgaacagctctctgtatgca

SEQ ID NO: 1226 - DNA, 1339 bp, Toxoplasma gondii
  source 1..1339: mol_type = genomic DNA
gtcggcctgcattacgtggaatcgttaagcgtttcctcagtccgtctccgtacagccttgcaatgagaaggaaggttgagtttttctgggacctttttagcaacgtgtttttccgatgatatgaagttttccaaaaatcgctcttgcaatgaagtccacaatagactccaggagaggcgcgccctctggatgcctcgttttgtgtcatttaggcttgtcgtcaacccaaaggtggggtcaacttactttgcaaaggctagaatgtgtatgtttcaacgcgtgcacatgcaactccctatctgtcgagagcggtgccaccggccaagcagttgtgtatagtatcgcgcatttgagctattgttgcgcactgcagttccttaatgaggaagccttaaaacacccaaaaacgtgacatgcggggttgacgcaaaaagtcgtcagagctacagcaggagctgccttaaacgataactcacacggtacatacctaaaatcagaaagcccacccgtcgttgcatggagaccggagataactgacgtcgcggccagggacaagacagtgtgccgtccgaggaaagatgctatcatccttacacattgtacggggttcgagcggtactcagttcgtatctctctccaccagcgagcgtctccaccagcacagactcgtcgagatgtaccatggagacggacatcgtgcggaaggcgggcattctacaagaccgagttctgcccactatagccatgctgaaaacaatcgaaatttcgccgcacaaggcgcgtctgtcagacagagcattcacacctagtttgggagatttcaactccgttgtgctattgccattcccgtgtgtgaaatgtttgcccgtattgttcttgagtgaacggttgctgtgcgtctacggaaccgcacaggatactctggaagcagcagggtgaaaaaacataatagctgcattttgcactgaggatgagagattgtccgtacctgccttgtgcctcttagagcgattattggctgttcgatgttgaactgtgaggaaggacagcccacgacaggatcgccaaaaacatacagaaaaaattttaaatcatgcagtgctgtggttagagcggccgattttcaagagacattctccttctacctggtttcgtcttttccgtgcgatccacagaaacccgtaaacattctgggtcgcaagagggaggctcttaacctgcttattgcatgttgtgtgatcgaccactcgagcatgtgagggacccctcacaggtggggcttcgatatctattggaggaagtttcctctgacaggcagtcagcgtggcgactgaatcga

SEQ ID NO: 1227 - DNA, 3524 bp, Toxoplasma gondii
  source 1..3524: mol_type = genomic DNA
ttaaatcaattctatgtttgcatttggcagcagcccgttcctcactacggtattttgtatgaacacccgaccaaccccttcgtcaaacgacggcccgtatcctgtctgagatgacacatctcccagttccagggcacagagcctggtagtacgtgagaaagacgcctaaaaccaatgtggaacagtctcgatcaagaacgttttagactgaaatacagcacttctatccgtcttcagcagtcgaaacatgcggtggtagacagcaatcataaagcacttgaggcagttggatgcccggaacccgtagccgtttcaagatcagcgacatcagagtcatcccaccttcatagtctctaactcgcagccccagtcacattcagtaattttcaaaaacagaccaactacttgtctgcaccccaacggtggagccataatacattccgtaacaatgaaaacctccacccgaacgtcacagagcaaagaggcacccgatcacattccgcatacgtctcaccgattgttcgagatgggttcaatgctgtagtacgcgaagaggcagcacgccgcaatggaccatacgaacggtacagtgagtttgaagatatctcggtaggtcaggtccatccccctggagggcccccgacagagtcttttgctcagacagtcacacattttacagaaaatgaaggcaactgttcctgaaaacagactgaatattgcagtcttgacgaaaaaaggtacccaacaactacggagctgaacggagtcgaaaatcgaaaccacagcgaagccaaagtggtacaaaggccgaacttatttgatgcgcgcacacgcccacgacagactccaggactggagatccacgcgcataattgcaaaaagcgatttcgtactcgcgtggttcggtgtgaatacgaactagaatgggatacgagcaacttgctgcagctaggcttctgcacaggacggcgcgaggaccgatgccggagaggcccaagagatactgagactcaaaagaaaaacaactggggtgaccgaggtgaacgcctggtttaacatgaggaaaagaaacatacctcagacggaaaaaacaaggaaaacataatcgaagaactgcacgagaagctatatcgtgactgtcgcaaaaacggaggcgctacgttggagcggagccacgtatgctcctcgagttcgaacaggtccgtcgaaatttcccgagacaactacggaatccatttaaccggaaagacaacttcacagtttcggatgaggaatgccgcataaagaccacggaacagaaaaagcacagcttcactggctctcacgaagcccgtcgagttgtccgcgcaactcggaaagcagctcgcctgtgaagtgcggcgcagcaagtccgagggagtcccggcagaaaaaagtcgaaggacgaacacgaaaatacccctttccccgttaggagaatagacacggacgggcacgtgcgaaaagaccggcgacgctgaactttgtgtgcctcaaggaaaacgtgtgtccacgatgcccctacgagattttgggccaccgcactccggacgaaaccgagtgaagcgacgcagaaaacgagaactttccccgtttctgtacgttaacgcgactagaaacgcgtcgtccacctgagatgacgaaagaaaggacaaacgctccggtcggtcttgtcgacagagtcaactatacaggggactgttcgctctaaacaggcgcgaggatcagcagctttctaaagaaccggtcgcttctccaattaccataccactcatcgtggatctcgtcacgtgcttcttctcctgaagggaacttcgagaagcccgccagaaaacctccgaaaaagccttcgcgcacgccggcacaccacaaagaggtggcttcctactaacgacgagagttgcagcccattattgacaccgttgttaagacgcgtgtctttcggcttttataccgttcgctccattcgaagtgggtgacttgggcgggagctatatcgggcggctcggagcagcatgccacccgtgatgtaaagtggttcttgctgcctctgttcacagggaatcacatttttgacctttcggcatgttcgtcaaacttccacaggaagataccacagtgcagaaccctgcgcctccctcctttcaccctcccccttccgccccccaacagacgtacggctagccaagagtgttcatggcaccctgtcacgccacctgctttgttcgtagaaaaaaaagctggtggaccacactttctttcgatacttgtgtatagtatcaggtctcctgcagactcttttaagcaaaacgccagggtgtcctgtaacaccgatatgcaaagcatgcctccacccgagacggtggacttcttacggatccagtgtttcgagtgtcgattgccatcggtgcgcgagttagcgagatactgcgcgctgaaagctggcaggtctcctagaaacttgcgtgttctgtgtccaaggattcttcaatcacactgtaattcctctgtgtgagaaccccgttttttgtaaagggcgctgcacctggagcactcggccgtgaccaccgcgatatcgagaggcatccgcgtctcaatgctcgtgtgaacggtcttagaggacagtcttcgttttgttgcaaactttcattcaagtcttcagtccgttttgccggagcttggatttctggcgtccgacggctttgcagctgtcacccgtgtctccccagtctcttccccgtaagtctttccgacgtttcccgccagccacgttaaggagagcaccggtgcctgggagtttttaaaaaacgagaacccgtaactttcgcacaatgaacagcaagtggctcacgtaaaagcgtcattaggtggcgttgcttgggcattgtttcggcttctttgcccattctgcagtgcggattcatctgttccacccgatttagtggatagactctaacagatagtaggggaggggggactgccgttgattatctcctgtcagcctctcctcagacaagacatctcgacaagattgagatgcgcataaccggtaattttttggagaggcactcttcttggcattcagttgtaagtacacccggtgatccgcacgccgttttatccgaactgacacgacgttatgggttcacggggctgccgccaccgattgtttcaaattatagccttgccttttcgtcaaagttatttctcatccatttcgctatcttgacttaactgatgtctttttcagcgcagcgggtcccacggactgaagcgttagttcgtttttctagcgcaccggcgatcttctgcgagggcctcttcacgagcagaatgagtgatttctcccgtcgtcagctctactgtgatcggtctttccctccgtgtgtctccatgcaaaagacacagattacggataatatgcaacgaagccggcggtagaagcgtttctccaacgttaactgcgaagcggtgcgacgtcaagcgcgcgagtgtggatgctcgca

SEQ ID NO: 1228 - DNA, 3563 bp, Toxoplasma gondii
  source 1..3563: mol_type = genomic DNA
tcgactggaacgtccacagtgctaaaactgtccaccgggtgtgtccgccttcctgtgcttgaatccgttctcagctttcgagatttccccgccattgggtacggtagcggtctcccctgggacacaggttctgccggaaggtccgcgggtgcactggcgtctttgggtggcgtacaggcactgcacttggacgcctgtgccaacgaagacttctccctaaatgttgttttgagctggtgaacttcaggcagccagggctcctcgttcatctggccgttgccttggtcggtttgcctcgatctctctggtgtcgcagcctttgatccaggacggaccagcccttcgtctacgtcttcccccgctgatgctcctcctccctcctcactcacgtttctgatcagacaagaaagcccacctgagctgacaccgactggacctgcctgcctccggcgccgtttaccaccctgtccagaggccgtcaacgtcctattgcaggaatcttcagaaagcacacggtggtctgcgctctccatcgcatccgagacaatagggtcctccgctggtttcgaagatgtgtcttgaggtggagagctttgtcctcccgaagaggagtgcaggttcgccaccgacggagttctcaccagatctacagacgatacacggccagactccagtgtatccacatctgcaatattgggaaaatttatttcttgagcattgctacttttgttcgcgtcaccgtcacgcatgttagccggagaggcagaaggtggacggcgtaaatcggagcgggcgctgtccccatgctgggtcccagtacgcaatttgcatgcatggatcgaggtcacttggcaattgtgaccgggtatttccggtggtccttccttaaccagagcctctggttgtatttttatacattcagtgtcgccctgatagggtgttttcaatgccgacacgagccagctttcgttcgttaggcatggcaaataaagtgcctcctcgacatcgcctcccttgttgcttcggatttcatttggagcagacccggaaaatcttggcaacacctccttcactgcatcagaaccagaaagggttgccatagcgcttcttcaagatttcgtagagaacactgaagccttcaagttcagcgaggatagaggggaagctttgggagcatcgacgccaatattcacacgtgcctatccaatgccagtgttcaggtaacccggaaaggcctgaagactctgggtgcgcctcttctggctacgaaggtgagtgaataccacccaggaatgaattgttcgcagaaccaaagaattgaaaagagtgcttcaaagacagggcgagagcagtcatctttcagtcactctgaaaggggcccttctatgcgagtgctcagctaaggcggacgaaggtatacgatggaactgggaatcacgcaacggaaggctgaacaatgatacaggtgagctagaacgggagaaaactgtgaagggcttcatcgtgtcattatctccggacggggcagctgctttacagacgttatcacggtatatatcgagtatcccattcgaagcttacaccaagttgaacttagaagaatagcaagcgcaggaacgactcacatggaaaacggcatatcgtgtacgtgaaacggagtacaaccgaaccgactctcccactgcatcacaccttcttccgccacaatgtgtctcgaaaaacttaggtagacagggtcccgtcgaagacggagataacatgcaagcaatttggttatgctacaatatgtaccgaaacagcgtcggaagtcttcggacgaaggcccagagggagtagcccagcagaggatgaagacgcgagtaaatctgctgggtgaaaataatggttctctcacgatcaacaatgagatcaatgaaaacgatatgtgaaattcagagggacagaactgatcagctgcgtctgataacattcacatacatgagtgaattcgcgcgagatgcttccagaagactgcagacgcacctctacgagcatcgacagcaggtacgtgcggactgccagtaatgaatcgactatacactcgcttggaacggaacgaaatggtgcaaggcgtcctaccagttgcatcaaataccgcggcgcatcttggaaatgacccaaaggcagtgaagcccaggtgacgtgtgcgcggtggtctccggtggagcaaggaaatacgactttccggtactttcccctcccttcacccgtatgacagcggttccgtaactcatgcaatgagttgaaatcatcaggaagaagtttattgcaatcattcacgaaaactctacgaatttccccaatgctgcggcaccgcgccgccaactgtcgatattctctgtggctgacccgcgcttacaccacacctaccgagagggagattgaggcgggtggaggggttaaccaaagaaatcaaagaagcagtgcgattggaaagttccccagtctctctccggagtgcacaagtgaaccagttagcaagagaaaattcgccgtaaaagggtaccacctggtgtcgcgaaatgagtctgcggagacacctggggctaattcagcgctgcagtgttcgtccgctcgaaaaacaggagacacaactgccacataacgacggattgcgcgcgccactctttccgcggaccggccaactggggaaacacgactctgaccccagtttctgagtctcacctgatgatggttgtcgcgacccccgcccatcgttcgcggccgaggacggtgtcgtcgggcgcactcactgcaacgacgctcaacaccagacggcgcagcacttgtacagtaattctacgggactatctgtcgacgaaaagaaaaacaaacagaaaagaaaacagtgcctcctcgtattctgctctaggacgaggaagacagtatggcctgcaagcggaacctgcgtatgcagcgcaagtgtagtattgactactgtgtagagagccgtgtcgaacttgactcacctggcagtgtaagtacagccgctctcgccgatgtgatttctcgtttaactcaaaactgctatgtgtatgtgcattgcgaaggatctcaaaaagaggattcagctggggccacggcagaactagagctgcgatcgttccttctaaccgtagggtagattaaccctcgaacccctttaggctgcagccccgtccgacagtgatgattgtcttggataaacttaggcggtatgcgccacagaagtgaactgaaaacgacaaagattccagaagatagaccgtctattgtgttacaccagtatgtggttgatcgctgataggaggacctccggaacatccggttcggtgtcgtcatcccgtttaccccggttactcgcgtctctcggtctctccttgtgccactcttcgggtgtgcgtcgcttcgtttgacaacgtaggaacaaaatggggatctgtagcttgtgccaccacgcataggccatcacttgtgttttacggggattttgttcgtttttcgtgccactgagttagtaacttttcttgcagttgcgtgtaaaa

SEQ ID NO: 1229 - DNA, 1696 bp, Toxoplasma gondii
  source 1..1696: mol_type = genomic DNA
taaacatagattcataaacatgaaaatagggataggcagtctttctggcacatgcgctacgatttctttgagagtacggattcgtcatcacctggagtacagacaccggcttttcggatctcgatgattcgaagattcttcgatttttttcgaagaacggctctgccacgcggagccaaaagtcaccgctttcagctccccatgcgtttgaaaccaaactccgccgactcttctccgaaatattcgtttttcaaaagtattgcaaaggccttctctctatagatatatgcatctgcttgcgtaaatatttatcctcttatcgccacagacacagatatatatagttgtatacatacatacaaatatatatatatatataaacatatttaaacatatataaataaatatatctctctatatagctataagcatatatatatatatatatatatatatatatatatttgtatgtatacgagtagaaactgtttggacggacatggaaggatggaagctgtttcgtaagttgcccctttcgtttcctttgtactgtgtgtagttcacacattcgctgaacgtgctctgcaactcgacattcagtccgtgtttgagtttgtagtgtgtacgttgccatcacggttgatcccgcataccctgcttttctcgatttttccctacaaagatttcctgcaggagctctcgtctttcgaacttgagacaaggcacgaaggcgcgcgtttcgtcagacactgtggcgttagttgactctgaaggttgttcgacctgtgttttttcgtgagaagctcaattcctttctgaaatcgaaaaaaaaaccgaggctcctgcgcccacagagacacatttctcaggacgtctcctgcctccttgagagccaggatggagccttaaccagttgttcgagtcagataaaggtcacttgacgatggaagaagtgactttttctctctctcttccgtagagaagccaaaaacgcgttcccagcgcgttcccagtctccgccaccgctgtcgagctgcatgtacagcagacgctgcattttctcaaaagacaccagggtttctgtccttcaaaagccgacacagtcaagcttcttcgctccacggcacgtagcttttttctttcggggaaaactcgaaggtttttctgggcaagaaaaacagacccaaacctgcgctgtttgtacacccgccacgaaaaggggccctcgcactgtagagtgcggaattcgcggtttttctttctcgttcgaaaatttcacttttgctttgactctgaggagtctttccttcatcgtcacgcccttttgagggcgcagaaatacacagacagctggaaaccgtcgccgtttcctccagagactgagactccgctgacgacagctgggcttctacgcgagcctctgtctccatgaatgagatgctgcagcttctgtctctgcgcacgggctctccttttcccctctcgtggctcttgtgtgccaactctcaacaccaagcaaaacacagacacagaaagagagatgtggagatacgcgcatctgcatggacgtcgagttcattctagaagctcggaactttcagctgtgaattcacacgtaaactttaactttatcggtctactttccgactcagtaccctttttctgcccaggtccctcccctctccagtctcgaaaa

SEQ ID NO: 1230 - DNA, 4233 bp, Toxoplasma gondii
  source 1..4233: mol_type = genomic DNA
cttctgattcagtcttttctccattttcttccctcaaaggcactttccggggccgaccccgtcctctctttggaaccgtaggattccatacacctggaacctctgctgcagtcggttcctccccctgtggtatctcatccactttcacttttcgaggccgaccccgtcctctctttggaaccgtaggattccatacacctggagcctctgctccagtcggttcctccccctgtgacatttcatccactttcacttttcgaggccgaccccgtcctctctttggaaccgtaggattccatacacctggagcctctgctccagtcggttcctccccctgtgacatttcatccactttcacttttcgaggccgaccccgtcctctctttggaaccgtaggattccatacacctggagcctctgctccagtcggttcctccccctgtgacatttcatccactttcacttttcgaggccgaccccgtcctctctttggaaccgtaggattccatacacctggagcctctgctccagtcggttcctccccctgtgacatttcatccactttcacttttcgaggccgaccccgtcctctctttggaaccgtaggattccatacacctggagcctctgctgctgtcggttcctccccctgcgacatttcatccactttcacttttcgaggccgaccccgtcctctctttggaaccgtaggattccatacacctggagcctctgctccagtcggttcctccccctgtggtatctcatccactttcacttttcgaggccgaccccgtcctctctttggaaccgtaggattccatacacctggagcctctgctccagtcggttcctccccctgtggtatctcatccactttcacttttcgaggccgaccccgtcctctctttggaaccgtaggattccatacacctggagcctctgctccagtcggttcctccccctgtggtatctcatccactttcacttttcgaggccgacctcgtcctctctttggaaccgtaggattccatacaacagagtcttttgtcggtgccttgcgcggtcttcctctcccgcgcttgatgggtgcaaaaggtgtcaataggcccatttccggttcggcgttttcgtctgccgtttcgttccacgatgcggtgtcgtcaccgccactatgcccgccttggatttcttctgctgttctctttcgtcgactgggttcgagagggccggttggcggctcgtctcgcccacggacggttgcggcgtccgtttggcctggtgacgaagatgcggtcggctcaacaccggccgcatcgaccttcgagtcgacttttctctggatcttgtggagcgtttcgcacgccggggtgccaccgctgtcgtccggtttcctgcgttgctcgtgggggacttctccgcaaaagcggggtaccgacggcgttttcggccgagcggcattcgacgaagaagcgggagaaacgcatgtttcatcgtctccctcgctgccaagtgcccgactgcgactggtgtcccgctcgcgccaagacctcgacgtcgcgtcactcgactctcctgtcgctccatgatgtggagagtcctccgagggaagagaatgcggcagtgccgggggaaacggtccgttggactccttgtcgcggcctcgcgctggcaacgccgaaattggtcgcgtgggatcggcgcctcgagtaaagcggcggaagaagttgaagctcgtttccatcgcgtgacatgaacggaagccgagtcggactcaacgaaactgtgttgtcggggacctcgcacacctcctttctaacccccttccccccttcaccactttcctcgcgcttctccggcttcccgccaggtcacttggcctctctgtctagagcagggaagggttttgggcagtcttcccgtttggcttcttcccctggctcaaaaaaatctcaagctgtgttcggggactcgcgtcgttgtcggtttcggggaaaggcgagaaaggagaacgtagaagacagccgggttcacacgctggtgtttctaagggaggcgccttcgacgggaagtgtcttttgaccggggacgcttttcgaaatggacattttttcaagtcgaggctccctaaatagagcgccaaaacccgcagttcgtacaggacgtgccgtctctcttttctgtgcctcagtcggcaaagccaatgaacacaggaaaaagcacagaggagctagatcgtgaggcatgtcacctctccacattgaagacagcagggataaacgggaaaaagcggaccgcgacaccgaaagacggccaacacgcgaaaacatcacacgtcgagggaaaagctcgatttttttgccgctgcgttttttctttctaagcagcgaacctgtagcgtcgaaaagcaggactagtggcattcacgttctggagaaccaacggggttcgtctcatcgtccccccaaacgagacattgaggtgttggctgaccccgcgttgtgcgtagccgaaaggcggtcaagagagacgggagactcgaactgcaacgggaggccgtcgcggaggaacggtctctcagtgcagcgctaaaaggaaggaaaactggaacagggatgtctacggggaagcaaatggtggcataaaagaatatagtgacggcgacggctggggggttcttcgagaactgggagccttcaatgcgtgcactcgaagacacgacgcggaccgtttattctctgtgggaaggaaaaaacagaactgtggttctttgctcgctcgctttgaatcctagatgcttcctagtatattttttacatgtggacggcatgcatctccatctgacatccgggatgaggacactcgcacatcagcagaaacaacgaaataacctgatgaacactgcggtccagaaagcctccaaaagacgcgattctgaagaaccaaggaaagtcggtgatgcgttgaagtgggattatacagtcatggtagatgcactacgaatggtgcttctgtggccaggaaacacagaaaagaaccgccgctaatcacagccatggtcgtcaactaacaatttaggtcacatccttcgtagtcatggtaacggccgtctctcgcgtctgatcgctttcagcctcttgtacgtttctttgccttcttaagaacacattagtcgtcactggaacccggctgtgagctgctctcagcggacgtgcaacttcggttccccttcttgcaaaagatgcaaaagtgtgtctacagcgccgacgaagtctacaactttcgcttcttctccaacgtcggagcctttaatctggctctgcgttacatgacggtcaacgtaatgcctgcgccaggagcctttcactcgccgctagccgagcgccttgcgctggagtgtccagtcgactcctttgagggcagacttcttgttatcgttggccacctggtgtcaccacgtctgttttcgtttcggctgagaaccgtcagttgggccctgccaccctccaagcgaggtcgattaatgaccgctggacgctctagagccacggcttttccaacttctcgttcttctgccggtcttggttctcacgttcgcgggtctctttatctccttcttcgccgctgcgttgccggtttctttgctttctactctcgcgcgcctggtgttccagtggaggcaactcttggcatgcctcactccccagctgctccaggtacgtgacatgcgccgtgtgtttcggaaaagcacctgtgctgttggtcaactgacccctttcctctattcgcttggccttgagtgggcgtttttccagtcgaaacagctccaaaagtgcacagacctagtgaacgcggggcgagagtttttgccttcgtttcgtatcccctctggtctttctctcccaactcgctgcttgcggggagacgcctgctgttgttcccagaaaaatgccaacgcttccaaccgccttgcctcacttatcgcctcttctatctcttgcatgcacttggcggacatccctgcgcgaacaaccagtaatgcagctacgagacttcagcgggcgacgtcgccggactgaccaagggagccgtcggggcctctcagggctgctggagagacacccgcaggttctggcggccttgtgagaagaccctctttgcggtggaagtttaaaaacttcacgttaacttcgtttttgctgacaaaagtggacagagttgttcgggagcgga

SEQ ID NO: 1231 - DNA, 1960 bp, Toxoplasma gondii
  source 1..1960: mol_type = genomic DNA
cccaataagagcgtcatactggttccgtcgtttgttttctgtttgatccacgtgccatgactcgccgtgctagccccctgaatcgctacatactccttacctccagcgggcgtccgggttgctcttgtcgtatatacattaaaatgttatcagcgttcaatcccgttaacgatgatggcccaagtcggttgatcaaatcctccttgagactctcaacctgcagatacggatcattttttgcggtggcttcaggtcatgtctgcccagtcgtagtcgggagagacatcacaacttcacacagatactctttgcttcgcttacggtgagaaatgagatgtcgagatgaaaattgtacttggcatcgtcacctttcctgtgtactcgaacgcttatatgcttcattatctgctcgtgagtttggagctttttgataatgtctaaacgaacaaaacagggaagaatgacagggtacaggacactggaccaatttagtgctataaaagcagcatgctaactgcttcaatgctggaaagaaataggcatccaaactcacctttaaagaaagaatcgtcaaagtctataggtgccttgcccgtgtacatctttacctccacaacatgtactccatcgcctgcgtgggaaatttgacaatgacaaccagacgactcattacgtaagtcgagacattagactgaactgtggttcaagactgggagttcctgaattgttgtcatcacgctgatcggtgcttactgtcgtcaggcgggacccggtcttccgccttcgcttttttccgcagctgatctgctggcatcgagtcttcaatcagctgaactccgagatagtaatgctgctctgattcaaggatgccagtcttctgctcgatctgaaaacgagaagaatgcgactagcaggcgacaaattagcatcgcttgggtacaaggttctatagacggtccactaggggaacacgaaagattactcgagacagtcccgccgctctgtgtgccgccgtctagtgcctacattgagagccctgttttaattttccaagagcccctgagcgtacggcattcgacatgtcgctcccgtctgctgttgtagtgagtcgatagctcagcgttaaaggctgtgtggcggaggcttccgaacgccacaaaaaaacgtcctgcagttcccttccagcttgttgtacagcattcacacggtttacattgacgcagtcgcacaaatagtaccggccccctctttccgatcacctaccagattcttgacagttttcaccgtctcccatgactctactgtgaccgtctgtttgctatcgtcctcaaggttgatgacccgtacatcaagcttcattgtgaaaaatccgcgagcttcgtgtcactgtcttttcccgaaaagcgaccaaagttccttcatgaagtgatcccttgccgccaggccaaccttcaattttttgattgacccaccactgtcgtcaaggaacgagacaaagatctcgacagattcaagacgcgcacagccacctctaggggcacaagccactacagaaggtcccgggatagacactagttctcgaaaatgaggatgaaaagagcggacaaacctcttcaaacggcctggggcacttcaaaaggccttcatgggcacacatggccggtcacatctagtcgttcggaagccgcggcggatgaagccattcggcttgtcacgatgactgctactacgaatactcctagaagccgttagaaaattctgtgctctatcgacctgagattagccgacgcacaaagcctgcgttttccagggtatccttgctgtgcagaaattcgttccaagagttacgaccaagccgttcgtgacaggaaacgaaaatgcttgcaagccgaacagcggtcattgacgtttcgatctccgcatgcgcgcagacagccgctgtcggctggtcagaccacta

SEQ ID NO: 1232 - DNA, 3506 bp, Toxoplasma gondii
  source 1..3506: mol_type = genomic DNA
cttctgtggtctcgaacactgctgggttgtgcgcgatgctcagtggaagcgacacaggaagtttagccggttcccgtgtcaaataaaacgtgatttgtctcctccagtgggcaggactctctctctctctcggctgtttctgcgtcgtcttgcgcctttacaacatgtgtgtttaatactcctgtgcttctcttcagacgacttttccccggagcaaagggaagatctttccgtgggtctgcggcttctgcacgcctccctgcagcgccagtcgccgtccccgcgagcgcgaccccgagggtcctcggcaccctcgtcgctcgtgaggctccagagccgagaggtccgcatccgcgaggaaggtgctcagaggcagagtggcggtgggggcgagatgcaagacagaggcaagcgcgcagaaacgacgcacaaggcgagcaaattggtgctgtctggccagcaggaagattcacaagaaattgtttttttctcttgcagggatgcacgcaacatgcgtgcgcaggtttccggggcagaatggggaaacggaagtgggatcgaggtgcgggcaggagacgcagcgacggaaagagaagatgattacaagcaagtgattgcatttcttgaaaggatacaggaacacaaaatcttggagaggaaacatcgttccctcatttcctggagtaatcgcaggtggtagtcgagctggtggcgcaaccggtcgcgagacatgcaaaaaccctagagtaaccgtttatgggcaaagcatttgcacacgcctgctcgccgatatccttgctaaaggttcaagcgcctgtgaaaaagaacgcgactgccagtgacgaaatcgctcgtttgcattagaaaaagacgcgattcaccccatctatcgacgtacacgttcccgcccgcccccccgccggtttagcgtaccctcggcgtttgttgtggcggaaagttgggtcacttttcaatagtagcgttggcattccgcgaacgtgtggttgtaacttctctacagcttcttggtcccggcagacgacactaacaatcgcatctctgtgttttgcatgtgtcttttcaaatggttgcttccttcatccttcaaacggaaaagcagaatacaaccgcgtcgctggtgaatgcgttttttccaatctgtcacacaggtggtcgcaaaggctggaacactcacttaaatgatagacatagggcgaaacggggagttcagtgcagaaaaaacgagaagtcccaagtcgctggaagcgatccgtcagtccttcgtataatatcagagtactagaggccctaccatctgtatcgcataacggggtatcagaccgaacctgcgatagatcaatatagtttggatgactgtagattggagatcagaatcgttgaagacgcctcgatctttttgagttttcgcgcgcgagccatccattagatcataagaaaatgaggagtaggtcgtgttgtgggtaccaagagctgtcaagaatgccgacagactcaaaacatgcgatagaaagcaggcaaagctggaggagcagaagctgcacacaaggctgctagaagtcagcttcatttttttcgctgctttaatgccacagtcatctgattcatctaaagcttgtctatacagcaagcgcaaacgggacgtaacgcccgcagttttatctcccgctgtggccttttgaaaattctgacatggtcttgaaacctgtgttgccgcagtacccaggaaaactgaacggaaatcacagtcgagtgccactgagtaatggaaatgttttcggtttccacagtcgaagttagcacaagacttcctctccacgtatccgtaacttcttcattaattccacgtaactaggtgtcatccctgctttagagaaactggtttgattacctgtagcgtgcgtacacgagaccctacggcgggtgcaagtcacttcctaagttacgcgccctctctcactgtttcatccgatatacagccgaaaaaagagaacagctgacttgcgtgtgtcgttgcttgctgtgtactcttttctttgatctctgcaaagacaatcaaacccgcttttcaactcgcacccagtatccgcgagtgtccgccctgtcatgcctttttcattttcttaaaaaacgctacagtcttttctatcgatgcctttcgagtgtcattccccctccctcccgttcccctgcctaatgtctcactccgtaccatttctgttttcgttgtctgataaaggtatcttccaattcatccgttcaactctctgtcctttggcaggggctcgtcctaactgtgagtccaatgaatcgtaagaaacggatttcgaggataaaaaaggagaactacactgcgcgtatcctggattactcgtagtaaacacaaacttttagacataactgaaggtgtgaacggaagcagttaacttttgcaacacaatcgtgtgcagcaacgtagagtaaccttgcctcactgaggctgccagtacgatcaagcgacacgcacgccggaggaggggttgtttctttttttgatgttctccgcgtattacccggccatgaactcgcatgtgttttgtcgctctgcaactgcgactcggtatccagctgtgcaattcacgaacggcctcgcttagcgttttcttccgacgcgcctttcgagcagaccgcgtcgagatcctaagcgacctccggatttgcttctcacgtcaagcggctatacagtgatctagccgttgcggaaaagagttttttcagatcctctgcagcctgttcagtgtactaaacaagggagttcccttcggaagtgtagctcgtttcttgaattggagacgcagcaggacttgcacggagctctctgggtttctcgggtctagtctcgtttttttcttcgctaaaaacaaagccgttgcttgcgagttttgcaagattttccaggaggcttcgagaaccagggaaactcgggatctttgtcgctgcgcttggatccggtgtgccttgttcgccaactccgtccgtcgtggcgctaccgtgtacacatgcaagaagtcgaaagtctctctttcacttccggcttcttgcttcctgagacaccgcttttctgctgttcgttttctcccgtgaacttcgcacctgctggcgtgtctctgccgcttctttttcgagtaccatgggcatctcgctcttctcgggacgtggctggccgtggcgcgcctccgcgcagtggcttttctcgtgagtgtcaggccgaaaaaaaacgtcctccccgtccaatttggagtttttctcacctgcacaaaatgccgctgcgccatagagaggaaccgctcgcgggaaagttattcgaacccacatgtccctcacctgtcgatccacctccgactacgtcggtgctccagaccctgaaactcgtagaaggtcctcgtcctgctggactcgtccttttcatgtctaagtcttcaagttccacttgttcgtttctcgcagaa

SEQ ID NO: 1233 - DNA, 2345 bp, Toxoplasma gondii
  source 1..2345: mol_type = genomic DNA
ggacttgaacctgtcattcaggtatttcatagacggtgtttcgaattttgatgctgtttctgtggtgaatttcggtgcggcttctcctgttattgtgttgtttgccacagcggaatgctcgcgtccaatccggcgcagcgactttctctagaggctgttcgcgggcatccatggcttacggggaactctttgcgttttcgccggtgttttgacacctcggaagcctcgtgacatccaagggcggctcgcgctttgaatcgtcaaatgacatttttgctgtagtgcggacgcggtgacgaacgctgacacgagccttcatttgggtgctcctctgtcacaaatcgaggccggaaaataactttgttccaggtgtaaaagcgagctgagattcgatgcagtcgttttagacacaaaacgtacactctctagggaaaaggcgcattgtttcatgccctgcggcatagcgctgtctcggaccaaatacttgattaactaataacatagcttggtcagttttctctgtttgaagggggcaaactctccattcgggcaatctccagcaatttccgaaacttggagcttacgaaaaagagtggagtttctgcagatgcccctccactgtattttgcgatacggacacagaagcgattggattgtgagcacctgcctttggtgttcctgtgaggatatggctttgttcatgggcgaaatacgatttgtgtgacaaaccaacatactgcgttattgatggaatgctgacacgattcttttgactttaccttgttttctataggctgtacgaagtagttccatacgcagagtcccgatattctcatcgacaaggtattccgcatttgggtgctgctatattgcaaacagtggcgaagatgaaagatttacaccggaaatgtcgccgaaaaaggaaaaagaactttttctgtctctgtgcactacgcactggcttcgtaccgtccacgttttaggcatttgtgcctgttcggcaaaaagtgtgtcttgttctgcgtggaaaaaaacatagactgagtaacacattgacgtctcggtctgtctctcgttttgtgctcggaatatagacaaactgggatggaaattagctttgctgtctacacctcgtcctacagagacggacgtcggaaaaagtgtcgcgttcgttttcccgtgtcgctttaaactcgggtgaggtaatcatagcagtttttgaacagacacaggcatctcagttgtcactaacgacgcgaaaggcattgtgtttcaaggaataggggtgttttgacaggagctagcatctaaagacgtgtaaccgagtaccacctttgatgtacaaatgacatcattagtccgtgtgcggtttgcacccactggactcctcagttgaaacggaaccggagtctgtcgggacgtcagtcagtgcaattaatcaaaaggtttgttcagcccttctatcaaactgtagaccaagtgaatctggaaagaacgcggatgccggaattagctggggaagaagaaactgaactgaagtttgttttttggttttcttggcagcgaaaacggcactccgtttgtcagagtccgtatcgatttgctgcaactcgccagcgttcggataagtcgaagctttcgcttttctccaaagcagacgaactgtctgtttcacatcggggtgatctttctgaatctactctcaactgttctacgtcacatgcgtgacatcgctgttccgccggatgtgcttggctagctgccctcacccgcctctgttccgacagagcgtgcatgcgcgtttgcctgcgtcaactggacagacaatttacctgagccaatacaaccactgtttttatattactcggaaagtgcctgtacatagtgggttctcatggtagttcggatttgtgcatttccgaaaaggctggaggagggatcttcccagaaatgtgcagcacgcgtcggcgccagcggagctgaatttgcagtcgtcccccgtccgctttttttcccgtgttgcatcatccaaaagtgtaattcggacacacacgttcctcatacaagcggtctgcaatttcgtgttccgttggaagtgacctttggcctcacctcgtcgaccgctcggtcgccaccttttcacggattctggggaagtgaaacttccccgtagtcacagacagtcaaaaactcggcgtttactggaaaagttcgcatcggacccaggtagaaccgatcccttccttcgatacaaagatcccttttggtttttgcggcgcggctctaaagtttttgggtcgccgaatcccactttttcttccgaccacttgaaccctttctgtcga

SEQ ID NO: 1234 - DNA, 2387 bp, Toxoplasma gondii
  source 1..2387: mol_type = genomic DNA
atttgaaacacattgtttgattttcgatgggaggccttagcatcaggagtaccatgtaatcagtcacaggtcacgaagctagtggtcgcttccaatttggggaggaaagccttgtgactgccgccatcatcagcaagagcctcttcgtgtgattggtcatattgaacgcattatttcatgctgttgccattgttagcctctttcacatgcatccgactgtcgctttcgtttcttctgtcttgctgccgatgtggcgcctgttactggtttcaaattatatcaggcttgaactgaagagcgatcagtcatattctcctactccgcccgttaccggcgttggggacgctgtggaacagtctacagcgctttcgttccagctttctgcgtagcatagcaatctgtgtgcagaggtatcaacactttgctagtttctgcaaagcaccgactgcaatagccgattattttcccagtcatttccaccgaaatcgagcaatcgcatgtcacagcctctgaactgttcagcatccgagtcaggcgcattgttataaataaagcgaagcgaacgagcagcgtaatggacgcgatggactgccatgcaagccgcatagcccgcgtaatccccaactagagtgaccgactaggtacatatccgcgagttgcattacagacgttgcagaaatgccttctgacttgttataaaagtgatgggtgtagaagcaaattcaagtgatacttacttgtcacacacaaggtcattatctacgggaaccaaattctgttgtgtaagcagagcacagtggacatcgggaatattttagaaagagaaccaactgaacacaatctattaggagagcaaaaacaatcgcggtggtatgggatccctctcctcttcttgaagtacacttccgggggggaaggcgtagaattcgcatgtttgataggcacatgtcattcgtctctgggatagcctgctcggcacacagggacaagtcgaggaacaactacgatagcagccccaagccagacgcataactcctttgtttaacacgtgatccggttagtctattgcaatggataactaggaactgcgagctgttctgtcttccgtgcccgctttcggactggaacccctcagtcagcatgtgaatcccgagtcactctactcagagtttccccaatttttctctcggtagaactccattccggatgacatatcaaaaactgtatctatgttttatctaatgacggaaaaatggaggccgcggaagaattattgccatcctgtggtgtcgctcatttaaagtggaactgggctaacagctgaagtggcaccagcagtgccagttcgcaggcggcacaccatgaaattataggtgactccagtccaaatgatcaattcatggactttcgtaatcgtttcgatcagaggaatcgttggtaaatcagagatattcccgagcgtaagatgcgtataacgaactggctcacaaaactagcgagacgatgagcagacgtcaagtcactagcagttgacgcttcccgctccatctgattcccttttctgagcatcacgtggccgtgtgactcgacatgccaccccattaatttatgtattggttccaaggacccaggcgtgctggtcatcttgtgtcaacctcgcccgacagtcgacagaatgtttgagtctgacccccaaccacagcacggtcttcacatttcattcacatgactattttatctatctacggaccaattgcgacaccagttcatccgatttctgcttatcttacaggtggcctaaaaagcggtttagggaggtctcgactaagtcactttgcaggagacggccccaattatcaactccacggtagtccaaaacatcggcagaaattaagacacggttgtcatgtgcgcaggcgccgagtggcccagaaaaaccgtgccttctatactcgaaggcggtgatccctctagtcattgccgatgaagctgtttatgccgtctgtctacactacactatcagcacgaggaatccagccgacctgccgagcatggatggccatatgaagacacgggcagctgttctctgaaacgaactccaccgtcagacctcacacgattctcgtcttaaacgttctacttcacatctgtagccatgaaatgttggctgtgtaagaatttgtagcattttttagctcacaggttgaatttgttttctcgcactgaggaaggctatttcaaaacgattcctctgcgattcggcagacagccgcggaggaagctggggtgaatcgatggcctattcgataccccaccaacatcatccgttgtacagagcttttacatctgtcaacctcggcgcagggaaaaatttgtaccaataaaaa

SEQ ID NO: 1235 - DNA, 2170 bp, Toxoplasma gondii
  source 1..2170: mol_type = genomic DNA
ctctttgagcttcaaggacgtccggtgcagctgagtgccgatttccgccgcggaggcattgaaggagttgtcggcgtgtcggactgtcctactgcggagttctcgggcctgggagatagctcctggactggcgcgctccgcgaacgccaggaaatccgccgttctgtcgcacggcatttttttgagaagctagaaaccgctgcacgcgagtttggagctacccatgaagggtagagcgaggaagagcggacgaccaacgaaacatctgttcgcggatccactatgagaaaacaaaagacttcaagacaaggatgggttgaaaaaagcagggttccaccaccagttgtttcgcgtcatcgaaggacccttattcacaaaaaggaaagatgcgacaggaaataaccactggatatttctgagagggagtgctgtgtacagatgagagggaaggaacgaccgaaaccagcgtgcctttatcactttttgccgcaacggatcgttacccgtgaacttgtcctgggaaaggcctacggaaacaataagtgtgtagagaaacggggaaaaatggatgcacgacaacaaccacagtggcaaaggaggcctagtgaccgcagaagaaagtggcaggggcacgccaaagataattgtggcggggtcacctctatgggtgtctttctgagacaacacagacagaaccagcttgaaagaataaacatctcatccttttgaccgagccactacctcatcgacctacgtagtgagacaaggcatcaaacgagtcgaaaagaaactatctcttttcttacaagagccaagcaacgagcaaagaaaaccccggaggtaaagagggacgatggaagaagagagaaacgaggtcagcttgtcttgcgatactgctgaacggcgctctgagtgactagcggaaataaactgccgctgatactcccgaaacataacggagactggaaaaagtcggaaaatgagaagaaatgacgaaacggacgtggtcttgcggactcgaacaagtcatgtatagctgagcgcatgcagaactgagcagagggttcccgcggaagcgaaacgcgtaggattgaaaggcgcaaacgaacacgtacgaaaaaacccaacgtaataccgtggtgaagaattgacagccttgattgatggttcaccggggagaaatgttgctctttccctcttctctgactcgcagaaactgacaccgggcaagggcgcgttctggtcttccgaagaggatgataatgatattcacgaaagcttccatagacacacgatctccgctccacgtttacaggagcgtgctctgtctatcttcacaggtctctaaggtggagtttagtgaggaaagttagtaccagtgcgattcggtgtagaccagtcttttcatcagtatgccctaccctgaagacagaacgagtctagctgtcgcagtcgcgcttcgacgtgaaaatacgcaccgcatgtacactcgctcacggatgcgtttgcccgtttggttgttctattcatccgatgatgagaccaagaagtcagcgagaaactgtgggcggttgctgacacttctacagtttgaaaaagacgttcgcagttcgaaggaagaatgcttgacacagagtgccggttgaatatcgcagcggcgcataccgtaattgcggcgcactttctacttgtgcctgtcaaaggagtaagggtcaaaatttcgtcctgtcctttttgcggacatgcaccagcatgcgtaagatgcagccgaaactggtgtgccaagaccaaaactgcagaccctggaagcgaagcgcatttgtagtctctgtagatttgcccctcttccggcactgaacgctgcccaccagaggagccgtctttcgagattgtgcctgtgcctatgcggctgcgcattgatgtgctgcgtgctctcgacggactatcgaagttgaaacatgccataagtgtctcgagttgcagaaagatttcttgctgtacttggttgcgggccaccagcatccttggctccaccctaaaagtcacacaaagctgttcaacatttgccggtgagggaggaggaaccaagcatttgcatttcaggagaaagttaggcagcctccagtttttaaatctgtggaacatgtagcgcgtggctgctctttccaga

SEQ ID NO: 1236 - DNA, 2421 bp, Toxoplasma gondii
  source 1..2421: mol_type = genomic DNA
ctagctacatcctcacctgcaaagatatcccaagcagccaagcagagaagaaggaatgtcgtgggcgtcgacggcgattctgggctatatttggcaccgaaatgaagcaggagaagttggagggtgaaggcggcggcgcttgaagtggccaccaagaattgacttcggattcggaggggggctagccagagaagagcaaacgccccacccacgcagaggttccagagagcgatgagtacgagcacggtgtcgagctgcggagcaaccgacagactggagacgccatctttcaggtggctcgtggaaaaaacggagtgtgatacgaaagccagcagactgttttgctcagttgcaacgagaacacccccatcgtctccgttcgtttcttgacggaaaacgggggccttgcctgcgggaaaggcgacgttctgtgtcaccgcgcctgccttaggctgcaaatacctgcatgcaaacaaatagaccgctcctccgcaaccggcaacgaggctgaaggcggccgaggaagccattaggtaatagagaagtcgatgccatccccagcggatcgcgagagccagaccaaaggtgaggacggcgacgtagaggagcgcgtcgagacccagttcgaagaagtgcgagacaaactccccgtgaacgagactgaagaggcggcgcactgtacagacggctcgagaaacgtctcggacgaaactacgcgagcgccggagcgaagacgcaggagacgaggagagagacacgctgcctccctcagaaggtgcgtctgccgtagaggacgacgagacacatgaaggaggagagtcaggagagggaaaacaaggagggggagcggtgggaagactgggaggggagggagaggtcaaaagcaaggacatgagcgttgcagtgagcatgcagatgactacaggacgaagcagacccgttacaagaagcgtcgccacttggtttgcctccctccggatggcgctcacaagttggcagtgcatgcgttcaagcctctgaagcctctccagagttcgacctcttccgtccgtctcgaacgcgctctcgggggcaagcgcgggccgcgaagagcgcggggtgggaggcaggcgctgatgtccgtcactcctctcgccctcagtctgagggacgccacgaacctcccgcatcctgctgaagacagtgttcctctcatggagtcaagcgaaacctcaacatgcccgcaagcaaatgaataccttgcgctagctgaactcgctttgtttcaggaggcaggcgctacacgcaccacagtccccctaaagggacatgcatacagacatggacacaaacatatatatgcaagtgaaaacccgtgtagcatacctacaccgagaggtcatgaaggcactatgtatacaggcacgtacgatttacagatacgcgcgttcacgcacccagaggcgtataccgctactgacgaatgcgtgtgtcttctgaaggagaaacgctatggaaaaaaataggaggttgggcggaggtccgcgatggcaataatagaggcgctcaaagatgccatattccgtgtccacgtgtgcttgttcggcggtcaaagcgtcgtccttccaacagtcgaactttccaagcgaaaagcacactgcgcgtttgttgagaatctgccgtcagctgaaggtcgcttacagcgtcgctggcataccttacggaagtggatggcaaaaacgtcattttagaaactcgacgatctaaagcgtgtcttctttcctcatccatacacacgttctcctctggctcgtggctagcggtaggtgtgcgtacgtcaggctgtaccacgggagcgagacgcgtccgtggaactttacgatgcgtcggacgtagtaatgccgtcactacacgcacacgtcgacgagagaaacgaaagaaactttgaacgagaccataagtgttccataacagcaggcaaaggtgcttagagtacctcgtaagtccttcggacagacgatgagaaacgcgtgtcgcgacagagggcgatacgcgcgtcgatttgtggtttgcccttctcgcgctcaccgcctgtttttcttgcttgacctcccgtgtgtctgcgtaaaagaaaagtgtccttgcgccttataggatcgattttctgcatgcatgcactgtggcacagacccggctttggcagcgccttcatctgccccgtgcagtacagcgcgtgctgaacagggtctgccccactcgcctaggtggggagaagaagcacagaaattcgtgggggttttcccgggaacggaggaaaatccgccatttctgaacagatgccgaagcccacccacctcgggtgaaaagctgtcttttgcttttttcggtgtttttcttttctgtatttctcgagtctcccgcaccggaaaaagcaaatcaaaa

SEQ ID NO: 1237 - DNA, 4914 bp, Toxoplasma gondii
  source 1..4914: mol_type = genomic DNA
attgaggctgacgtcgtatcgagctgcagcatcggccgcttcatcttcagccttcttgggagacgtttgtcgccctgaagcgaatgccacggggcgacagttgctccagagggcagcgaggctccagcccccgccagtcgttgtgcgttgttctgcgtctccaaaactgtctgtccccttcgctctgtcagaggacggcgcagtcaagacctcttcgccctcgagtctccgcgacctcgtgtcatcgagactgaggcgagctgccttgagcgtcttgccgtctgcgccttgcgtcaactcctcaaaccccggatcccacttcctcgacaatcctttcttcgcttgcccgccggtcccgtcgggctcactgctgccgtcttgtgcgcgtgagcgctgaagtcgagaaggcgaactcgcttcccctgaggaagcagctcttggagaaatgggcgacgcgtcgtggaagaggcccgactctgacgtgcgactgcggctccgagaattcgccagaaccccgagatggacctccgcggacgcctcaggtcctccctgctcaggatgttctgtgtcttcggagtcgacgttcctcctcgcctgtttccacgtggacaaaagaggcatatctgtctgcggagtggcacaggttcgcgcgcatgtgtcgtcagtctcgtgtgaccgccagcaggtgccgggtactgggtcagcagcgcccgctcgacgactctgggcaactgggtaggagcatgcggctgaaggcgacgtcccaggcgcctctctgcggtcggacctttttggaaaacccgaaggtgaactcgcgaaaaggggggcggctccttgtcgatcacacacaaccgtggctgcacggttagtcggcggcggattctggggtacacagtcaagaagaggtgatacactgatgccagagttggcagaaggagtgttcaaaggaaacttacttgaaaaagacaaacgatcagtgaaccgagactggacatctgacgaggaccgacatgcaccatcaagagctttggtggggcacggcatgatggacagccgagggcacgctccgagacagccgcttaacacacgcctcgagacaagacgagtccaggaggacgccaacggcgcacaccccgaaagtggccggcagacgactcctgactgctacaaaggtaaagacgattcggtcaggcttgcacagcgacccaccagaaaaaagtcggtggtgacggtcgagaaaccctcggacgaagaccgcctcaagtccgcagagaagacactgaatcgagtctctggagatttcgtactgaataacaaaaaaacactacctgccagatgttgtgttcatggcctgacaaggggcatctgagtcagctgcacgctgtctacccgtcagcaagcccccagtagaaacgacggtcactcgaaaacccgggtcctgcgcaggaggccagagaaagccgccgactgctgcaaggcgtgccaatgcgagctaaatctgacctcagagttggacgttccgagctggcaatcagaaactatccacactcacaacaggtagagtgccaagccgtggaccggtgctggtgtacagacaccgcgtcgatccgtgcccggcagcgagttttcctggaaccgcgacaacgtgcacagaatggcgggtatttgttaatcacggcgcctgaaacgggagtcgtgcaccatcgagacagaaattgtccgggcaagcttgtggtaatcatacagccatgctgtcgctatcttcgtggcagatgtgcctccctccatttgcgaaaagcgcgctccgtagttgccccgcgtctgatgcaacaagaagcaagggggtggcttcttccccccttccaaggggtggcggacacacaaaccgatcacctccattgaccacaaaactcatctcgcagctcttcttcccgtcacttcctgctggtaagacagcagtgaacacacccccttagaaagcggttgtcttgtgtttgcaaatttgacaggatcttcggtcttcacgtcgaaaatcagattccgttagggaaactaaaatttcggccggcacggtaacggtccccaacaagcaccgagaaagatccaccaacagtgggggtagcaactcggcaatgcagcggttgccacaaatgttgctgaagcctaactcggttgctgccacataagtagcactatggtgtgcccatgcaaaaagtttacttagcccgttccatttcgacccttgaaagtcatgacagcaactagttcggtgcactagacggcacaaccgccgccagacgttatgtcttcccggagggtgtgcatatcgcaagacttggatgcataataacggaaatgtgcaacacaccgaagtggaggcctcatgcacagacgagtgcattcaccttcgatgtcttcaaatggtgcttacaaaacataggttgtcgcgagagacttccgtgcatagctttccctgtaatcctttgtggtctggagacaccctgaccgggtgtgccgaagcgggtcgtgtatacgaggggcaggaccaacacgctgcacaggggaacaagttttcctgcctctatctggtttacattctcgcatgaagttcttctctcgagtgcacttgaagcaataataagatgagcccgtggaatacagttggccgccgggcacatccccctgatagccaagtacagccatgcttactgtcaggctgacccagcagttgtggtacaaaagaagaccaagatctcgtataaatagacaaaacagatcgtggtgttagaattagcatgtcattgtatgtggtcgtcattcaggtcgaggtgcaccgcccgttcttaccgacaggccgccgatcccccttcctggcggccggcgaggtaatcttgagctcttgactggcagtgtctcagccaccttcagattttccacgcttcgactaataatgttccaccacctctattgcctaagaagtgcttgatacatcgaagtggacagtccctcgtgtctgcacgaatggacctacaccttgttctacgagtcggctctacgccgacggcacgccagtctgtagaacagattcttgacatgcctgatgtgcttggaactatgcacaagacacccacgcttggcagaggaccttgaggcaccacaaggcacagcctagcttcatgatggtagccacatgctcccattgaaacaccctgttgttcgacttgtcttgtgagtaaccggaacagaaacctacatacgaaacacgtaaaaacaggatgaaacagctcaggtggcgcggcatccgctgtgtcactgaggcagcaactaacaccaaaattttatcgaggaacctggacgcgtttgcatgtgccgttggtccaatgtaccactttccacgtgtcttgtgggagcagacagttccggggaaatgcgtcggtgcattacatgacactgcgtccgttagaaacgtggtcgcagccacctgttacgcaacacgtacgtgcttagccaccagaaaacgcaggctgtgacggaagggtgacactccagtaggagaggaaatcctttgtaattgtctatgaaatagagaaggccaatacgttgcggtgtcaaacttccattccgtctctttacatcgtcaggtgtgtggactggcggtagccatcagatcttgtgtcttgcatttgcggctcgtatctgcgtctgtgtgtcctaccgccttcacggcaggtcgctttggaggcgggaccgttcaaacgggacctcagtctcctctgtaagactttccccatactcgaacgatttctcgtgactttgtcaccagctcagcgtttcctggagactccttcattcaggtagcattgcttaacagtaacaaacgttccttccatctttcttctggttttgggacttcaccgcagaggtcgtttctatcaaagcttgtgttcaaacccaggcacgcgccaggcgagccgcttgccgctcacgcgcacacgcacacgccctgcacactgtgtcgaggttccggatttacggtgcggatcagtcagaaaaaaccttcattctccctcgtgtggaaaaccgagtgctgcagacaatcgacggcattggatccacacttctttgatgcatagaatggacgtctttttccgggaaactcggccgcgaaccagccatccaccttgccggcccttccaacgtggtgcatgcgctagaacagaaatattcagctgagtccggaacagctattgacgcgggaaaaagaagcacacgtgaagggtccatgaagattcgtgtttgtctaccttcatagaaaacgccgttggacggaagaaaacaattcttctgagctgggcgtgttgtcgcggcgaccttgcatgaggtttcggtggcgtggaagagtcgattgcggtcccgactacgacgcaacgtccgctaattcgttccttccttcccaactcaactgtcactgcgactccttggacaaaagagaagccagacgcctgctggacaaggtgtaactcgtgtctcccggctggacgctgtcttgcttgctgctgcaatctttggccgccacgcgttcgccacacgcgcttctcacgtgtattgacaccggcctctgtcgtacttcggggttgccttgaactgtgtctcatgtgaggagccgtcattcccgcgtacttatcgcgggactgcaccacctggtctggtccatttccgtatgtattgatacacgcctaacacgaagtgcgtcctttgtttttactcgcacaacaaatagccatcggcagaccgcggtcgatgtgtgcgcaggcccttcgcagcccgttggaagtgagccttcacgcgcacctttctgttcgcagaacaggcgatttggcgtctatctcgccgcttacctcccggcaggcagga

SEQ ID NO: 1238 - DNA, 1465 bp, Toxoplasma gondii
  source 1..1465: mol_type = genomic DNA
ttccgcctcctaatcgagactctccgcatagatctgtcttgttctctccttcgctcctttttcttgtatcgtcctttactatttctccctcgttatccactcccttctactcgagttcccctccttttctctttttcccgcgtttctctcacctgcagcaaaggaagtgactgcggggtgctggcggctcttccgccgcactctgtcggaagctccatcttgaggaactcgggtgtatgtacaccgcaagagggctgctggcccagggcgaaaagaaggtacgatcctccagaaacgcttctccctccacaagcatgcgcacgcagacacctaccactttacaaggaccagcaccaattaaacatatatatacatatatacatatatagatatatgtatatatatatatatatctacgtttgagatgtttcgacttgagcgacgactcgaggggggcgacgcttagggacgctagaaagcagagcgcggtctttgaaagagaagcaggcgacgcgaaagatctcgaagaaaggaaaaagactgaacacagacgagtgaaaaatcaatttctttctcatcacctttcgctgtcagccgcacatgaagtttctccggagtttccctccctttcgagttccgaaatttttactgacgtcgaacgggggaataaacgaggcggggaaaggaaagaaaaacaggagaaacagaaaagaaaaggaggagaaaaggaggagaaaaggagaagaaaaggagaagaaaaggagcagagggagaaaagaaagcacaagagtcaactttttcgcgagcaggtgagggacggagacactcaaaccccacacaactagctgtctccttcacctcatctcttccttcctcccttgacaccggcacgagagaagaagaacaagaagacaaaggggagaacaaggagagaaggaagtgagagaagcggaggtcttttcgctcgagaaaatcgccctttccagctgcttctgggtctgtgcatgcagcgaaaaagaacgcatgcggggcaggcttgttgagggcgcgatattcgcggaaactcgcttgtttcacctcgaaaaagtcgtttttctgtttctgaaaagaaatgcggaaaaaagaacacgagcccttgggaggctaattcttcgtcgatttgtcacttctctgcatgcgtcatcgtctcgtgtctctgtctctcttcgccccagcgttcaaagttcttcgctgtcttttttcttcttcccctttctctttctttctctcctccttttcctctttttcttttctctccctcctctcttgttcgcattttctctcttttttttgtccgtctcggtcctatcctcgtcctttgtctctcccgcctttgggctcgccttcctcttcctcctctcttcctctgatttcttataaaacagtcgaagcccctcccggcatctcgtcttcttcgtttccaaga

SEQ ID NO: 1239 - DNA, 1348 bp, Toxoplasma gondii
  source 1..1348: mol_type = genomic DNA
agacgcccagggtgttaaaacgctcgtgggcgtagaaatttcagaagggggggttcacgtagtcgcccccgtgggagacatctacgcagtagatagtgcacgtgtgtgcacaaaaaaccacaacagcaaacgcccggaatccagcgcttcaaagcaacaatggcagcgccttcccgtcagaggtcgaatttccgcatgtcctcgagatcgggtggtctgaagatttttgtagtctacatgatgtagtgactgtgtacagtagatcaaaaagaactaacatgccacatcgtctgtcgacctcgtccgcagacactccgaagctctgcttcataaattgccctgaacgcaagtaaagttattcaaaaatgttcgtaactctatagtcacatggcccttactgaggcaacagatattatcagtccatcggacaagcgcgtcccgtgcgtacgcgttctcctgtatcatcgtctggatcttctctggatcgttagctaccgcctcagacacctgtcgtttgagttcggagagctgccgcaatatcttttctgctcgaaggacttcttcctgtacaccaggacagtcgatcgagatccgcggggcgaactgctacaaacacttactggagacacgcttttcgtatcagcaaaggttttcctcagagagtttaaggcactctccaaattcgttttctgtttcctggacgcactagtaagatgctgatggtaaggtcagaaattgtcttggcgctaacatcagtttctccaaggtcaacagcctttgcgccgtagcttcgctcttcagctccctgacccgtttaagtgttagatctgattgcacggtggctgagaagaagctgaccaaaaaacggaggatgatcctattttgtctgttttgaccatgttttcgtcaagcaactcttttatagcgtctgtaggagacgagtgacgtatgagaaccacataagcgcctgtagaagggagtaccttttgcttgcattgctctgtagcctgctttctcggccatcttttccaattctttcgagccaaaaaaggactgagactccagaacagcctcatggaatttgcggagacggtcctccgcagtctgtttagacttggccattagcaagttttacacacgaacgctgggcggaaaaagaacagaatttgccaaggttgaatgggcttgttgttcgtgtcagccatcatctgggttttgtctgccagtaaagcattgttgtcagtggcaatataaatagcagatagtttcaaaacattggctgtacatacagcgtgtttgccaacacgaactggcgttcgctcagccgaacgcgcccactaattttcta

SEQ ID NO: 1240 - DNA, 3865 bp, Toxoplasma gondii
  source 1..3865: mol_type = genomic DNA
accacagattgacgcctaaattttaagaaccgaccatgtttcctctcattctcagttgcggattcaacaggttccgacggcactgtccgtacgccttccgcaacgtgatgcagtgcgccgtcacttgccgagggtcttcgctgtggcggcactgctcaaaggtgaattcgccgctctgcatgcacggagacttctgcaggcagcaattcaaatgaatgcagaaaacggaaatcgtgggtggaggaaaagggaatgaagggagacagcagataggacctgggggaaccgatggattttttcggccactttgagcttttccgtgagagagcgagtactcggaaaaccactgaaattctcaatctgaacttgaaatactcaaagggaaaatcctacgaaccagaaacgtcagttcgcgaaatacacggtacacggccctcgcgtgtctatctccgtgactcaatgaaaagccgacatgtgtgctagacaagcaagaggatctccacgatgggagtctcctgcctgatgctcgtctgtgcagaagactcggattcttgctgttctggcacctgttgagtaactggatagtcgctttctactgaacaatcccttaggcccagacgaaaatgaaagcagaaacgagacaagtagaagtgagacgcaaacggttcccgcagaggcgacagaggccaggaaaaggtaaagcaggtaaacagcccttgagacggaaaaggaagaatacctgatagcatgcgatcatttcctcgtacaggcgcttgcaagagttcgaggcctgtctgtacggtttgtcttcgctcacgggcagcgacattttttagccagttgactcagagaccccggcaaaagtagaaccactcgcgggaaaagggagaagcatggagatggggagacgctaggcagacatgcgaaataattttggaagggcagtgggcagcgaaggaagaaaagcagccttttacgaacgtttactcacactgcggactgcaacggcacaactggaacgggacagagagcatctcggagacaccgcaaacaactacgtgaatcggaggtaagcgtaggaagctccgacgcgagagtatgcagcagtaaacggaagaagaagaagaccttgaagaagaaagaagcataaactacacggtttcgaacgggatcgggagccacagacaaccagcagagatgcaggtagcggatgcatgcgaatattgaggacgagtctacttcacccgggacgcccatttgggaacacgcgtcgaaaatgggagatcccggaaacctcacagggaaaagaggaaagaggaatgcagacgctacggaggtgcgaatttgccaagcgaacagccactggacaagtcatgccttgtttttaggaggatgcatgcgcggaccagggaaagacgacgcgcgagacttggattcttctgaaacgccgaaaacacgagtgagaaaatgcaaggctctatcgagataaaaaaccaattgctgctctgtattgaggcgtttgttttatttttgaagactgtacatgcatatgctttcaaggaaggtggccttgaaggcacaccgcgagtatcgatcgggtctcctgaacctaaggaaagacactttggaaataacaagatggcgttcgaatgacgactcacgtttttctttctcataccgcactagagagcacattttacaagccaggagctggaccatatacacgctgcattaacgcatgatcctgtacatataaccacgcgcaagcagtctatcttcaccatacaataacaatttctccttgccttaatataggtgaggcgcaggtcaggggggaagccaacaaggagcaatgctcgcgttcagttaccggtcaggaaatagttatgtccacgactccctcaagctgcaaaactgcagagcagtcactttcgtcaagttgcaataatggttgaaaagccagaaacgcaaatagacggtaatgctcactctttgttccccgaggtttgaactttttagctgcaacgactagcccgacagaaatgcagcagggtggcatggacagtagggtagaactccagagacagcattcgttcgtttctgtgctattgccgctgcgcaagttttttccaccttgtgtggttagagagggaaacccttgacagcaatatattgctcagaatagcttgaatagcatctgttgggagttgctcagtctcatttctaatgcacgaacaaatccacgggatctaccggtctttttgtgaaatacacaaccacacaccagttgaacaaaagcgacttcgattttgaatgtgtccttgtcttccggatccaatttgtattgtgctgttcatgaccatcgtgttacattacaacagtgttaggaggatcaggggttttgagggcaccaaacgtctttatttcaggtgcaagaaaagtaactcgaggaacgaccgagcattaacctccaggaaatcagagtgagctcaacaagcccttcggattggtctcagagatatgcaaaatgtcagaggaacctgcgcttccagcattgcccattaacgatttttctactagctgccagagctgggaacccgagagaaaacggcagtgattggcgtatagattgttggtggtgaagtgcctcgtgatctgcctatcacggtgcagacttttctcgatgatgttctttagtacaacttgtgcgtctgtggtacatgatattcggcgtagaatggaatctccacggtacgggggacctttgtttcgtaacactttgacacaggtgaacactgccagagggaatcgccgctgacgcatgtcctcagaaggcaggggtcaactgtctctcccctcgttttcttatagcgagcgatctcagtgaaatgtagtgtgtgagttcgcctctccgtttgtaacagtcccgaaggagttacttacacaaacggtgttagtacacaacgaaacaatttattttggtggtgaagcgcgtgcgaacttgcgccaaaaatgtagctgcgtgtatattgaacccatggactccttcaagtggtcggttcttccgcttcgctgtgctgtctggttttgagtcgctatggcagctgaagtgctggtttcccttctctctgtattggcaatcggtcttcagcatctgtgctcttctacagtcaatgacgcactcaaaattccaggccagcggataactgtatcagtgtgcttgtgtgagtgtgcatgtatggttctgtgttttggctgtgaaatcgtggtgaccgtcagctgcaggctttttgccctgtcaagatcattccggcggatacacgcattcagtcataattgcaggaatctattgacggtgatttccgtgtttgcaaagtgattcagatgttgttggcacacagaacgtcgttcaaattcaagataaggacggccgctcctccttcagacaggcccagcctggttcatcgtccacctagcctgttgcacaacacctgcttagtccatttgtctttcacatacccgccatgagcgcttccttctgctctcgtaagagcggtcgacgcccgtagttcccatgtttctctagttggttccacattgcctccacggctggctgccaccacagcagtttttgactcgaagttcccaaggaaagtgtttttcgcctctcgctgttccacaggtctcacacccggagccgggcgttttttcatagctgacattaccgtcgcagctccactgtttgtttttcctttcctttgagtgcctctgcttcgaccgccacccaggctgagctaaaacgaactgttccgcatgtgcctctcgttgcttctgaaaaacgctcgccatttctcccgtataaaga

SEQ ID NO: 1241 - DNA, 1369 bp, Toxoplasma gondii
  source 1..1369: mol_type = genomic DNA
ttcctgatcttggagctgcctgtcgcctggctgccatgtttatatctaccacaccatgtcaggagtattacgttttacgagcgctaaagaagagtcagtcgtgccttgtaaaactgagacagtgaagccgcttcgtgcgcgtttgtcttgtttacgggcctcccttttctgatatatatatatatatatatatatatgcatattcatgcgtacatccatgtacacagactagccggctgccatttgctctgtctgtcgctgctgaaaatttttggaaggactaacaacagtctagcctttccccagcctttgagtgtctgttcttgagatacctgaaggttctcaaattcatatgaacatcgagggtgcaggaactgcctgtcccatgacagtcgcattgtttccggcaccgctatggatgtgctttactcaagaattccacgtggtctgtctttattagacgtcacagaccccgtcgtttagacgccagttcttctccatagtcctcagcttacttactcctagcttcccacctacatggtcaaagctgtgagtttctcggtgggttgtgatcctctgcagtttcatgtccacggcgctgctgatttgaagcctgtgccatctcttgccaaaatgggtagacgcttctgcatgcgatctttcgaactgacggagatctccgccaagatagaattgaggatctcaaatcacacaattctgaggcaggatagatacgccttcgctgattttcaatagcagaaccccgttctttttacataaccctctgaacttgtctgcatgcatcgtcgatgcggcgtcgtgcatgcgtttccggtccccgattaaataggtccagtaactccgtaatcaggagtaccggtatccgcgggaacttcagggtcagaggtgtgttttttgagttgcatcactttcagaagtacacgagaaaatctggaagttgcggcttacctgataaggaacttgtacgcgcgtttttgtgcatgatttcgtcgaggtcgaagcgacatctgcgaattctactcgaaccatccagtctacacattctgttgcggctttcccttgtcggaacgatttcacgagacaatcctagactgtaagtctgtccaatacaaaattcagacggggctacgaatcactgtggtttcctctcaccggggaggaagcaaacgctgccgcctacgcaggcaattgaaagctgcgcacgttcaccagtccgaggcctcaagagagggtgaaaggaaacaacaagcaagacgaagagtaactgaaagtgtgacatatgcaactcttcgatttgtgtgtttctgggtgacgatccatggcacaggtgattgctcgaggagcacga

SEQ ID NO: 1242 - DNA, 3123 bp, Toxoplasma gondii
  source 1..3123: mol_type = genomic DNA
tctttttgggtacaggcttcgtcgactttgagacatgcctctttcactcggcagacccctgctgctgcggctttgttttttcagccaacgaaagcaaagaagacgcgctcgcgcagaaagaagggatcaggaccggcgtctggcgaagggggcggccctacgacgtcgtagtcctttttcgttgtcaagagaacatcaggacctctctgaattcaagatgaggagtctttacagaggttctaagaccagaatgcttctcatgtgtctcatcgaaatgaggaagcttcttcagagactaggcaacggcgaacaagctggatgtacacacagttcaagctcgtttctctttttccgttgactgtatgtatatatgtgtccatataaaaactctataagtaaacatatatatctatatatctatatagtctgtgtatgtctttaccggccggtttatacggctgtcgacagtcatgcaggcataagcagtctgtgcatgcacgctcgctcgtatctcgctacatgcagtttttttggctgctatgcaggcgtccgtaaatttacggtagacgtttcaaactgtggttgcacaggttcggtggagggagggcattcgtgaacttaagaatctggcattcggttgattcacttttccgcattggctgtcggaaaaagtgagagttcggggctccccaaaccggcactctcgggagtccttgaaacgcgaaatcatagaacgggcggcgcagcttcaaactgactgtcaaccgacgacagaccacccgagtactttctacgagttcgactactggcctgcttcttaaaagtctctgtttaccgaatccgagttctattgtgctaggccttcgtagatgttggagaacgacagaaaggcgtcatgatttcatggcggttcaggaagctccgaaagtgaaccttctggcccctcgaaagacaattgcgagaggcattaggtcgagtctctcacgtctcacccgtcttcctgtgccttgtcatttgacccattggaacacagccaacgaaaagcactgcacgttttactggggcgccactgtacaccagatagctggcagagagtccgatttcatcgagaagacggaattgatacatgcatttgacgagcctacatgtcgctgtctctctacggagtgaccgagtttaagttgtgtacgcttaggaggtgagtgtagtcttgtgaacgaggcaagagatcgagcccgtgagactgcatgagcgtttatgcggagatatccttcaagggagaggcgttttcttttcgtaatccgcgcggctctgacagacagggatgccgaggagtaggcgtttgagccaaaaaagtgtacagagcgtagcgcttcctggaggtatccaccgcgaacaagtcggccgtagttggcaggcgcttgacttggtcactttttccatgctacctcctccaagcattcccaatctagcgccagacccatagaaaacacaatcgacagcagagaaccatggtgatcaccacgaagcttctcgtgttgggaagtcgataaatacagcgagaaaaacagatgaaagaaagagcctactgccggagtcgaaccgacgaccttccgcttactaggcggatgctctaccaactaagctaagcaggctggagaacaccgcatttccccccggtatctgaagttgctccaaattgggagggaagcgtttccctttcagagcaagatggaagggacggtaaagagtggtgtggttgtgtcagaaaaatcaaaagtctgaaatttcattggatagtgagatgacgccagcacacgctcggctggaatgagtgacggcagcagcgatagtggctggatcggaatcaggacagggggggcgatctgggagccttgcgtggaagtattttattacggagaaaaggattcgtttcttgttgtcttttgttgaagcatgaaaactgaatttctttcggtgtttccaagagaaaggatcaagaagacagcgcgttcgcctaccctctgggactggttggttctcctccgtacactctttccccgcgtttggaacagtctgcacactcgcattgctcgatatctcgcaaccgctctattgccgaacttcagcgatttccgcgcttttgtaacttcctcgcaaggcaattctctccttcacaaccaacaagatactggggaagggagtctagggagaaaataagtctgtaaagcggggctgtcttcaaggacacaatcccttttcgcagctgacctcggcttgacggtccgcgtcgttcttccgagtctcgagttcttatcggttatgtcttcttcgtgagtctgtatgtcctcgatacacgcatttgcttctccagttcaacttactcttcacctttccttctagctcgaacctgttcacacatcgcctcggttacccgccgtgtccagtgagtcgggcttcttgtccggcattctcttcgatgctcgagcgcctacactgtcttgtttcttagtcttgtttcttgcctctttccttcgtgagctgccgagacttagtttttcgagtcgccaagtcgtttctctgggctgctttcaactttctgcctctaggcggcgggtcgtgaccccattatcgcgttttgacaatttccgagagcggctcggtttcggcgcctctatcctcctgacgcttctcgaaggcagttttgggacggaaggaagcttgtcttgttttttcatggccttttcttctgtcgtccccgccttatcaaagagggcgactccatccggactcctttgtgagctgcgtaagacgacgtctctgctgtccaaaatgtaggagcgacctcaaacgcagttcacccacccccgtctgtcctgcgagtctccaccatgtgacttctcttcccgtttctcttgtgcgccttccacttttcatctggagcgcctccctcgacaaccgagtacagagatgcgcagatcctgcgtcgcctgcgcgctctgcatccccatttcccctctctttttctgtgtcgacttgccctcttctctgctcccccactcgtcgttcggcgccttccccactgatcgtcttgattgttctcacgcttcccgagctgcaaga

SEQ ID NO: 1243 - DNA, 1716 bp, Toxoplasma gondii
  source 1..1716: mol_type = genomic DNA
ctaacgatctaactcgctctgcacagccattgatttaaaccatcgtcagaccatcttgctggatatatgagtctctctaactcttcacatctcggcacatctccctctataaatcctttcttgatatatctgtacatatatatatctatatatatgtatttatatataagaagataaattggtacctgatacgtatatatatatatatatatatacataatatgtaaatgtgtaaatatatgtatatttgcacgtataaatgtacatgtacatatataggtggatacttagaatgcggtgtatggtgtgtgcttagagacaggcatctgagtcgagggagtcaggcctgctctctgaacagcgacgactacctctctgtaaagaagctgcgaacatggtttttcttcaggataaaaacgccgaatctccgtggtggcaacggaaaatgccaaggcatttgcgaagaaactcgaagcatctgtgagtgctcttgcccgtttgtgcagcgttttcggtgttggggtcgagcctccaggagacactcctctggaaaagagaagtccccgtcccctcgcgaaagtggaaagccaggatgacgcgctcgaatcgaatttgtcgctaccgtcaccgtacaataaacatggactgagaagaagagagagagaagacagcagcgagaaagagagagggagagagaagcgaacagagacaatggaagggaggaacaaaagaagaaaacggagggaatgtaagagagaaacttatcgacgaaagagaaaaaaggacaaagcggggggaaacaaaccgagaaactgtgcgagaaggggagagggagaaatgatggcagtggcgagtctgtctgttgtaaagctgtgtcaccacaggcctgtcggaggaagctgtctcctgccggcgaggagacacacggccatggaaacgaggagacagaacagcttgacaaagatgttctcacttttttttcctggtcaaaacaaagaccttgccgtctaggaggggaaggccaagggagaacttcgcagaatccccttgggttcaagacagccgtcagctacctgcgtgcacaaggcggtcgagaatttctttttctcggattttctcgtcaccaaaaagatctcctttcttctctctcgatgttcttttcttcgttgggctcgcttcacttgcccctcccgtttctccgccttcaaaaccgttttttcccccagaagaaaaccgaaactctcgcaggtctccaatcgagcggatcgattgttctctaggtcaccgtcttcgcctgtggtatttctcgccgttcgccttcttctccttgaatgtgcctgcctggttgatttgctgcgcctctttctcttttcgttgcatcctctctctctccttactctccaacaacctcgttctctctgtcttgcctcctgtctccccgtctcgtcctcagcgcgtctcgctgccatcctctcgcctccattcttcttcttttctcccctctttctttcttctctccttcctcacacacctcgttctcttcgtcctggcatcctcgcctgtctgattcctctccgttttccatcctctctctccttcctcgctgtcttctcggtctccgtttccccttgcaccttttctccgctcgcttcttccccttttcttctccttttgttcttcctcctcctaagtttttcactgctccgcacaggaaga

SEQ ID NO: 1244 - DNA, 4490 bp, Toxoplasma gondii
  source 1..4490: mol_type = genomic DNA
gtccaggaagacaagccacggaaactgcacacagagagacttctcagtgtgtctccaggcttccagctcctctcccaggtctcctcccctgtcgaagaagagacgagaagaaggaagaagaaaagaggagagaagaaggaagaagaaaagaggagagaagaaggaagaagaaaagaggagagaagaaggaagaagaaaggaggagagcagcggagacgggggagagggagaatgcgaggtgtaagagaaggaaaagagtcagagctctggagactcaccccctcgcactctcgaggttcttgatcaggcgcttgatcttccattgttcgatgttggtgtcgacatccccgtcactcgccatctttaaaaggcgtgaggaaacaaagaagaggcaaagcgtatctcgaggaagcgccgagagcagagagaagcggtccggggtggaactgagacagaaacaaggcggacgttcgcgagcgtccagcctcgaacgtgcatgcgcggaagcagagaacggacgacgcagcgaggaaggagtacgactgacaaggcgactgaagatgcgtcgagggatcgaatgccgcgacgaggcgacggactggcgagaaagcagagactccaacagacagtgtgaagcgccgctgacttggagggaagctccggaagcgcgaatccaacgtaccacagtgggctgcagagactcggaccaacgtcgaactccagcagaggcgagagaaaagtagacaggtgcagcgaagtcgaacaagacacagagcgaaggaacgaaagaagggcagttgagaggagatacggaacacagaccgagtggcgatgaagaaacgccggtccggatgttttcctttgcagtgctgcctttcctcgctctccctacttcgacactctggcttccagagaggggatccccggagaaacgtccctcgtctttccgctgtgcactgcagctctcggagtccgcctgtccgtcgaatcgcagaaacgacgggtcgacgaaaagccacaaaaggcgcgaacgccggtgtttgccgccgaaacgtttttgactcaacagcgaaatcacacggcctcctcgaggagggcggagagacaccgacgggcaggggaaaaagtcagttgataccgcacaagacaaaaccgagggcgagagcgtcgccgggaggaaagagtctggaaaagaacttggagaacacaaagcgtcggaaaaactcgcgtacgcttccgttcttgtgcatgcggctttctctgtttctaccggagaagaatcgcaagtggggaaaggcgtatctagtggaggggagcatgccgcgaggcaccagcgacttttcttcgcgcgaaccggcaaaggttgcttccttctcgccagaagctctcgcttctcgccaccagttacctcctgtttgtcgtatccgtgtgtggcgctaagttcccgaaaaagaagtaaaggaaaacgaactctcaggcgccggcgggaccccccgtccacacttccccacatagcctgcaaacagccattcccatgtccacggtggtgaactcgcctctgcaaggaaagaaaaaggtgaaacgcgtagcagaggaactcaactttctcgatttccttcgcagacgcctttcttgattttctcccgtgtaaaccaggaggatcctcgatgagaaactccacgccatctctgacaaacggaaacgcaccgcttcatcagagacacgtaacggctgtctgtttgctctaccgttagtgtgtgtgtgtgtgtggtgtaaactcaaaggtgcagaggaaccactgcgttttctaaatgcatcgaagaaacctgtagtcaacgcatagaaaaagttcaatggatagccgctgcgctccactgttgcacaacctgcgggacatggattggaatcgatagccccactgaactatttgtagacaaaagatacttcaaagaaacaaagctgtttcgcgacggggtaagggtatgtgtctttgtggagaggagtaatacagcgcccactacagctaggtagagactgagtctgagttgagtttcctctcgtcgggagaccgacggcgcagaagcaaaactcacactttcgacggggcattctcactatacaaattgggttaaattaattcgactcaaaagccgctcgtggtgtatgtctgatgaatgagaaactcaaactgccttgcttagcctcgctcctgaagttcacgcagggacgttcaaagaagtagccccggcgcctagacgtcatgcagctgcctctactccataccctctttctccgtagccacaaaaaacacagcgcatgccggagattttccaccggagtagagtcgacctgggttccttgtatgtaaatcaaggaaagagctgagccgtcccagcagatgcctgtatatatgccggcggtgctcactgggtgaatccagacagcaccacagtggaagctgcatcaccagccttttcggattctcccttcttctatcagacgctcggcagaagtgactctgcaggaaagagctttgcccgtcaactggcaagtcgcggtgtttatcccgtcagccagtcctctggagactcagagatgctgacgtcctcctcggaggctaagggtgcgtcttagaacgttctcctcatgtctggcgcattcagactacacaggaatccctcagtctgtacatgacccaggactggatccgcatttcaagtaccggaagcgttggtaccctccttgaggacgctcatctgcaagcacctctacgtagaagcatgcaagacagctacgagatacacgagaaaatggataaagctgcctttgttatcacgtggaagtccatcacttgggttacggaaacaagcgcttcctgacagggtcagcgtattgatgagactgtagaagatatcgtgaattcgtggaaagggcatgcgtggaagacagccggttgacggtgcgcagaattacggaagcgagtctgtagagtgacacaccaacggcctaaacggtgcactccggacaccgttcagcgcattttgcgtgcatcacatatcgcttgtaagttcgacattcccattgaaagagcaattgcgtcagttgaggacttctcgtcggacgtagacgcggtctactggccgttgcccgaagggcggcgctaggtgtcttccccatcagccgagcgagtttctctcaggcactcgagacgtttcatgctacacctttatctatcggccaataacattctcgctgcttgctgtgcttcctgattcgaggttggaaggcaaagagagtgacgaaagaatcgcatctgcccacgagcttcctccaactgagtttaagttgggattgtcccatggtatttcgcagcagcgatgccagacaaaagccgactcccatgccgcgatgagtgcgtcatgtttctttgagcaagcctctcattgtttcatctcacggcgttgagggaattctctggaaaaccatggctagccggttaccgtccttgtgtagaccaccctcgacattaaggcaaattcctgagccagttgtcatcatgttgaaccctttatcaatacgaagcacatcccgcgcatgtttccttcgtgcgtctaaggtctccccattatgaaactctttcttccatcgcgttcctccctctctaggcctttgttctttccaagttgttgaaaaggcaaatccgaaccgtttcatccagaccatcggtactccaggctcaacacaaacaactaagtcgctgtgcgtaaacaaaataccgagaacagttcaatcaccttacaagcacacttctctctgagaagaaggttagcgtttagcgcgtattcgtttttcggggtctgcgatcgtcttgtcgaaataacgcatgcacggcgattttgccagcacaagtacggcatgcgagtgagtcggcgtatcgcggtcaaaatgcagccagtcctgcaaaaatagagaatctctagcagagaaactattttttcctagtgcatttaaaaagtaaccccaagagtttgagacatgcaagaacagacgcagggttcggcgagttcctcggtctccccggcctcctatacgctgtcgcgtttcgtcactgcgctggccccgcacaaacgggacacaagcccgagtcaaggcccaagttccgttcctttcttcatcgtctatttctcgttttttttcacacgtttccctccttttttagctatgccctcacccccgtaactctgttcgtcgtcgtcgcgggcctttcttgacttcgagaaacaagtcgagctgctagcgcagcggcgaccctgctgcatctggttcctctcgtgctctctcttgtccggtttccgtacttactttcgcctccatgctctcttcactgttctctcgtttcagcgtgtcacattcgactcacggggaaggctctatccccgactctctgtccgccgttgcgttttttgcgtcttcttaattcgtcgcagcta

SEQ ID NO: 1245 - DNA, 811 bp, Toxoplasma gondii
  source 1..811: mol_type = genomic DNA
ccaggaaacctgcttttccgttcgcttcctgcttcgcgtcgacgtgaagcccaccctccgcacctccctcggatgcatgtacaccccaggggcctgcggtgtctctacaccctggaattctccccctggccgggccggcgtcctccgtgcatctgccttcccgcgtgagagttgcagcggctctagaggtgtcttcgatgcttctttctttcacggacacggcagtaagccgccttttgggggaattctgcaaagattcgcctggcacctcctccctcacttcctccgcgaaaggcgaggagggagagaaagacagacccgagagaccgcaagatagaagccgcttcgcactcacgtggtcgggaacctctcgaggaccttcagcgcgagaagcagagacacccgaagcagatgcggcagagggagaggcagaaggcacagctggaggagaagaagaaatcgacatcgatgaggagaaggtcgggggataggagtgccgagcagacggcggcagagacgatgcggcagacgcagggacagatgcgggagtagaggagcctggagaaaaggggaagacagggtgaagactggcgttcgcagatgcagagttagaacagagagaagacgagacgggagacacggaagaggaagggtggctagctgcagcagacaatgacgccgagagactgtctgccgcagcgtaggcgaagccgctagcggctggcgtggcggcgcctgcttccatttttagattgagagaaacatatgaaagcctgagggagaagcatgtgtcaaggccctgaattttaaa

SEQ ID NO: 1246 - DNA, 4564 bp, Toxoplasma gondii
  source 1..4564: mol_type = genomic DNA
cggagtataccggcgagttgtgcttcgagaattcgctgagaacgtgctgcgacgtcgacatcagctcgacggcgaaaggacagtctccccgggagacctcaaccatgtaaggcgacgcagagcgtgcagatgggaagcagtgcggactttgcctgctcagatcgcaccgtcggcggtcggcgctgcaggaggcagacacagctgccgtgctgtggacgtcgttcgtgtcgttcggacaagacgcgggatccagatcgatgtcgcgaaaccagaggctcggctcaaggccctgcggatggggcgccgagtacggcatcaacgggacgcagtgctccagcttccactcgccgaggaacggcgcagagccgaccacgcccagctgagcgttgggcggcacgaatgcagtaacgctgaagcggacgcgcattttggaagacagcaacgggaatgcgccacgcgagaactcccagctgccccttctacgcacgagcagggagacgcgcagaaaagagacgaagtagaggaccgcgctctctcagcgttttacggacctcgccagcagagcctccacgagcgaagtgagaagaatgggagggagagagagctatgcagcaagcgtctctctcccgtgaagcgcggtgcgtatctcggtttcaatggtgaaggcgaacagtttcttcgatccatgcgtctgaggaatgccagacccgctgctgcaccgaacgaggcacgagccttccaggggtacagacacattggacggcagacaatgaagaacgggagagcgcgaaaaacaagttctgtatgcaaaccgcgccgaactcacgctctcacgacacggctccacacggcatctcctcaagcccgcttcgctccagaatgtaggacggctgccagttcacgctgaagtttctacacgaaagggtggccatcagagggagcaacgaactacccaggtgaacgtcgaaaataggctgcagctcgtgccgtgtgaagttaagaaaaaagttgactatgtgaatgcgttagacctctccgagcatcaggtggcggctgtggtagaggcgctgcagcctagccgagaaggattgacaaccacgccattcgtctgtaggaaaccttcctgtgttttttctcgtgcgaggtattctctttgagttcagcctacagaagaaacaagtcccgagttcgtttgcattcgccagcttctcgatgactccgcactgtgtccgacgccagcccacccagcaaagtctctcaactatcgctacccaaccaaatatcaccactcgatgcacctggacgatcacgttccttgtccagtgccacaaagtatctcttttgactcagaaagaaatgtggggcgctccaaaaaccatggcgcacccgcttcacggacagctggaatgtccagcggcgaagacaaagtgggtggcacaagactagccatagacgtttatgagcagcaaagactgcgaaataaaaacatagcactaaaggcccgcagtagttcacgtaatttaaagtttcacatttccttcgggcgacgccgcacgctgccaaacaaaactactgcacaagcgtgtcaggcatgttggggataagggacccgaacacgctctgtacgtactcgaggtgcggagcaacaggaactgcgcgacgctcttggaaaacagacggaaaatatatcattcttggcgccgcagaatcgcagcaggccatccttcctaatacaggaggacgacacacagagcaggagcgaaaggaaggaagtcaagctcaaaaaaagcatgcgcgtggaagcggaaactggaggtgccgcacagctaggggagcggatgggcaacacacaaacggatttcggattcacatcaagcagggcactattccaccatcttagctgatcttatcaactgcgtcctgtcacttcttgttacttggccttatagaaaagcgacgaacaaagagtttctgcctgtatgggcagcacgagtcgtcgcaatagccgaaacccttcacaaatacacaggtatcggggttttactaggttagccacaaccgaccggtatgcccccctgaggtataatccgtgagagaagatgtgtgatccaaagaatccagtgtaaatactattgcttcacaaaacagtgaaaaaacattctcggaagctatgctcttcagggacgcggactgaaaacgagggctcacgcgcgactagactgtcgatagcaataacgcagttgactgggcggctgattcgatcctggacaactactgcgtcgtttgtcccgttgctgctgcagggcagccgtttccaagccactttcgctgatgaccaccatacacaaatgcgactcccgccgatgggaggaccgcgactcgctcacggcaagtacaacaatcaagaacgaatgaatcttcgcacaagtcattggcggagaatttcacttgcgctcaaacactcggatagtctcgtgcaacatcgcctgccgtcacctcacatcaaaaagccctctgcagtgcagctgacctgagatcagttggatcatattctgtctgaacctacctcagatagtcaagtgaacgctcctagaaaatgccttcaagcggttggttgccatgcctggcagctagagtctgctcgtcgttgtctctgtacacaattttaccggagagcttcctccagcacgtacttacagcaggtgaatgggctaaacggcttgccttgaccactccaacgaagccggacgccaagtgacatgagatgcatgttgcacacggagaagtggatggcacgcgtgtatgctcctattccgtagagcggccacttgcaggcagcccaattcgccgccgccaggccacggtcccagcttgtttcgtatccaaaggagaaatcaaataggctcatgcgatggatttctcaaagacgacgtcgcttccgggacgctcactcgtctcccttttctcagctcctttgttggagagtcgtcacaaatatcggtctgctacatcgcttgcagcttaggctgcggaaccctgatctcgccgtgtgtgactcgatattgaccttcgcccctctgctgctgactgtgaatacggcgttgctgtagatggactttcaccttaaaatcgtcagctctcgaggtgaaaccttcgtagatacggtcctcgaacacgcctttcaaactgttggtttacaactagagactctgctcgagagagtttttgttgcctaacggacggagccaggccgttactgggggccaccatgcctacacagatcagactccgttgacgcttttttctgtaagctgctgcgttcttcactctcggcgacaacaccgctgacttaggaaaccccatacctacttttactctttccccagacatctccattctgttccttttaaagctcctcgttcctgtgattttgaggacgctacttgacgttctacacagtaggaccccccgagcgctagtggagccattgcaacttaccagttccgccgggggttcggcggccctgcttcagatgaatgttctacaaaaacttgttcgagcccgcaccagagaaatggacaagtatgtgtcctgtttgagaccgctaggccgctcgcctttgtgtctttttcgttttgtaattgaagcacacgttcgaaggcaactgcacggtcactagggaacccagctgcagttgctgctgcttggagttcaccgatcccgcgcacatgcttctgttgaagttctctgaaaataattgcatgaaaaagccactcttttttccgggttgttgcattcacagcttttaagaggagcagacattcatgaaggtgtattagggcgagacacgcatgatgagacggggggtcagaatttagttcagggcttcacctctctgctttctgctgactgcgttcagggtgagttagggtactcagagaagcctaagctcgctgtcatgtatcagacgacagtcgaccgcagaatttccgcattatttttttagagtcttggacgaacaaagcgacctctggtccctcttcggatccaagaggcgataaggttttcctactgtccagcacccgaagggcgggcacacgttcttagccaaaaacaaggtctcacgttttggaacacccagtccaaaccccgtgcgtctcgaatgtgtcttcgttcgctagcaaagaagggttcttttttgccacaggaattcgacgcaggcacctcctgaacggtttgcttcctcggcttctccgttccatttgttttgtcccacgttatccacggttaccaggtgccactctggctgactgcagtgccgcttctgtattgttattccaagagttttttaaagtgccgtcgcaaaaacaggaggggagaagaggcgtaacccgcgaccttttcgtcgtttttctcacatcccgttggctttcaagataagacaggcaagaccttgcgtacatttctttttcgtgttttccggtgcacgttcagagactgctcttgcttgccctcattccgtgatttttctcttgtgacagtccaagtggaaatagcaacacga

SEQ ID NO: 1247 - DNA, 2887 bp, Toxoplasma gondii
  source 1..2887: mol_type = genomic DNA
ggacaaggacggagggatagtcctcttcaaggactttccggaagacgtcgtactctcgcctgactgccgccacggctgcatgcgcggcggcctgggcagcgcgcgctcgcgccgccttctttccctcgccagggtcctcacactcgttcggccgagtgcctcgctccggagctccatccccacgcaccccgtctccgaagtgtctcctttcttcctccgtgtgggccctggctgcagccgctgcggcctcgaacgcggggaagggagaagcggaaatcgcgatcgccgcgaggatttgtcggtgcatgtgcaggtctgcccaatcgctgagtacgaactgtggcgtctggaacgagcagtggatgcagcaagccgcggcagccagctgctgcgacgccgagggggccttggagccctggggcgcggggcccggggcgtctggccccgcgacggttcgcgccgagagaaatggttggaggtaggggtcatgcggcgagaggggcagggaggcgagagagacggaggcgaaggcggccatgagggccgcggcctcgcgggcaaatacctcgggcggagttccatctgtcggcaaaagaagaatgcggacgcgagagtaatctgccagatctgtgtccggcggcaacagagacatcgtggagacacgccgagcgaggagacaccggagacggagagaagcaaggaagaagcgagacgcgacgaaccgcgccgagagaggaagacagggcacacaggggaacacaacggggcctagggagacagaagaagagcacacgagacgagcaagaacgggagcaacgtcgttggtcagacagtccgcgagagaaattccagaaggactgacgaggaccctgcttgtttcgaagcagtcggcttgccgtacaaccctgagcaagcgaaaagcggaagagcatggagacaaaaggacagtcaaaagtcgagccccaaagcactccgtctggagaagatcccgcagcttcactgtctctgaagccccgactggggtcgcgcgcctctatacatctttcggagaagaacatttctctcttgcatttgtttcgccgacagccgcagagagtccagcgctcctttttttgtcctgcttcgtcgcgagcacacgcgtcggcgcagggctcttgcagaggagtcgaagcggtgagcagcggtgagcagcggtgagcagcgaggatgggagacccacggagaccggcaggcgcgagaatccgatggaaaagccgcagggacgatggccaccctgggccgaccggctcggggcctcgcgcagaggagaaagggagaaggacagagagcgaggtagggcgtcgtcgcgccagctttgtttggcctcgaaggacgagtccgagaacgaaagcacgagaatcttccgttttatgacagactaggaacttccagaaggtggtgtcgatcgagaactcccaagaaggcaaagtcccgaaaaaaaaagagtggagaaactcttgcggtccggagaaggcccggcggggacgaggggagcgacagacgaaaaaaggctggcgacttcattgagacggagcactgaagactgggtctggcttttagacactcgacagaagagtgccggaactgtaagcacagcgtttctgtctcccgggacttccgcgttcgacttcctataggggaagaaagcagactgcagagaaggacacaacccttttcgcgctaggtcacttctctcccgtgcggagagcgcggcgccgcgatcttccggagagaaaaaacgcgagacaccgagtcctagaagaacagacacacagacaccacgcggtgtgtacatacacctgaagcgactttcgctcagaggcggagagtcctcggcgccatcgtccggtttctctacaggacaggaacagggcgagaaccagcgaccgaggggaagcagagagaatccgagctgggtggaagcgacgaggccaggcgcttggagggtatttctccgaggaaggaaaagacttcaagttctcaaacactctccctgtctcgttcagctcttgctcacgaagccggcacaaaaagcagaaatagacagcggcggacagccggcactgctgcgtttcttctcccccctttcttttctcacatgcgctggcccggccgccttctgagcaacgaaagcgggctttgtcttgtttccagagctgaagttgttgatcctgaggaagctcgggagagtcgaggctctctccgtctctcttcgcgcagctctcgaatttttcgtggagagcttgcggaaaaaaacagcaagctgaactttttaacagcaagagcaaatcttcgggagcgtgacccgacacagagagttcgagagcgatcggcagcgccgtttgtcttcaaacgaggaggcgtggagttctcagatgaaacatcacatgcctgtttgcgtctctctccgtaaagattctggcgctcacaacactcctgcctcctacagtcccggtcgctctttctcgttggcggggagtttttctctgtcgagtccttttctccccgagtccgtcttgacgtctcctcctcttttctgtttccgcttcaggttctcacctttcaccggaaggcacaagcgcctacatcggattcactgatgttcctttcgcctttcctccccctccccagaacctctggggtgtctgtacatgcacgcgagcgaagaatcacagtccccttgatcaggcgccgaggcactgatgacttgaggaatcggacgaagagtcgagctgaattcgcctgacgacttttaacgtctgcgacggagaagagttcaacgacttccgaatccatggtgtgccctgcttctagagagcagactggaagcggagcaggtcaaccagca

SEQ ID NO: 1248 - DNA, 1170 bp, Toxoplasma gondii
  source 1..1170: mol_type = genomic DNA
gagtaaatgtattgtatttagtggactgagtggttcgcaaagcaagagatatcgcttcctgttccaaaacgggttgcggaatgtcggacctacctgttttcacgttaattaaaatgtgcatcgtcggcctgaaacaacatggatgcaactgaactgaaacgaaagagacaagcgagtggagatgaagtactcgcttgttccattccaaaaccggtcatgaatgcgcggctaccgaagtgcagagatgctctagttcctacttttctagcgtcccgttttcccggaaaaccttccagtccgctctcgtttggtccttcctttttctggaaacaattgataaccattttatcaggtttctgcattggaatggatgcacgagaaaacattgacgtgcttctgtaagactcgagtgtggtggacaggtctccgttgtgactctttctagtctctgtcttcacgtctgtatagatacctttatcgtcttctaatctccctcttacgtcttcctccttgcagataagaggccatatcttttttctttccttctttcttccttgttctgctatgcctcagcgtttgtcatctctgtttcgccggggcgcccgcctcaaagaccctctggtgttgctctcatgtccatctgtttccaactcgggagccttctcaacatcgttatgttcttcctagtcccgctctcgtgtttgcggcgtctctacgacatttctctgttggctttcaccagttcatgctgagtgacaatctcatgtcctcgcgttcgccggggtaactttgcccatacctaagcgagtgctcagctgtgtccctgtgttacctcgtctccgtagatgtggaaaggcgaaaatccttgatcccttccacccccatagttggaaggctttctatgacgtcttctgaacgatgttcacagcagtgaggaacgcgagattcacacgtgttttttctctcgcgtgcatgcatgcattcgtggcgcagaaaagcggtccttcctaaggacacaggaatcgcctatttctatcttgtcgaggccttccagcggcgcatctttttgaatcgtgaatatgttctatcgaaagtctaaagttgtcaacttggtgatgagtatcacaggtcgttgaggagatagcgacctctgaaaagtgttgtgggtga

SEQ ID NO: 1249 - DNA, 4662 bp, Toxoplasma gondii
  source 1..4662: mol_type = genomic DNA
tgtatcccgcgtattaccgcggcctcaggatgtgacgagccgacatcgaggtgccaaacctccccgtcaatatggactatctggagagatcagccagcattgcatcctattaatagagaactgcataggttttccatgagatctatttggaagaagaggctcggatttccactgtcaaatactctttgtcagctacttccaaaggaccagtcttcggccgaaactgactgctgttgcgtgcttgttttcgttttattggccctacaccggatgatggccacagaccgcatgatctatccgtacctacgccgtcctaggtagtctgttcgttgaaactcactaaggcaagcatcaagaagattcaggccctacttttgcccgcaacaaaggtatttgtgctgtcactggactctttcagtgacacgcggggggaaggctacagcccgaaagcatatgtttttgttggaaatccacacgaaaaggcaatggcgattgccgtttttacccactgaactgaagtgtttcgtgtatttgcatactctcttcttcgtgttatttagtgtagggaccatcgttgctcgtctccaacccgtcaagacggacagaaccggatagttggtctgcgaagttcccactagttcgtacgtatacgtaacccaagaaacgaggttggcatggaaaaatgcacacaccttcaactgatgccacgcagcggcgctgcacccctaaagtgtaactcatcgctgtaagtgaatggacgttcagacaactgaggtacggggaccgctccgtccctgcagcgtgcatgcaccgattccagacaaacgtatgcacactcacataccttgcggctgcgtggaaacccagtgcgtccccactggaaggtggcatctctaggcagtccttctctaataactggtcgctggtaaagagctattcacgcttgctgtacaaattgttatccatgcgcctacattccataggtttgagacacatgccttttggcagcacgttcggcgccgtcagacgcagcgcctgtgttcggttggaaaaacgtcttcccgtgaaaatcgttacttactcgaaggggctgcagcctcgagccactaagcgtgcaagtttgtctgcgtacttgaacactgatctgttgttgacagaatcatcctgtgttgagaccatccgtggaaatggctcgtgtctgcagagtagcggtgggcgtcaggcaacagctcgctgcatccgtcgtcgctggcctgctcgtcacacttctcactgacgtagatgcctctcctgttaatgcgctgccgcctgatccagctgagtccacagtgccaacgtgcgatgaaggtcaggagatgaccataactttgtcgcccgagaaaaacgcagccagtttcatgtgtggtacagccatagggaacatttcaccgccactacgtccagcaaaagaaggtttcgaggcctttgttgatgaagcggcgactacagtagtccggtttcactctccagatgtccagctaattgaggaaaataatgtgtacacagttaccgcaggcatctttcctcctgttggcggcacgtggtatcttttctgtttggagccggggatcggcagcgctgcagtcaacaccgtcaaaaagaagtgccgcgtagaggtcgtcatcaagggaacatctataatccgtaagtgcatgcgaaatacggccttgttaaacgaataacgaaaggcagttgcgataggagcaatcgcgccgataacaccacacctgcagcaaactgaaaacagtgagcagcggagaagagacgggacaagacatactgtcgcgttctgctacaccctttgtttctattggccgtaccatcgatgtttttggtttcccgccagcgttttcttaagttggagtcatcattgtcaacaaacccagctgcgttagatccgaaggactctatctaatcggcagtagctgagtcatgccaatgcggattgttgcacgaagtttacaaagacgacaggtagctaacaacgctcaatctcatatgggttcgtgtgtgtgtgtgtgtgtgtatctttgtcttgctgggaatctgctgtcacgccttgcttgtcggggtgactctgcgcctatcactccagctcaacagtgtaccactgtgggaggctcagttgatcttcgcattcgtggtcccggatatgcagtaacatttgggtgcggtctgagcttcccgcagcttgaccctccactgagcggaaaggaggtatacgtcggccgggaatgctcagaaaagcagcagttgtcagcgctagttccgagtgcagcgctcgaagtgggacctgccggtcaactatatactctgtttgttgataaactccctcctgtggggcgattgttgtgttacaaatgtgtaaatgacttaaccgctgcatgcaaggcgttaatcgtagtcccgccgtctgccgaagaagtcgctactacggtcgccagcacttcaacattcggaccgtcctcagacgctacaatcgcgctgcactcatccagttcttatctgttgatcgcagttgtctttctgcttcgactgatgtagttggatgtgctggagcagaaacgtggaattttgggacgcggcatcatccgtgctataatgtacttccatgcactcatccactgtggctgcgtgttcgggaggaagccgaccacgagcgtttgaagagggctcggcgtaccaatgcttcaacattagcgcgcatcatatgcaaataaggtaatatggatttcacttgtctggtttcttcaaatttctaggctcttccattcagcatctgtgtatgcggctgttactcccatcgagggggggaacttttctccggtacgaaacgaattcgtttcagcggctgagaaagacacagtcatttgacctgtgggttagtacatgttggtttattacttacgtcagccggtgtccacgtttcttaatcgactcccctcacttagtcagtccgacgctgccttcgagaggtatttagggtagaatctggcgatgcttcgctgaaaatcaatgaatctttcctccgttcagtcgtgacgagtatctatgttctcatggtagaactctctaggagttgtgaatgttcatgtgaagcggcaaatgaatggatgctgagaagtgaggccaatgcctactggacagctaaggtccccgtcagatcatcctgtgcctcttaaagaccttgttcttttcaaacaccaataacaacatagtaaaacgcttttgcctcatattcttcttacgagtttacatcaccatctctgacttgagcactcctctgctccttataaactttatcgccagggaagcacaaaacctaatctctgacggctccatcgctggtgacggccttcggctatgcagacacataattcttagacagaggtttccctcttcaattctgtctggtgtagctgcgtaaataagatcgtcaatggagtagtagaaactctggaagtgggtagactcgaaggtgctggcgtgcttcttcgagacttctttccaccccagaagcaacgaagcgtggtgctgtggtagaaaacgtgttgttcctaaccgcacaagtcacaataattcgataggtggaagtcgcttcacgaacttcagctgcttcccagcccctttcatttgtgcatgtgcctcgatgtgacccgtgccttgctacaggtcagcttttcccgtagtcgggaggcaagctgcatagcttgtaatggtcacattcagcgtgaccagatcccagtccattgaccctttcactcttcagtaaaagcccctttttatagacttttttcattcccaatcggcaatcgtccttccccatttttcgaacactgctcgggaaaacaatattgcgctcgtcggtgtgctgacatgcacgagcagtagtggcgggcgattcacagcgaggcaagcggcttctgatgccgcaagaccaatccgaattctgagctcgcagaaataaaggacgttgctgtttcatgcaaaaagcaactgtcgtcgtgtaaaagtttggactttccgtcgtttcgccgagggagggacttcgttgcttgcgtgaactactcctttcagtaaactcgggaaaagtctgaagcacacgtcgaggggggtctggcaaagcagcggcctgcccgtaagaccgtggttatccgcgataaatctggaaacaacgagaacgacagaaacgattacaagaagcagtggtcctcctcgtcctttccgtctgtgtatcaagtgaatttttttcgaatttcaagaatgttaagcgagaggctgtgtcttcgtcagcggcaagacccaccgccgcgtgtctctcgcggctactttggggttgcaaccgaccttctgaaaatgtttatcaagagaagtcccatgtgtacacttagcgatatcggcttgcatgcttgaacgcctgtctcggctgagcggttctatcttcacatccatcgccggcctgcgttgtaatccgactcgcacacttgttccctgccctctgcgttctgaatcgtttcttcgcggagctcttcccacttcaaaagagaaccttagggcctctcttcgtgcgtaccctctacgcttcggcgccgcatgtatctgcaagcagctcggttcccgcaa

SEQ ID NO: 1250 - DNA, 2118 bp, Toxoplasma gondii
  source 1..2118: mol_type = genomic DNA
ccgttcccttcactcaagcctcggcaggagtcaggcagcgtatacactcgcgtgggagtgtgaaggttaagctggaaacacatgcacagcacatgtgcacgcaattgcatacccatctccgcgaagtcgctgtttgtaagtttgttccctctccaaggagaaaatgtcggcgcgtagagatactacttgtggacactacaggggagtctggcattacgcacacaacagatgagctatgcgcctcatacgcacagaaatctggggcacgcatacagttgattcacccgtagattccggtacgctctgctcgagcaaaagctactgcatcttcagcacctaaaatgtccactgcaacatgaaaatcctcttgcaccgatccagttcacgcgggacactacgctgccctcgcccagcagtaacgtcacgactgacagaggggaaacaaattctgaaaggagaaatgggtgctcaggtgagaaatggagtcttcatgtatgggacatgcgcatttcgaaatcaggcagggacaacccaacagcgtcgctatcacctatcatcagccttggcggcaggaaattcgcgcccccggcaaaaacaaacgtcagtgaccgcagctgctggcacgcaatgacttacccctatctccttcaaaacgtgagcctttgcatcgtaaaaaaaggcgctattcagcctgccatcgccgtttgccataccaagaggcaagtacggtcccgattcattgtctccatgtagtaggcaaaacaccggaaggccatccaaagacttttgcgaagatccagttgccttcgcagccagcggggcggtagagcccgactgtcgttgggccgtcatcgcaggcgtcgtatcagacgttcttctagcggcgacgacaggctcacaattgatagattcctttcctgctgctgcctcgtttcagcaagcgctgcgagccgtttcgaacttgacccgcttgtaagtgcaacccaggttcgttgctgtctgctgcatccagtagcgaagagacagtctataactggccgttgattgtctctttgaacataacgttcagccaatgcgaccgttgacgcagaatccatacctcgctctgatagaataggttctggccagaacaccggaggccacagcgtgcctcgcagcacagcacaaatcacttgagtcttccaatttctgagtcatcaatgaatacagtaccaaatgatattgccccaggacgaatttatggaagttcgtttcctccccccacatgggctggctcaacgacctcaaatgctttccatacgcatgcatgcatgcatgcctgcattcgaagttcgcagaacgggacagcgctgcccattgctaccagagcatgtgcagtttacgtcaaaaacaaacttagctcgaaacacaaatattaattgctaagaaattctgtgaacagatgaggacggggttcgtacgcttccacattttgaggtatcgttggcagaagtatcgcttatgtatgcttagatgacgtccatagtgatggtggcggacgctctccccccccctcattaaggtaggcaatgtcaaaacgatttccaacacactgcaatggtaaagaaatgtaatacacagaactgagcttcaagtattcacagtgcgttggagtaaaaattgatcggtatcagcagcctggaaagttaatgaagctgttccgggcctgttgactgagcgattggtgagacgttggagacagtccttttgttgaataggtagatgtctgcgtctccgcatcaactgacagcctgcagtatttgaacggcgaatctcttccatgatgcaaacgtatgtcagtagcagcgctttgcgcgtggtgtctcttcacaagcttcacagctaaccatgcgtaactggcgcagcagttcgttatatcttgtgctctccggagaacgctttccatgctactggcagttgaccaatcagtggcttgcctgcctttttcagcagcctttctgcgcactcgcggctgtagggacaccaggtgaggtggtggtgcaggcgccgctgctgcagaaagcttattgtcacgaatttaactctctatactgcacaaacggccaacgcaaagcaaaa

SEQ ID NO: 1251 - DNA, 4615 bp, Toxoplasma gondii
  source 1..4615: mol_type = genomic DNA
aagtgcactggattggcagagcacagatggagtgggctgtcttcttctggactgcaatcgcttggccgcacagagggaacaaagatcatcagggcaacggggaaccttgcgcggcaccgcgctttgagtacagccggacgcagcaagtagggaatctttggcaggagaagacgagttctgcaccttcgctcgcagtgaaaagcaggagaacgagacaggcactcgaaagctggaggagaaggggaagggaggcggtgacacgcgctgttggtgtcagcagagaaaaagacttttgaatggatgtaggcgtgtgtaacgcctttccctgaaagtcacggtgggcgtcaagttagatggggagaatgcagaaagagacttcgcctctgcggaaacgcgcaggagaagaaagagtggatctcacacgacgtaacgcagagaaaaagactcgtcttaacacgagaactctaccgttggatggccgcagttcttctcgctggtgagaaggaacgcaacttagacgaatgcgggtataacaccgcatgcgacggactggagtccgcaaaacaaccaagaacgaaaagatctgtggcggacacaagccgctaaaatcgcttactgcaaccgaaggcaaacgagaaagaagggcggcgaagaaacgtgtgtccgcgtacgaaagacgcagaccgcaggacttcacagaaaacagaacgtgaccgtttctagcgcaccaatcagagagtggtagattcaaaagaaaacttccttgttgagtggatctcggttccttcagagagatggtagtctgacaatttagatccacaacgaaaagggggctgagaatttccggaacgcccttcccaagctcaaaaggaaacagacgaaattctgcgtctgcgaatcgctcaggcactcctttgtgttgttccttcttcggaagaaagcgtgcttcgatggtaagtgagggcttcctcgcgcttttatcgcggcatgtccacagaaatgcggggggaaaactagcgtcagttcagtcgggaacggaaacgccacgccttccaatcgaaagttggagtgcgtgaaaaaaagggagtttgccactgcaatccagagcgtttcgaatttccctggtcagcaaggagcaggagtttctcggcggcatgcatggggagggagactgaggacgataaaaagtaagaagttccctccacgttacacctttctcgagacagaaaactgtgtgaccgccgaactactttgctttagtgaaacaaacggtaagacatggtgtctgagtggtccacaaacgctgaaagtcgtggtaaaatcccagcagggttttttcgttggggatgtgcatgcgtgcaagcagaagcggtgtgccgtctcgaagctgctcaaccgccaacgcatctttgcagaagcaagggcttgtaggaaaatggaggaggtgcatttctgtgaaatgggtatctacacgaagtcaagactgaaaggaaggaactgtattcgggcgtggcgtgtgcttctcctatgaggcgtctacgagttggggtaataaggccttctgttgacaaccctgcaggggtatagatactgcgcttaaagctggcttcgatttgcatatggtaacgacaaacgttaaatgtctatcgaccttagttggatcccttttacaggcggcgtttagttctatggtacgataacaccagggaatggtgtgcctcattcgctgtgctcctttctcgcgccatcttcaaatgggcacgtttttgacactgttccttgccggattcgagatacacatggaacaacgaacgccacgctctgcaggtgccacatttacatccttttccaaacgaagaacacagcttctgcaaaatgtcttttgcttccagcttgcagcctgggattcaggtgtaaatgttcgatggcaacgacggaaaacgactactccgatgatagtaccagcagcaccatcgtaatgcgagtaataatctctgagaaaggattatttctaagcgctttatggggaatagtaatacgagttggaataggagtttccaagcaggcatgaatgtcaatagggcattgggcggtgcctgcgtgtttgacggtatttccaaggaaggtgcatctcttgtggttcgagagctctctgtatgaatcaaaagttcatctggctgctcgtctgtgcacagtgccgattgttgaagcctcacttgtgcgcggtttttgtcattgactctccatctcttgggtctcgagagagaatgaacacgatattttttgagaacggggtgtggacttaagcatcagccctgaaagtttgagactgctcctgcagcagatcgtcatatggtgtacgcccatcctttttctggtagtcgtgcagcatgctcagctgcaaacagatagaaattcacgtctgaccttggtaaaagaactgagtctacgcaaggttccacatggcttgtcggtcgcagtcgcgcagtatgatagacgctcagatcaggggaccttcgggacgttgacggtagtgggaattagacgttttccatctcacgcgttcagcatttgcattccagatgcattacagagggttccgtgaaaatcgaacttaaaagtaggcatcgtctccgtacagatgatccgagatccggaacttgataatcggataaacagaggcactgtagtagagggagggcaagtctcgctatccggaactctcgacatgctgtccagtagccattggagaatggcgctcgcgaacgaccaaccctagcaaatgggcgtagtccaatgagtgcatggcgtctgtgggataccacatgacatgcttcctttactgagatcgcaggctctgacggtgacgaatcgatgacctttttgactactttaggattccagcagctgaggttaaatgctccacgtaatgcccttgcatgcattttaaagtgcccgctgaagcaggcaggaagcgtttttccgctgcaaggaatgcaaatcaagcacgctgtggcacgactgtggaatcaacgtatcaataagcggagaagaggggcagtgcatcaggaaatatttctcgagctccgatatccgcacagtgggcgaaactccgcctgttgcatgggtaatatatggaaaacacagggtgcattcgcttctctcggccttcgacgagctagagcaggacagcaatttataagctcatatccttgataaagaaatcggtgttgtcttactcttcgcagcttccgtctggcgcatcgcagagcctcttgggcttgtttttcattctcaaaaaacgtcagcatgctcttccagttacactttcgactagagcacctctcaaagctgttttgtttctcccacaggaacattactgagacaacgaccggagcgtgcttcaccgcgaaactgaccattacgtgcaagctctttccttggcctttcggactgaacggtagcattcgtgttccacgcgaattacccttggcaatcctgtggattctcgtctcaggtagcctcggaatcgtgatataacaaaaaaaccgccattcgcgcacggctccttgggaccttatcggtcatgctgcatgttcctctgtgcacacctgtttcctcgtcatgttgcaaggttatagcgcacccttgtctgctacgaacaagaaacaggaatatatcttcctcatttccagccttttcccctttacaaaaacaacacacagcgggactactggggaatgggaacagacaatcattgattttcgttgagttgcttgaggtactccggagacggtcgcggcataccactttgagtcaaccgcgagaaaccacgcttcggtgtacggaatactaccgaatttgcagttgttctgacgaaatatgattgctcctcatcataccttgaggtcagtccgtaatacggagtgaggcatccgttgactaaacggaggcgttacccactgctgaaaacccttgtttcccaaaaattgcccgttggaatgtgtctcgtgactacaacacaaaccgacacacgatttctgtagtagcactccttcacactgtcaacccatttcttccagttctgcttgtcgctcgagacctctccactgttctgctacccgtttgtcattcaaagttccggttaggtgcgttcgctcataccggagatgcagtgagaagtattcagcgcgtgtctttttgcgacagttgctttgttgactctcaagctgccaagcgacacgggcgcacgttggaggctgtttcatttgacgcgtcgcgcatgtgaccgatgcctcgtgtgacacgagcggtttccagccgtccgcatcacgcgactctgtggcttgcctgtcgattgtcgagccgatgctgggtccaccatattgatgccacttcttttccggatttttgcttacattttcttcaccgagggtactcccctgctcgttatttcatgcgtaagtcatttctgcagccaggaagaacgaagttggcacagaaaagacagaccgactcccgttgcaatttttgcggacctcacaagtgcagtgttgcaggcggtgcgcagcttggcacccgacgtcgtggcctttatcgcgtcgtgaccttgtca

SEQ ID NO: 1252 - DNA, 2362 bp, Toxoplasma gondii
  source 1..2362: mol_type = genomic DNA
aaaaagaacactgtggaacggttgatgttttgcgttgcttgctgtcagtccacggtcctcttaatggcgtggccactcatcaatcgcaagggaatcttgagtctccgagccgcagcacgtcaaaaccgggaagcacggtggggacagaagagtgtccgtttttgtgtcggcgtatcaccgccccgaagagccacggcagttccccgaaagcaagtgtgcaaccgttttgacattttcttatcctccgctggtgtctgccttcgtctcgtcgcttgtcgggcttctccgcgcaagagaacgttcccagacaaaatggagaatttgagatccgcaggatgttttccgacgcagtgcggctatggtgtaagggtgcccaagacatcatatgccattttgtcaaagacggtgcggacaagcgcagtgttttttttcaaaagaagtttacatgtccccagtaaactccagtttttctacagaggcaacgggaaatggtgcccgtgaggggtgccaacgcgtctgatcgtcttctttcaaggtgcgtgtctttattttcttttcttttgagtgcttccgtttggccgcatcacgcttgtctttttgtagatgcgcatctccaatttactaaaagattgttaccaccggtttctatcgatgtattgtgccgagagagaatagtgcgctgaagcttgcataacgcgaatccccgtagcgcagagacggtgcgaacatttgcttttatcctcctgcgtacgtgaagtagaaaatggggaacggtgaacctttattcccaagaaaaaagtagcaactctacgagagctctcataagaaaaacgcgtcagtatcgaactacttggtcggcgtcagccgttatctaactgggcacgtcttggccgtctgtagcggagaagctgcgcaagtaggccataaacagcaactgatcggtcgctgatcttctgttcagaaatcggcaagtatgtattcagattcgtcttgtacaattacctctgttaactctacagacacaagaacgtctgcgcagcagcaagttccacgtagaatctgctactcgtcagatgctaggctgagatacgctcggccactgtttcgcggttgatccttaaatcgccgcatggtgtaagaaaggagtcccaaaagcaaggagtcctcctcgcttacggttggtcacaagctccccaaggcgctgaaggaccgccgacttcagccaaagaaaacgtgagacgccatggccgttagaagagagcacctctccgtgtggcgagcacggagaatgggaagttgtctggtcaggcgcccccagcgacttcgaactacagaactcttgcattgaacagatatagaagtcgatgttgcctttgtgaacgcgtgctcctctggcacgatgtgtaacgagggcccctcactcttgaacgtccgacccctcggggggggggaccgtttgtgtagcgtcgctttactaaaaagacgacgtatgtcaggcatcgtcagtaacgcatccactgcattaacaattccaacatctctttgctctaggaaacagcgaggaagtttatcctttgtcacatcccgattctttgttctaaacaacgatgcggctgcggcatcgtacgcttatcgccttggtcaggttccaggagacgacgacagcgtcctttatatgtcttgtctttaaggcaaacgaagcagtgtgtcgacactctaaattcaaatttctgccttctgaacgattcttggcaagtgagtttctgtgacctttttttaagaccacgcatgtttgcacgatggagcgcttggcggtgggcatgcttcgcgatcctgtgaccgccaccgacgtacacgcattcacatgcatagattttccaggatgttcttcgtcgaaacgttctccgtgaaatccctttctcggccgatggaggcgcttctttcttgtcactatgtggcatcactgcttgctgttcggccaccgccataggactcgtttttctgtcctctgacagtctgcgacagatccgcaggaagccgaggaactgtctgtggctgtgtcgagcgaagagttcaaaggcacgttcttcttttttcggccctctggaggtagacagcgcttgtgtgtggaaagcgatagggtattttggtggtcactgcgggcaagaggaaaagtcgtgtctcgtcccccgccgtaaacagcaacccagtggaagttcgttttgctgaaacgtgtgacgagtgtgccgagtctttctcatctggttcccaagacatttttgcgggttgtcaactctctgtgcctcgttggagggacttgacctagttttcgcgggctacgtctcgcaaccaccgggaagaa

SEQ ID NO: 1253 - DNA, 4611 bp, Toxoplasma gondii
  source 1..4611: mol_type = genomic DNA
gttgctcttgtttcccgtgccaccactacaagaacagaaaagcacactgtaggtccaggagtgccgccgtacttgtgtggctgcattcatgaaattcggtccatacaagttcaaacacttaaaagtgacacattgttgcattcgataggccacgctccatcttaccatacacgtttctactgtggttccgggcgaattcaataagtcaaagcgccaacaaacgagacgatcgcagcgcgtattcacaagtgcccctcccgagacattaaatacatcccaagcttgctgtgaccgttcattctgcagacgcatcaatgactttctcacttgtcctaatggcagcatcactccgttatgtggtgaggtgattcggtttgcacagcgtgtgtcttgccgtaagaaatttcccaagagttcactgcttgtttcttctattttgacgggacatagtagcagcaccccagcgtctattcaagtcgacagaccccttgtccgaaagctgtggcagtcatggagagcctcattcgacggcgacgcctgctcagcgcctgaaaactcaccgagggcactgatgtttccatctggaccgcaccctaccatctcacaatcaagtgaaacagcgggtgcgggtggtctcacgatagagggccccccctggatccttcgggttcggctgtggttaaagagctgtcgcagttgctggttagagtgaccgtctccacggccttgagaacgatgaatacttccgccccgctttgccaaaccactgtgtgaatgggactctgtcaccatcgttgaatcgggacggcgagcggcaaggttcaggcagaacttagctactcgaaataaagttagtttaggactacggtcgctcgaggccccgtactaacgtcggataaaaatgtcctagtcacggacatgcatctacgaagaagtcagtgaaagatccggcgttgggtgggcttctcatgcggaagaccgccaggggccgacgcgtgtggtagatgatgaccaggtctgagcatccggttcagtgtccataaaaggagagaaccgtggcatgaggcgccccacaaagtcactcgcatgtacgatattttcaatctgctcagttcaagcggctacatacaggctgaaaaatccagcttactccggcactcatgctgcagtctcgccgacgcaagggaacgcgtatgaaccggcaagcagcgccgcgcggaagagtctcacaccagggattttctcgttctgctcacgccacccgttttttcacgccctgcgggtcccgttaaaattaaatcaaagcagttctgcttcccgttgagggcatcgcatgacgctgcctgtcggtcaactagtttaacgatgcatgcacatgcaacgtttgaacagtgtccggcaggaggctcgctgttacaggcagcaggatcgcagcgatacctcttagcttcatcgcccagttgcatttttgctttccgaaaaatgttctggcacacacctttggtgtacgttgctttcatgaagccagagggaaaagtggcgtgcgacaccagggagctaccagagggagataataatccttctaaagagaccaaatttcttactaactacgtgtacagcgatttgcaaccaacacgggaacttgcttgccttccaacaagggaacggagaagaactcagatctatcgctgagacacgcaatgaacggtgttcttgtttcgcaatctcctaccccaggattcaccgtgcgaagcagcttcgggagaaaccctttcggaatggaatatgggaggggctaacaatgcagatgacctgcctcgtctctcgaacgtctgaattgtatttcaggtatatggttgtatacagcagatgggcatcgtgtcaccagtgcggataaataagcctgcattcgtacttccaaacccagcgacatgttttgtctagtcgacaaatgtgcccgatagaattaatccgatgtattcactttttatgtagtacatgcctaggatattacttcaacgaagttcactgtgaagcacgcacatttcaacgttgcaattctgcacaggaaaactccacaaaaggtagctgtcagagaaacaatgctcgcccctgctgtagaccatccttgatgaagattctcgtgagcaaagagttacttcaacaggagtacaccgaaaaacaggcatatgaatgcgtgtaatgtcacagcgaggccttgccgaacatgcacagcaaatgctgcgatcgctccccgttcacaaatatggttgtaaaacgtctgaagacccggttacctgtaatccgaatactgccttttaagaaaattgctcccagatgaagcagtatatttgctactccactacgatcgtgccagtattctctagggaatcaatatagcggaaggaacatacaattctggagcaagcaacaaggaaaaacctagaggaccatccgtcgaccagttgttgtgctctatgacacgaatactgactggtagattattcagagtccgtaaggtctagtggggatatactgacttccaccagtgttgcacgtgttatttgcgggtgttttttcaataatgctcccgaaacaatgccaacggccaatattgcaaaggtcgttaacctgtcatgttagcttgttgtgtccatgcaaagatatttcagaaataaaatgtggatccgcatcctagtagatttattcttcagacgttgcggccgggagccgcacatcaccatttgattgcagcctttagaccctcatcgaacggtgtgtcacaggcgactgtgtcgcaccgaagtgagagctggcggacttgacacaataaaccccgacaattagtccaggtttcaccaagtgcgcaaaacgtttccctctggcactgctcggtcaccatatcccggatgctggttcgcgcaaaaacgttaggggtaacaggcctcagggacttgacaagcagcttaatcgcattcgtatcacttagcaaaactcctggtttcgcagcagttctcccagaaaaacgcacattcacagagacagcaggtgttaactacgacagaaaaagtgccggagaagaaaaaccccccatcctgtgtcgctttagtggcacagccttgcaatggtgacttgaggttcgctgcttcacagcagtctctgctctcccagtgtcctctactgccactgcaatgcattctggcgggggtggcgtagtgcacttccacgtgggctgtcatttctggcactatattatgaaacgaggatgtttacaaggctttcagtacgcccgtttacttaccatactttcaatacgccaaaacagcgtgcttcgtaggattttcaaagggggcatgcatacttaggaacaattttggggccggcctgccatggaccagacgggtttcaggggagtctttcagggatgtggccaccagttttataaagaggagagtaatatgccgtagagaagcacaactgtatgtgactcaactgttcttcgccgccaccgagatgtaatgcactccacttgccaggattcttgcggataccaccggagagagcaagcaaaatgaccccttcgcatgagaaaccaactgagacagcatttggatacttcctactttaatatacatgcgaaacgttctgccttttggatcccgaaatacaagacctgctcgtcgctgccgatgctgctgtctagacgactggcatttctcgatggaattatgcctcgctgacagaagtgcttgaaacgatccgcaaggctcttctataattagcgaactggtatttgctttttcatgcctacttcggttcaccaattcattatcattttccgggttacccgacttctgttgaccctcgtatgccacgcgaacactctcacagagacctgtctctacaggctagccagtgcttgcatacaaggggtatcaaggagaaagatgaaaaacaacaatgtatgagacagacaaccgcctctcactcctacccgcgatatcgttttttgaggagcgattggcctagagatctcatcttccgcagtcagaaagaatttctgttcatctgcggctgtggcatttttttgtggccggacaacaggtgtgtcgtgcatgcaggctcatgcgcaaaatactgaggagccgttttacttcgcagaaacctctgtaaaacataaccgtaggtcagaattgttctgttgttcccatttttggaaccggcgtatcactttggcactcgacgatcatgtctttccttttgtattccggtattttatagcactagaggggtgaacgcgagttgcaagctcttagcattcgcgatcaagttgccacgtcatagaacagccagtcaatccattccgcttctcttcggtcgcctcaattcctgtggaaatacatatggaatgctaggctaattctactgcgcgtctgcttctctacgcgtgtacgcatgtgcagttatttacaaccacagtacgacttgttggttcgtgtagatgcgctcgagatatgtatctttctatatttccgtgtaactacacatgagaacccggccgctttctctaggtctctttcgacctttgatgcttggacagttacgcaaaga

SEQ ID NO: 1254 - DNA, 1793 bp, Toxoplasma gondii
  source 1..1793: mol_type = genomic DNA
ccgaagtgaatatgatatttgtgcagcttgtatataaatgctggttcttcgaatatactctggacaaagtgttcacattagtataactcaaatcgaataatcagagacattatagtgcctaggatactgaatatgactccggtgatgagctacagacaaccacgttcttttataacgatgggtcgtagcataaaaatatgagtatataggtacgcatatatatgcaggcatatgcatgtatatggatgtatatatatatatatatatatatatatatatatgtatatgaatgcatctagatctctctgcgtttgcttttgtatcggttaccgaaagtcttgtgaatgtttgcgaagaatacgtgaaacgcatgcgggtttctaatatttgcaggtgcgtttcgagacgtgtcacaagagctgtctctaaggctatgtcggcgaagagctcggtttcccgcgtttttctctctgcggctctcgtcgcaaaaagtagaggtggaaggcggtctctcctctcggcgggtgtcgcgcttgtctcttctctcagcgcacagaggagaagaaaacggaaggcacgggtgtatctcgggcgttttttaccaagctcagcgggggcgttttcccagcagatctcccagctatatacacgtcgcactcggccgtcgccggcgtcttttgagagtcgttgacgcagaaaaagtcgattttctcgtcgcgtgcggagaacctttttgtctgtgtgtcagttggagcctttcacgagaaaccttgtccaagggccgaccgcagttacttcttttcgtcgggttcgccgccgcttttctcagatgcgcccgcgcccgcttcacggtgtctgtacacacactgccggggggaaaaagacagttttcgagtgctgtgcgacttttcgcgtggctttttctccatccttccttcctttctctctcttcttcaaacacgaggaggaacttgcgcctttcgagactcggacaccctctgcgtcatgcgtcagaaaatccccgtttctgctgcttcggcgcgcgccgagtcgagggcggcacaggcctgcgaggcggttttgagtgttggtcaagaaaagtcttcttccattcactctgcttctgcatcttagtttcttccagtgcgtcttcaatccgtcctcctcgattcgtctttcccccctttctctgcgctctcccctccttttcgcctcgcctcacctctcccgcctctcccgcgtgtcttgaccttctctgcctgcgttttctcttggctgtcttcgcgctgcggccttccgccttcgtcgggtcctgcgttcgtctgcgttcgtcttgcctccgtttcctttcgcttcttttccctcctcgtctctctcctggcgaggagactcccagaagcgaagtctcgacggcgccgaggttgcggagactgctctccgtgttcttctagccgcccgcgtccccctgctcgcgttcagctctgggacgccttccctccaccttgtagcacagggttttttctcgacgaatttttgccgcgcaaagagtctcagcgcctcgtcagctccaggcttcgtcgggcggcgtccgggcagcgcctctctgtcttcgcctctctctgccgtttccaccatccagcgctttttcgtccgtcagaactatgcacaaggactcgcaacgtcgcgggcgtctcttcctccctacgcaccatttcctcaggtggacgtacaccgcatcctctcggaatccgattgcgtctccaaactctgtgtccgcgttctcgtccgctcga

SEQ ID NO: 1255 - DNA, 2040 bp, Toxoplasma gondii
  source 1..2040: mol_type = genomic DNA
tttatttgtagcggcagcggaggcgcagaggagttgaagcttgaagtcctggttgcagagcatgacgctgttgggaggcaagaaggcgaggaaatgtgagcattgttcgtctgtccaaaagtcctggaacgcatgcacagaagcggagaagcgacagctggcgcgccgaaaggcaggccttccgacatggcggggaggaggagaccgacgcagagggagagagcaaagcggagcgcatggaggcgagaagctgaaactggagacagtgcagaaataacgaaaatttcctttttcttaccttcaagtggagctcgcgactcggcgcaaggccgtccagagaaggccctttcagctttcctcgaagaagcaacagtctgtgttcgctccctttcatctcccactgttcgtcagtcgtctcctctgtcctctcgtcttgcctgtctcctcgccctgcctcgccctgcgttccacctctttctcctttccgcggacttccgctttcttctcctggctgaagaaggcagggagaggtctgcctccgccgtcgccagatgcgcgccaagaccgtcgcctcacgccccatagaggaggaagaagagaaaggaggggaggcagaagaagagaaagaagaggcagaagaggcagaagaggcagaagaggcagaagaggaagaagaggtactatctctgctttcgagacttgttttccacggacggaagtctccgctgtcctcagcaggaccgaggacgatgaagtcgtcgctgacttcacccatcttgaaagaaacaagacaagaaaggagacacacagagagaggacggagaagagaggaaaaaacgaggggagagcaagaaggcgcggagagagaaggcagtgcagaagggaggaaactgtggaacaaacggtgaaaagagcaggggggaagaagcgctggagaaagtaaaaaagaagaagagagagaagaggcggaggaggagaggagacaggcgagagagcaagggcagacaaaggagacgcgagaaaacgagacagaggaaataaaaaaagatatagaaggtggagagcaagacagaggaaaagcgatcgaggagagggaaaaacaccgagtaaaattagcgaagaaacgagataagaaacaaagaagaggagaagaaaggcggtcttgcaagacaactcccggaagcccgccacaccaatcacgacaagcgcctgctttggggagtcctgcggtggagaaaagaagaaccggaggagctccgaagattccgaagcgacgatatttgaagaaaggacccacagagaaaaagatgcagcatccaccagaaaaaacaaagacgacgtatgaccttgacaaacgcaaagagcgcgtttcccgacctggaaaaacgaagacaagggtgtcctgaggtgaggaccatctcccgcggaccagaaaagccacaattcaagacttgttcctcaacttttcttttattttctctcatctgcctgcagacgaggttcgaaagaaaggaggtcgtctgtgctgaatgagaaaggtgtgtgccaggacatagcagtcacccgcttcgctcgcgatcgacagctgagacgtttctcctgtatcttgtctctcgacttctttttcttcagcgaaattccgcctgcaatcgttcgaccagacggtcttcctcgagtttttgagaaaagaactcaccagctgaactttctttgcggagacacccgagtgcagtcaccgccgggcgcgatcttcgctgtgctcctcaccgcccccgtctcccggtttcctttcttgttctccgtatctttcttgtgctttgtcttcttgctctgttctgtcttcctccgtctcgtcctcctcgtctttcttgtcctcctgcaactgtccttctcatcccacggtggcgtatgtagagagcagacagagggccgtcgaacacaagggcggttaacagcggagaggcttctcgaaaggacgcgtgtctctctcaggtgaactcttcgactgcaacttttccagctttctcccctctgcaaaca

SEQ ID NO: 1256 - DNA, 1341 bp, Toxoplasma gondii
  source 1..1341: mol_type = genomic DNA
ggaagaggaagatgacattcgcttgcgactgctagagtacgattcggacttctcatttgcgcttccgccgctgcgcctcgtgtctccgcctcgatcgcggcgagacgaagaagacgaagcgctttctctctctcgacttctccgacgctctgaccagccttcgcggccagagtaggacgcctccgtcccccccctgctcgaagaggtgccagagcggctgttgcgagacatcatttcaccctagagatacacgcgcgaagccgcacatggaaatcaagagaactttcaccgattgtatttgtgaaacgtgattagttttcctagccaacaccatccagttgcttgagaaccagtccctaaatatgagagagacaattcggatactgggcagtctccacgggaggcacagaggacaaatgcctagcagactgggaggcccggcgctagtgagggctccggagaaaaagaaacaacgcagcgacagggaagaacagaaggtaggaagctaaccgacgtgtccaatgacgcaggtgagggaagtaagtccgaaaccgcgagggaggacgaagcgtatgacaagtaacgcagttgacgagagaagccggctccgcaaagtgatacggggaaggcttcacaagagcaacacagaagagtcagaaggggtaaaggcacaggattgcgaggggagatctgacggacataggcgatataatgagagaaaagcggtctgtggcacacgtggaaagagagatactgggttaacagttgtaagaaagcgctgtgagaaaactccagaacaccccaaacagatggaccgccgcgtggaacacgagacagggagaaaagggaagcgcccgccacacacagaaaggcagcgaaatacagatgaaccccttatctgcggttctaaccaaaaaacgagggctaatgtagaaggaagagacggcggccgacgaagctgttcgacagtaaaggggggtgagaatcctgctggcgacttggggagaggtgcacgaaggacgggaaaacggagagaaatcaaaattcatgtgggagcggaaaaacaagggggaagggaaacggaatgcaagcgcagagactgatattttgagaaaaaaagttccggaaaaaagcagatggaccactaaaggcatgtagactcagctcgcgcatcgcatccactctccagcagaggccgcattcgaggcgccccagggggtgtacgtacaccgggattctccgccgactgaaaagccgtttttcttgtcttctcggtttccacagaaaacggagaacatggaagaggaaggcggcgaaagcattttgtcttcaaacgcaaga

SEQ ID NO: 1257 - DNA, 3922 bp, Toxoplasma gondii
  source 1..3922: mol_type = genomic DNA
ggaatggcagtggcagtggtgataatggaggaatcgctttgcttttccatgggagagcgtgaaccgtggggacacgtgctcgtagaggttcggctgttgccttgtacctcgtaaactgttggatctcgtgagaatttctctcacgttcagactctcttgatcgttttgttagaacagtacgctgcacttgactgccaagagtttgtaggcgcggttggcaccctacaggtgtactgtggcgttgccgactagcgcacggaggcagggggtcacccttgttggtaacctctggtgacggttttgacctgcagagaagctgcagataataatgcggcggtgttgtgggaccaatagaccttcgctggcacatacgagatacaggagttgttcggctgcggcggagccgaagaataacttagatacagtccacagagatgaccattttcaagtccagactagaatatgtgcaccgcattctgcatcatgctcagagtgcaacagagtatgcgctggtgtagcacacgaaaagattttacttctgtgggatgtggtcgtcagctgccctcaaacatgttcggggctttcggagtaaaggagaccgccgtgcccgcgcctttcactgcgcttccgaactacctgtcccatccgtcgaccactgcggggctactttatcagtacgggctttccacagcggtagggtgatgatgaattcaattcctatcaggttcaccagttcatcacctattcacttccggagaaagtggtatattgcggttctagaaaaaaatactctggtctttttcgcggtgcttctcattcgcgcaggggtcctgcgacacgccttcacctgcctccaatcgcatgtgaaatgctttgcttcatactgcttgctgacagactaatgtggttccaactgtaaagaacgtctcttgaaatagtgttctgggaagcccgcggggcgggtggttttgtctggtctttttttgacaaggtgccttcctgttttgtgacaaaacgcctgaaccgcgtcttaccgcgcactcgcccagactgtttttgcttgggtgtttctcttttagtttagcgctatccctgaaccactgtagacggacacagcagtcctgactgccactgcgataagcctcgtgccccggagaccgatgattccgagatcagcttgagcattgaacttcgttttctgaatacttacttcgtgatggcggcgtacccactgatatgttcaactgtgtcttcggttcgccctttgcatacgcttgtaggacacttcttcgtgattcatgttcgtcccaagtcaagcagtgcctgattgatagggaaccagagcacccacttctccgtctttaccgtactatctgtcccaaggcgatcggtacaggagacacgccaacacatgcgccactccgcagtgcctcgtgaatgaagtcggaaggaagcttggctttaccctgcaacaattctgtgtagctatgtgtgcttctacatgacggctatcgttgtagaagagcaagggcgtaacaacgaacaaaatgccgcagaactcgacgatcacctctgccgttttcttttgcccgtggtggcgaggctgcaagaaaaagagggacgagcgttagtacgatagagacatgcgcagttcaagcaatcgataacgagtagccgcacgttgccttgccatgcttgcacttcactgaaactttgcgagtgtttttgtagataatgtattccggcagagatgcgaccaaccacctaaagtgatgttcatctctcaggggagcgcgtcacgcttcactacggctcagcaactgcttgccattgacgcgtgccccctcttcggactgtgatctcaaaccactctttcttcgtggacggtgggttctggtattttcctccgactttttgcttgcacttgatggcattttccagagcggctctaattgcaaagaacaccaagggaagcgcacgcatggcgaagacctcgatggaacagtttctggttttacttttcaatacgtgcactcgaaaccgctgccgtgtgtggcagacccattgtttggaatcatcaaacaatcgccgttcttgcgcgcagatagcattcgcgttcgtgaaagtatagtttcactttctcttgcagattctcatcggctctgcactttggtgcacaaagaagagctgatttgtttatctcggaacagccgtttgacgggttaagtactatgcgcttattttgcagcccgccttgtatcgtaccacgaccccagacaaagttgtgctcatcccatgccggtccccgcgccacttcgagtagaagagcacccagcgcagctgaattcgcgtggccaccactgtcaagcttggtgtggcaggtgcttgcagcatttttaattcattcaaacggggtattcactgcactatatcatatgcgttgccgctatgaaagggaccagtcatatatgtggatgcgatttctcaacaacccagccatgaataaattactggcatcacaaccagcaagccggtgtgcagtccctcgtgcatgaagggtctctgccctagataccgggacaacgtgacattcacatcagcatctgttaaaaggaaatttcaggtcgttcagctattgtgaagcagttttcctgtggtgcaagcagcccgacttccagtgatttcactccacagtgccgtgccagcgcgcacaactcggctctagggggggatactgtgaagggtacggctaggcaaccaaggaactgcgcgagttttccttccgtcgtcctccacgtgacagtcttcacagtgcctgatatgaagcgccagccctacctgaaaacttcgtcgagtctgtttcgggggttttagctattccgcaacagctgaagtgcaaatgcaccgtgtgatccgagcgctcggcaaagtttatcgtcgcgtttctgtgcgtacactctggcagcattctccagaaattgaagacgcgctggcttgggcgagtctccagttgattgagataaatgagtgcagcaaaccggattgcctgtgcaaagacaatttcataacagatacgcgttacgacggactcaagcgcttttgacctacaaccgacagggatctatcagacaacgcgtaggcaagtcagcatctgggtgtgtccatctgcaaactcccgcggagccgataaaagaagctgtggacttctgaaccatgaagagaacttccagagtcggactctagtcagccactgcttgttggaacttaggacagtgtctgcggccgtaccgcacgcgctgggcatacggtcttggaaggtatccgcccagtcatggtgttatctgttctgccacacagttatgccatcaattcacccacacgtttaagagccggaccccatcagaggagactgagaaaacgtgcaaccatgagacagacctggaaatcaggtgcgatttcgagaaggacaaagcaactcgcattctgatgtagttgctgctcatcctgttcatacacagtcacgagccttgcacccacgaaagagtcgccgcctgtgggttcagatggacagccagccttctgaacagacctcgcagtcgaaactggctctttactgaccagtcctcttctgtactcttccgctgcacctttgctgaagaacccgcatacacgaagagagctgcagagttgttcaaaccgaagtacggattgcaagcatgcaatgcgaccagtgcagttttagaggaaaagtcgggaagctgtggcttttgagaagggccgccacaggaggttatcgacaccctccaaggttcaaacagctcagcgcatgccaaagtctctaaaggaggttgaatgacgcagttacttagcttctgaatttcgacttcctccagtttttgtagacttcagtctgcaaacacga

SEQ ID NO: 1258 - DNA, 1454 bp, Toxoplasma gondii
  source 1..1454: mol_type = genomic DNA
accctttggtggctcagtaaatcagccacaaacaacccacaaaactcacaagccggttcgaagaaaacaaaaaacgctctttaccagaaccgaaagaaatacgtatacatatatatatatatatatatatataggcatgtctctctctatgtttttctctatgttaatctatctatgtagagttatgcatagataaatatatacatgtgaacatatttgtatatgcctgcacaaagcaataactgaatatatgtacatgtctgtttatttcttgccactgcagtgtctttagagtgtgcgcagactgtgccgagccttctggagagccgacaggcggcgaacgaggagagaaaactggagaaactcgttctcgcaagtctcgaaatccccaaggcaacgcgactcgcgagcaaagaagacgagcggcgcgcaacgctgaaacgccgaaggcgtcgggtgtagatacactcaaactcgtctccccgcgacacagtgtctccgaatcacccagggcgcctgcttgcctctgcaagagagagagaagatacgtctggacgcctggagaaacgtctcaagtcgttgcagccaagaaagtcttcctttcaccttccctgaggctgtcgaaggtcgtctcagtcagtggtggacaagaactctggaagacgctttcctgtttcctgacacccttgcgtgagactgtgctcgcagaactcgaggagaaccgccagatcaccagaagtccccccttttcttcacactgcgacacgagaggcggcggcctgcttcgagcggaaaaaaaacgggcagaaagctggcaaagagcggagagagcgtccgagctgtacgtacagttgagacggcactcgctcggttacggcagaccgaccgcctctcgctctccgttcaccctcttttggcggccgatcgtttctttcctccccttgtcaacgtctctagacaactgttcgcttctctcaccgaactttctttcttggcgtgcagctgagatggctaactcgagcgatgaacgacgacgggcgttgaaacgggagagcgaagaagagaaggagtttcgttggccgcaaaagagtcgcacagaaacagccgagacgcttctcaggtcttcctgggacttgaaccttcttttctttcgcgccttgccatgtcgtcgctcgtcgaaaacctttgcggagtctttttctcggcgcatgcacgcactcttgtctcgcacaccactggtcgtcgagcttggacgaatttttccatggaaccctgacggtgtttcctctcacgaaacgcggcgtttctgctgcattgtttccattttcggagaaacagtggaactgctgctggagaaaagtctcaagtctcgactcggcgacggcgaggaagcgttccggaaaatcgagatcgctgtcccgacaaagaactcaacctcatttgcggtttcttta

SEQ ID NO: 1259 - DNA, 3998 bp, Toxoplasma gondii
  source 1..3998: mol_type = genomic DNA
ggaccctgcttctccgtccatagacagctcatctgcctctttattgccagcgtctgccggcgatgcacaaagaaaatcttcaaaaatgccttggagcatgtcccccattcggctacactctcccaatacagtttttgcttcttccagtgttagcgccaccttctctgtgggaacttgaggaaaccattttccggaagttgatcgttcggcttcgtttccacaaaaagatgctcttcggtttgtttgtacaaagaaggtatcaccttcctgagcgaccggtgcatgcagcagttctgccgtaacgggcacctcagaaatcccatttccagatgttgttaaatgtgagaactcggggatattttgacgttgtttcgcgttcccattcagtccttggtcatggtggtttcttgaaagggggttagaatttaggtgtctcacccccttcttcacttgtttttgagctggtctcattttttacgtgttgcagttccacaggcatctgctcaaccaacgaatcccccggaaaatccgactgccaatcaaacgttggaaaccctcttagacagagaacaaatcacataaaagtcatcacagcccggagcagttgccctttttcagagaaaccaagagaactgaatcgttttccttctagcatgcagcactcggtctacaaggatcgctcggttttcatcgaaatgcttacctacgtagacctgctaaatcgcatgcgtgtttcagctctataaacaacatatccgtggacctgagttaaacattcgcttttcaacgaccgtctgttggatcctcaacaccggtacatccgcctttcccgcgtcaaacagatcacgtgcgatggacagtatacacaaaaaattggaataacagagatagtcaagccgctgttacggggcctgagtttaacacatttgatggaggaaacacaatatgaaacaaataaccgtgaaaggcctggttgcgtccgcctgtccactgcacagccaagaatgcataccggatctacacgcttgcagcaggaatactctgccttggtagttctttgtgtttttctaccgcgaagacattcgttcgcctagaagaaataggcagcccgttgtcagctgtcttctctggaaacatccgatatgcatcgcgaaaacattaaccatgtggccggtcttccgatcggcgaaatgcaactttcgtctccgcatgcggtaaggaaagtgcgctgcaagtgtgggttcgcgtaaaactttgggtagctgactcgacgagaagctgccatcgtgcctcaagcacagaactgtgaacttttcagatccaaatgattacgtactggtgacatgggtaggacacgagacgctctgtgacagattagaaacaatgtgttgatttactatctctgcagtgtacggaacaaatggtgtccctggtgaaactggtccttctatctgtgcctagtcacctcaaaggcccacgaaacgtattagagagcctcacgtctcttctcgtaatcaatagcatgaagggaccctcgataagtttttcacgtgtcagctaaacctattcgctacatttccactgaccaataatcgtcagttgttttctaacaggccgtctcgataccctaccgggtcacacctactgcgtattcactcctctcgcgattggcctgcgtgtcaagaaaagctatgctcgtctaacactgaataaaagaaagcctatgcttcagactatgctactctaacgctcaaaccatgttgactgtccatttcccttgtccctagttaatccagggacacctggataccgaatcgaagcttgttgcgccagaagaaaatacatcattgagttgccttgtccgaatgactcgacatttgcaggttcgcgagttcagtggacctctaagaaagacgaggcaggctacaagtcgcgtctgccactagccctgagccaacaagccatgcggatagttagaaacgcatcacatgcagttctcctgatacttgctcagatgactagagtcgataaggaacgtgctaatacctattgccacagactctttgagaagccgttgggtagtgtcccgtaaaacaggagcgaaacattcgggaataaacgtattgtccctcctactttttctccttatggagccatccttcagtaaaggaggcaactgcacacgaggaacaaacagcggctcacagacgaatccagctctatggtgctgcaaagagtgtttgtggttcactccaactgcagccactttgtctgagtcaacaacctcggagtacacttgtctgacacttgtgaattatccgactgtaggaaggaacaaaacgaatcacatagataggcagtcacccctcacacatgacgctgatgaacaacgacttattcacttgccaggacttgaaacagagtatttgtctagtcaggtctgcggggaagcggacgtgggaaacgcgaacttctccacaagaaaaacccactgaaatagcgagttgtatcatggctgcacgaacgacaagcgttcctgtgtgtttttatcctgttcacattcatcagtgcgatgtctcaatgattctggaaaaggttatgctggcgcacccactgccgatatcagacggccgcacacctcaacggacagaatgccccgttcgttaccgggtgttctcatacgcccgcgcagacaaaccagattttctaacacactctgggatgctggtcacttctatcctcgatcgttgttgaggccattccccgtttttcctactcttttgtaagagcctccaaaacataaatgtgtaccaccgactaggcgccatgcatgtgtctcgtcaacacgccccagtttcagaaaaaaatgacggccgggaactcgttgaaacgagtgcgacctttttgaaggcatttattacacttcgtgctggtcttcttcagagagagggaagcccgccgaaagtcacctctattccgtgatgatcgccgagacatgctaacaaaccgtggttcatagaacattgagagtggcaagcttcacaggaaaacgaccttcctcgtttcctctaaaacggcgtgtgccgcagcagagaggaaagcgtcagacataatggtttcgtcttgagtatcggttgaagctcgtctcctgttttttacccttccttcacagcgtatatatttttatctctcaagctgtcgattttcacttgccgtttttctcagtagtgcctagcatgcgctttcttgttggttcttttgctccaccaaccgcccccccatatatcccaggctccaaggagggcggcttcggggtcctctgtcttgcgcagacaccctcgagatctccacaaaattgccccacctctggttctttttcttagtattttgtcgctttgtttctccactgaactctgaaggaacactgagccaaagttcgtgttcgctggcggaaataaaccccgtgctccgcgtttttcaccgccgggacgaacggaggaatgacgtatcttgcatgcgggtgaaaagctttcacgactttctcggaagcacaatatgcacacctgtcatttttcttctgttttgattctttctggtgccttgataatttgtaccgaagcgtctcatgttccgatgcttttctgcggagggagaactgtatgacgacaagagggtacaccgcaaatgcaccgcctcactcacaagattctccgtgtgcatgtgtgtaaacaagtaatacagtcctgccacttgtttttccgcctcagcagattggcatttatctgaaacccgcaacataaacacatgcgtctctacgcgtatagttaccggcgagttcccagtctcgacccggtcgcagctctagttcgtgacaccttgtttctttgagtcggtttgccgtgaagtcatcgatgtgtttaaaagagacagaattttcaagaagtgtgtacgacgtcgatggccaacacagtttgcatcttttcccgtcgaaagtaaaa

SEQ ID NO: 1260 - DNA, 3709 bp, Toxoplasma gondii
  source 1..3709: mol_type = genomic DNA
acaaacggaacgcgcgcaacgttttcttcgactccaagaaggcctatccagatatttccactcacgcatacacacacacatatatgtatacacttacatgtgcatggacatatatatatatatatatatatacgtatataggtatataggtatatttacatggatacgtatgtatatatatatatatatattgatatgtgcatggatgtgcgttatgtctgcgtctccatgtctagatatgtgcatttgtattggtgtagagatgtatctcatgtttgtatgaaaatgcaagtgacgagacgggagtctcgaacatacgcgcttccagaggttcacgacagctgtacctggcgcttaagctctcgaggtgatctcttgactttttcgcgcgtacctgcccctctctgacggatccatctccaaggtggatgttgacgatttcattgtacatggggaacttgacatcatcgagaatgacaagcgggccttccacacctgcgaccgttcgatagtcgaggcgaggagccactcggtagtcgcgagaagctgccgctgcatgcgcgagcgcagcgtcggccttggctgcctgagccgccattcttgggtcccaggaaagagctttgagaatgagaaaggcgattgtcagactggaacgacagagaatggaagacgtcggatgaatcccgatagatcggaagagccagctgaacggttacgagagaacacagagaaaagcgagcgtggaagaaccaggaggattctagagacgtttttacagttcgaagggaaatttggagacgccgaggagaggagacgtaagaagctctctgcgatccgagaaacgagactacgtaacagaggcgtcgcgaggcagacgcagaacagtgaggagagatatcgagggcacagggtctcccgacggatctgacaacgcaggacgagaggtcttgcaagagtacggcaaaagattcgcaaatgaggggaacaagtccacgcagacaggcgtgtgtaacggtctgccgagaaaccgcggatcggagcatgcagacgtcactacaccccgttttctagcagttgggtacggtcttcctgggcgctgcgcacggcagtgtgaggcagagaagtggtttctggccgtcgatccagagtgttttttccaaagttctacgaaatgtcgagaatgcaaggggaacccgcgcgctccaaacgctccggcgcgcagcgactcgcgaacccagcagtttgcagtgccaaaaaaagaaaacgggaaaagaccgcagcggttcagtcagaccctgcgatgagagcgagaagaagcacacagggcgaacgaaagagcgcgagggggcgcgaggaaaaggagcgcagctcaggaaaagggggaaaaaacagaggcgccgttctcgctaaagaaccccctgtttgtgcgcttccttgtgtccggaggggaagagttcgcgcaggtcactaaaactcgcattttctgtagttacaaatccggtcgccagggaaaaaacgagcttcggagaccttcgagcgctgacaagtgaaaatcctcgcacgcgacagagcgggagcgtgctttgccggtagaccaccaacacacacacgcgccggggcggctgtgtcgccggtcgcgcatccccaactccttgaaagaggcgctctttctcaagaagagcttcccgttccttcggaaaagcctataaacatcggacataacctcttattttgcaacaattaacacacagatgtgtgtgcctgcggagatagcaaactggatctcgctatcgctctctccacgtgacacagagacggctcatacgcctcaaagcgccgcgttcgaacgtttcggcttatcttggaagaaaacgcgctggtgagacccaacaagttgcatggtacgccacatacagcgatgggtagatgtagatagttttacagaagccgagaaggaaccccgacacatgaaacggggtctgaacaggcagaaacggcgaggcgagggcgtcctgggttgcaggcgtccctgtttgtcgtcaccttgcagctttaccggtgcatacttcgtgaacgtcacccacgaaaaacatatttttctgcaaggtcacaggctgtgaggaggcgcagaaccatacgtatttgtagaagatgctgagggatgaaaagggacattcgagttgcagatcgctttggacaacttcgttgagtcagctcgggaatcctgtgtttcgtggaagtggcattgacatggaagtgaacgggaagatgcatcatttagaagtgaatgggggaagtgtgcgcggagacacgcacaatgcagatactatgacgagcatgattcgtccgctaaaagggccaaagagagtgtcctccatacgacgcagcgtcaggtgtatattttcagcgggcaaccccgatggctcaaagccatgagtttggtggtcacccaactttggaaacgaaaaccgtcggcatgctcctcgtcggtcccgtatgaatacgccgttacggcaccgctgacgggcgacgcacgtctgcttctacgtttcacacacatttttctacgcagttccgtgcacacgtgtcacacacttaccttcgcatccctcgctgcgcacccccctccgtacaaatactgaacaagtgaatagacgcttggcaataagggtgtgaacaccggaccgacgaggagcatgccgacggttttcgtttccaaagttggatgaccaccaaactcatggctttgagccatcggggttgcccgctgaaaatatacacctgacgctgcgtcgtatggaggacactctctttggcccttttagcggacgaatcatgctcgtcatagtatctgcattgtgcgtgtctcctagtcaaagcggatgtgtttccgcttttcgtgcccgtgtgccacgagtcccggttttgcttggtaggcgaacgagcgccggcttcctgcgactggaacagaaccagaggcatttgccctttttcccaacttgacgacacaggcaccgaatatgcgtcctcgagttttttcggggaactgttctcagcaaggccagttccgtgtgagtcgttggtgtgtgtgtatgtgtgtgtgtgtgtgtctggatgacttaaactccccccgacgctcctcgcggtaagcgtggctgtggcatcgatcagcgtagcgcgtttcgcagcccccgaaatttcggcaatcccgaggctacttgaatggtgaatatgggcgagtctcgcggatggtgccggattgtttgacagatccagtttgcgtttgccctttcttcgaggtgaagacggttttgtttctcgagtcacggccgagtcgtggaggaaaaagccttgtagctgcgggtcaaacctgtacgcggccgctgtccgcgcgtaacgcgaaacctgagagggcggctgcacacggtcaccgataagggtttccccccccccccaatcttttggttgtgcacgacccattgcgtcaaatatcgagtttttcacattctgtttcgttgtatttcttgtggaccgactcaaaggcactcgaatacgtcgcgagggtcgcgcctcaacgcgccgcgctgccgtggcagagacgtgccagactcttgcgcgcgggggctgtcgccgttgcttgtgcaagcattctgtgcgtcgcgttttttcgaagcaagcccgtgttttctggcgctcacttcttgtcgca

SEQ ID NO: 1261 - DNA, 4734 bp, Toxoplasma gondii
  source 1..4734: mol_type = genomic DNA
caagcgtcggtcctctccaaacagttgtttcatcttctcgcctttctgtcgagcctcccctgtctgcgggagaaaaagagaggcgcctgcgacataccggacctgcagcgcctctgctagccactccaagacacgacgtccccacgagtctccgctagctggtccgccagtgtctctgcagctagccggtgtccttatgtctccgcagcagccaggctctgcggcgtctacgctcagagcgctagcttgggcttccctgtctacgccaccagaggcggcaggagagacaccctgagctggaaagacagagggaagagaggaggtgacagcggaggaaggaagcggggtggttgtgttgacaagtcgaacatccggttcagctgttcctgtattgtctgaagacgcccatggaggaaagagctgcaacgcgccaagagacgaagacggagaaaagaatgcagcaaggaggttcgcatgaccgccagagtcgtgagaagaagaagcagaagaaggacgcagggaagcggcaggggagagaggcgcgagagtcgttccagagcctgagagactagatgaggcgtctgacaggggtaacgcagtctctgttacaagagcgttttgtgtgtggagtgcttcgggaaggaccgagtgaggcgcggattggtcagcagcatcttgacgagaacctgtctccgacagcaaccgatcgacaccgccgagtcgcccaacgtggcctggaagcgcggtggtgttcccctcaaagaacaccgacagcgaagatggtgttgtcgcggacgcgcaaccagctttttccaggtctacgcggagcgtctcgttggggtcgaggtacggcactccgaacgagattcctgcagacacaagagtgaggagaaaaagaagaactccgcaaaccccggcgcgcttgaggaagaagtcagggtgttcaacgatgtaaaaggcgacgcggtcgccgagacgggacagccacacattcaggcgtcgcgacggccaggcgcactctgagtgggtcttcaaggtgcagaagaagacgcgtcttcgaatgcgcttcagacagctgcagaaaccgcgaagcggagagggaaaaggagaagaagacgacggatgtgacgcattcccaccgagagtggacatccgaggagacgcgagctgcgggcgagtccagacgaccgaagaaaagtccaagtcgctccagtttccacacgacgcaacatacgagcttcgcggttgctgagatgtatgtacacccgaggcgtccgcctgggtggggcctcgggctggggatgcgctcggcactgctgtctgctgagaaaagaggcatgcgtcgctttgctccgcaggtagtgaacgatagaagcgcctcataacactgctgtctgcagctcttctttcctgtggagacggagaagcgaaagcagcctggcgagagtgacctcgaatccctgaagagtcgctacctccgacaccgtcggcgtcggatgcggcggccatcctggcgaccaagcgagcacatgagacacggcagagagacggggaagaaggggaaaatcagagaaatccgaagaggggaggacgagatatttcacaagatgtacgcagagttcgcaaagaacaaaactgaagacacaaacagaggctttcttctttcctcagtctctttgacagtgctccagctgtgtggcaacaaggtacgtgtggtcagaccgagcgaaggaactgatacaaaactggaggatttctcgcatctttctcaaggtgagaaattcgaaattgagcgggtgagatgctgaaaaattctttcttctcaactggtcgagattcctcaaaattgtgcaggaaggccaacggtgtctccacatctcagcgctggtgtgtggctgccgacttgctcaccaccaagggccaaagcgagagacctacgaggaggagaaatagcgtccaggttttttctttggcttagcaacgaaggcaaaatacgccttgattgtctagaaaaacctgtcgtttcttggcactgcactttccagcctttataggtgctcgcagagagacagggagacgagacagttgagacccgtgtgtgtggatccgagcgttcagcgcgaagtgttttaacagtttttcctcttttttctcccaacaattgcacggaggataagtcaactctcttgaaatatagagtccatggaagacctaaaattcgcaggggccatgcggtacatttaggatgacagctgaagctagtgccgctctaaacggattttgaaacagcttcctcggtttctaaaaccgacttttttctccgaagtctaacctacgcgttcgactacccatccaaattttgaagggctttgttagcgaatcgggtgtttcctttctctgcaagctccatgataaagaagggtttaaagacgcaaagtcacctgctctttcctcgtgtggctttaggatatttggaacccggagataccggtggaacagcgcatggctttgcaaccttccctccactcgattcaagagcagatttggagagcttgtctctccttccaaacagcaaggattgttattctcattcaactttccaagctcgcctatctctgcgttctttccaagttgtcggtcggagcgagcacctggtcttggtggagagtgaggcacatacggaaaaaagggaacagcagcgttcaatcatctgtcctcgaagactttacggccaacagaaataggtatctttacccgattcacaatgcactatttcctcgttaaatcccggaactgttgtggggaacggtgaaaggtgggactgctacctaccgagtcacagcatagcgaatacggaggaaaaacaaaaccggagacgtctgcccggcaaaaaatcaaacatcgcaaaccatcgagaagaaggatgtttgcggctaagcaaacaatatgtctcggatagttatttaatgcggaatgcccactattcagcaaaggcaacaatttctccctgctgctgactcaacatttcgagtgaactgtccaggaagtatcgccgcccatatctgtgtccacacaaaaagacatctatctataatatggagagatgtgcgggttgtcttctgtgggccatttacagctgctagaacacgaagagtcggcatctcgtgtggggaaaagaaggaatttcacgattcgccgagacacaacgcaaagtgaattccgttttttcttgcagtggatcgatcctgggtcagccccatggcaggtacagagagtcagagcaaccactaccatttgcggagatgcttttgcgatttttcctcattgttgcgacgaacggtatcttaaacgcgtggaaattgtcagtgaacgcggtcgttaagccggggtgtatcttcgcggcagacgatccagagaaggaagtgttcggtgtaggataacgaacttttgaaatacaaagcagcaccccagaagtcccctgccctcacagaagcgatatttcccgtcttcgttcgtgaaagaactgcatgaaccaaggaaatggaacatgtgtaccgcttgttctcccggaagttctgcaaactttggacaagtaagggttctgtgtggttaaaacgtttctacatatgcggaaacgacaaaaagcacctttcgcccgtatcgacaagcataggtagtaaaatacaggtttctgttatctgtatataggggatttggcattcgtcgcttgacacaccatcggtttcaaaggtgctgggcaggtagaaagagaggaagagggacaaaagggggaagcagatccctgaggggcttttctcttttgttttgaagtgccaaggagagtgtcttgcatgattggctgtgcctcagttcccaacactcctaggatgaagcgtttggcaagtgtcaaagaaccaaaaattaaagagaatcaactcgtttctctctccacgcatgtgactgcccgcacttccctgtgttttccctaaaaggcgagaaatcttgcattaggtcgcaacgcggcagaggcgtcggtttcgtcctgcctcccagcggtgtctttgttccaaaggatctgtgcaaaactccctgttcgggttacgtcaaccaatttctttcccttggtctccgaacagaaggcaattcgactgcctctcctcctgttacatcaaagtggaaaattaatgtccttcctccctgggagcacatactccataggtgggaggtgtgagttgggccgctctcccaatcgcatttttgcttggggaaaggatgatatttctggtcaccacttaacacagcttcatgtgttgcgttcgttcctaatgctaccagcatcggcaaacttccccagtccctcctgcgtttttcgagatgcaagttggtgttgttgtaacagcgcctttttggggttccagctgcaagatcagggtctgcgattgaggcaaacaggtgtttagcctacgcttgttctatcgtcaactttgtgttccgaataagagccgacgctgagtggggtttggccataacccgtcgcggtgtagggtcctgcagacgtggggggaccgcgcatgcagacgccgcgaaacgaaaattgcggggtgatcgtggatcccgtgatttttcctctccgcacgaccgcctcgacggactttttcagaacattcttctgaaagagggaggggctggactctacagaacctcaagttcttggttttttctgggtaaaaaaga

SEQ ID NO: 1262 - DNA, 2146 bp, Toxoplasma gondii
  source 1..2146: mol_type = genomic DNA
aaatcggagacgttcattctcgaggaccctgtcttcccagtactaacgcctccatcgcgtcgcctatcgaagcaacacggtgcatgctctctacgaagaaaacatgcggccagtttcatatgcatgtgtacataaactaatatgtacctgtatatataaacaaatacatatatatatatatatatgtatatgtatataataggtgtatttgtcccgacgtacctgctggagggtgtgttttcctaggcaagccagagggtggaggtagtaacgcagccgtattaacagcgtgagaaaacggcacatgtgatcgattttctcgttcctctgatcaggaaggaaagatgctacaaacatagcaacccccacaatctttcctgtagaacaacgaccatgtgcatcgcacttctcaagagagaaacgcgttgaacctgcatgtagaccgaaagccttttcctgcgatagtgtgtgacggggcaagcgttcgacgacagcagatcgcgctgtctgccgctgataaatcttggtatatcgctgaaggaatgtactgtctgaaggtcgacagaatggaaactcggaaggtcgtttgaaagagaaagtccatttcaaggatggaaagtcttcaggaaagaaccaagacaaagtataacgcttgcaggtcgacagggcgtgtctctgagtagcaaaggaaatccaggtcacttctggcatcgcagggactccacactgtaccttttctttctctcccgggacctctcttccacgcagaggccatcctaaagaaacctgcagagagtatcctccaacgctggttcatccgttgctgaacgtctctgttcggaattcgtttttctgcggcgactccagtttcatagctctgggtatcaactaaacgataaggtgaaagtgagtttctttctttttctcgcggccaatgctgtcctgcagagcctcgtcctgcgtgacgtagttcacctgctgctcacgtcttctccgcatttgcttttcttttgtggctctgtagacgaacttcttttcacacagcaagaaaacagagcacttttctttgcttcacgtgaggccccagaccatgggagcaacgatgatcaactttgtgaaactccgttaaaggcaatcaaaaaagttctctctgattgttcctacgaaacgctggtagtgcacctggtgaccacgaatctttgtttgggaactcttcagaggagagttcgtaaaaaagctcgcctcggagaagacgtctctggtagggcggcctggactcgcatctgagaagtcagtcgttttctctcgccgtcaacatacgtgtgtggcgaaggtgatccacgaagagacccctcgacgaaatcgtcgttttccggaagcagaaagccatgtagaaccggaggttcctgtgcagggactccacgcagttctttgtttccggatctgcccagaaagatgcgggcactgagtcgctcgcgatttttttgtggcgtcaacagatctgggttaaactctgtggaccggttttgtgtcttgacatggttctgagaaccaaagcgttcaactgaagctgcattttcttttcgcgctttcttgtgttttcagatctgtggatttcgcggcactgcggcgatcggcttgcgtttcgatccagctcatatctcggcggtttttttttcgcgcgtcattcggctcccaaacgaagcggggggaagccccgacgcgagaccgcatgtgtgtctccgttttccttcactgaaagaagtcgcgtaggagaactcactgactcgcatttttccgaggactcgcaacatccgaaagtctgtctccgacttcgtctcttccgtttcgcgtttgccaggaaatgctggagaaaagaaacgcgaacgcctctcggagttccctataaagaccgcacgcgctcaaggaaagacagaagagagagacagcgaccatctctccttctctcgcgcacccgcagatccccctccttcccctctttttgagcgcccgggcgcgagtttggactctgcacgagcgaagctggcggcgtccagacctttcctccattgtgtgtctcttcgttctttctgtttctcgcgtctgagagtgcaagtctgcttccttcccctccctctccacaaaa

SEQ ID NO: 1263 - DNA, 1955 bp, Toxoplasma gondii
  source 1..1955: mol_type = genomic DNA
gctacctcagtcaggacatttccttcttccgtgtctctgcagcgttccccagtttgttgagaaccgcactcttctgaagagtgcttcccattcgctacgtccctctgtctttgaggaattcgcttctgatgagcaaatccgacgagaaagacgagacaagaccgcactagcgacaggagaaactgaaagaacgcggacgtcctacggttgactatggagtaagacactcatgactgtctttggagatccagcaggacctgtgccgtcggattctctctgcagggaaagttacagatacgccgtgcgttgctgtggaaatacagctgaaatgttccattgaaaccgaaacgagacctcttgcttcggtctccacgtttcagagcaggacagagggcgttaatatgcggacgctgcttcagataagaagttaatagagtgcggagtaagacagaaaggaaggtagttcacgaagaatactatagaacaaacccattacaatgtagtggacaacgacgcatgccagaaaaaatatgaacgatgctcatcgcaccacgcgctcctgtccgagccagccgccgtggcatagaacccccgaaaaaaacggagacaaaggaaaggggcgcaaacacaggagcaagtaaagatgtgtttgatggaaagaaaaatacgcaattgaaacacttgtggatgcgctgaacgaactccgggattccgacagaggaagacgacacctgcaggtgactctgcacgtttcggggtgaagagggaggtttgtcggaaaggtcgtcggctagagtagaatcactcttagtctgcctgcagtgatggtctgccgaattaggaaagaagcttttcgggtgaaaagcgagaaaatccaccaggtgaggagggcgcgtctacgaggcagagaaggcacggaacgcgacgctccacgtttcgtctgttagaagcaggccagaagcgggctagagcaccgttccctagtcaaaaaaagcagactatagcttcagcataaccagaaagtagtagtaagcgccaaaaggcgtgagctcgtggcacggtaagcatcttttcgaggatttcaaacggcacacacattacggcgtggctgcacatgcgatctgcatgcgctcagcagctttagaccaaacacaggaaacacgacggatgtgagggtcaatccgcgccgcagaatctcatttggacgcgtttctggagttccttttctccagatgaaataccgaccgaaagctctgtggttcaaaggaaaggagacgcccatgctccctgaaatacctaccaaaaagtgacgacttctctggatgacgcagtggggcaaactccgcaagcgagacataacatcgggagacgcccaccgcttgtctgagtttcattcccatggcttttttcttgtctccgattccccgaagaagagacttctcgaaacgcgtccagattctggctacaacttcgtttccgctgtgagttcccgcctcagatggtgggtttgttccgccgctttttcccgcgaacacttcacttttctcgtggagcttcagagcctcctgtttcactgcttggcatttctgcgccatgctaagtgcagcaagtataaccgtatccggcacattcaccttcaggggcaggcccgcgtaaaacaaagttgcttacgaagcgcggtggtggaaagcctggctcgaaagggcctgcaactgcagaaatgcctacgcggtctaagggaacagaacgtggccttacattccgtaatttgttccagactattagttcaagaaatgtgtctacggaatacatgcttcctaccacgtctgtcgcgccgttggtacgggtcttcccaccttttggctaaacacttcaatcaacgcagtgctttttgagcagcggacccgaggtcggcgtacctttttctttcgaaaagtaaatagaccaagaggata

SEQ ID NO: 1264 - DNA, 1688 bp, Toxoplasma gondii
  source 1..1688: mol_type = genomic DNA
ttgtcgaagagagcaggcgcccatgtggagaagaggtatagaaacgggcatggagacctggcaaagagaaccgggaagagaaccacggaagccgagcgagagttgcccttgtcgcacccgcgttgtggcgtctgatcgttcttcttgctggtaaccagagaaggttgtcgtggagcgcgtcttgcggggacaagacagattcgctccttgaagggccagacacacatgacgaagcattcgcggtgtcccttacggcgccacagcgcgtgtgacagggggaaagccgcggggtggaacagagcgagggagcagccgagagagacaccaaacgtaagcgagctctgtctggttgtgtggaccggcttgtgacgctctcccgagaaagcgcggagccaatagagaccccggtgggagcctgagatttcgccggcacatcggaaggaccccgactggcccgcaagatgtctcgcggacagaaaataaacagccgggaatctggagacacgaagcgggaaatgacatcacaaggggggtccgcgttcatgactggtcgacagacagctcgttgctgcaaggagagaggagttagcgaagagacagaatcagaggcactttgcgactgtcggaggctaaggcagaggggtcccgtagaccgtatcagcccgcaggatctgtgccgacggaccccagcaagctggcccgaggacacccggccaagtggccccatgctgtcttctcactgtgatgttctctgttcttgtggttgcctttaatgtcgctttgtttcgagtttttgaggagccgcaacaaaagcgaaccgaggcagggcggtacaagataccactcgccacggcgctgaggcagaggccagaaaagggagaaagagtcgagttgttgaaaggcaaaaggtatggagtcctcgtgtcacaaatctctttcttgaatttgttcaggagaactaagagaggacgcacaacgtgagttgcatgtgacgggaacggagacttctggaaaatacctccagaagagagacaggtatacttcttcggacacttctggttgccctctgcacaccgcgcttcttgagacaggatcacgggaagatatggtgcgaggtcgagaaagaggaaggaactttcaagatgcgtctacccgtcggcgcgatggtttttcacggcctcagtaaatccagtgcgaaaaggcgggaacgcgactattgagagaaaaacgtcagtggcgaggatgaatccgcttctctgccagcctacatgacagaaatccccggcggctgcacggccacccgcttgttttggatgcttcagttacatggcgctcagggatcactatactcggaacaagcctttcgaggcttcagagagacactgctgaaaatcgtcaggcaggagacacacgcatcttcccgccttttctcaagctacggaagacacagtgttgaaaaccgttcattagccgatatgcatgccagcgatttttcccctcccgctccgcatgcgctttgcacgcgagagagggacagaaccaacgtgtcgcgtattttcgagagtcgggaggcataaaacggggtgcgtgaaaactgtgtggcggcgcctcatcttttcctcttgcacccgtttgcttttgttgtttttctgcgtttgtggagatttctaggagcagggccgacaaga

SEQ ID NO: 1265 - DNA, 2868 bp, Toxoplasma gondii
  source 1..2868: mol_type = genomic DNA
cagctgaacggtacacctttggcgaaagatcttcaagcgctctacgtgggccgcccgtgcaggcagcgctgtctcttcctctgtcttctgcgaagtcaccagcgttgggccggtgctgcgggtggtggcagtacaacaatctgtgcgccctgtctggatcgttgcagatgcccttccgtttgaagtcaatgcagacgatgcacagtcccttccggtggagaacgtcaagagcaaacaggggactgcgggtatcgctgtgctcttcttcgtggcagtttcggcactctcctccatttctgcatctcccgacagcatagaacacacaagggtggcaagtgcccctgttgtggttttctgccacaagcggccgccgcagtgaatctgaggcgtcacgcgccggatgggaatatgcagacccgtgaaatggatccttcgacgagtatctctcgccctccaaaagtcgctgagacgggcccacaggcaagcctcctccattagacgaatagcccacgggtcccgcgtactcgcgcccaccagatctctcctggactcttcggtcgggtgaatagctgggacctctcatgtgcatgcgcccgcccgatggtgtgtaatctccggatcgcgaggctgcatgctgccgccggtcgaaatcgtcactgtttcctcgctctctccgataccactcaccgtcatcgggccgtcccacccacccgcgctgcgacgcgtggtgcgagaatcccccttcgtttctactgtctagccccatttcttcttccagcagatttcgccgatcgccgcgcgcgtggggcttcccgtcggtacaggaaaggaaatgcatgcatgcacatgcacacgttcgactcagacgctccccaacccctgcctcgtaacagcggctttccacgctcagccacctttttctggaaccgctgaatccgatgtttctgacctgcacgcaaaccgtgaatgtggccgtcagggtggcacctggtctcagagcgcgactccgctgccgcgctaaggtgtgaaggtgtcgctgctcggcctgcctcgctcacaggcaaaaacacctgagaagcccgcgctcgcagtcagacttgtgcttcagatatcgcaggtagtgaggcgggaggaaaaaaagacactaccggcactcacgagagggctgggattgatcgacacacacacagtgctcgctctcgagaagtgtaggaattcgaggtgacacgaggtgtgcctggcacagctgcagatttgtttgctggaactgctgtccgctgggtacgaaagacaacgcaggtggtggcacagaaatggacacctgcatctcgccccaaattcctttcctgcaagcgcgctgactggccaaacgcaaagatcacagaataagggacaaatccgtgcacgccacgtctcgaactctgccaaacacgaagcattcactggaaatccggcagatacaatgcgtggacagagagctcctcaaacgatcgcatcactgtggaagaactcggagtgagaaacagtacgggaatggaaaggcggcgtacgtaagacggacccgatacgcaagaaatcagatgtctcggaacagaacggcatgccaaccacgcgttccacttcagttcgttttaccaacaaacatgaaggcagcgcagacagcgtccaaacgcacagcacgtgtcaagcgtgtgtgtgtgtgtatgcgtgttctctgtgcagcacacgaagacacaatttcacgcacaactgctaatcgagatatatattcgggacgcttcgtggctaccatgctttctgctacccttcagcgcagcatctcagggaaaaaccgcgcaacaaaccaattttaggctttcgatcactcccgaagagtcacaattttccaacgggtcacatttgtgctgatataacagcataaatctgtgcgttccctctgcggcaacgaaaaaaataacgcaggtagagcccgcactttgtaccaggaacgccgtacacacacgagtccgctactaacgccgttcacctgaccccatcattggaacagggaaagacaaccatgtgaatttacaccgatcacttctttcgagttctgctgctgaggcccaaaaaagattgagacagtgtgagaaatcgacgctgtcaaccccaacacctccatgaagtggtgcgtaatcgggaaaaccggaaaaaaacaagaggtggacgggggggggggataatctatcactggtaggaacacacaatcgctcgcgggcgcttgatagttcgccgaaacgaaacaggcgcagaacgttgttacctgtcgacaaaaaagaaagatagaggcacaaacatcctgggacacaaaagtaccccagcgaggctcgcctctctgtctctccctgcctccggctccctgtctcacccctcacgacaaagacttcttccgaatgtcctgcacactatcgagtctctgacgcgtcctctcgtatgaaaacgaagtctgtcccacacagccttaagacgcagatggccgcacagccggggtctgccaacgcctcgttcagacgtaagcatccatccagccttgaaaactgcatgccgttttacgccactcacattccagccaccgcctccacgtggttacccttcaccactcctgagcgccaccccgaccgcaacggaagaagatgcgggagagttgcagactagaaatgccagccgaaaaaatatcccgctcacatcataaagccaccacaacgatgatctaggaaccgagaaacaacgctatttcgcattgttcgaggacttacccaacttgtgataagtttttggcttgccttcatcattccttaggcgcgcagttagcaagcggctgaacttcag

SEQ ID NO: 1266 - DNA, 2047 bp, Toxoplasma gondii
  source 1..2047: mol_type = genomic DNA
ggctgcatcacattgctcatgtgcctgatacgtccgtcgtcggacacggaggcaaccgtgacgtagttgttcctcacagatgggttcgcaggaagggtaacgattattctcaatttttgtaactcaaagtcctaagtctgaagaacgactctgtgcagtaacttgcgatgcgtggagcatctgtttaatcctccgctgatctttttgtgactgccgccatctgcatcaacaagcggcattctctacacgtttatctgcggtggacagaacttgatcatgttcgtgcccctgaataagatgagttacgcaacgaatgcagctggattcgttcgaaagcagcaaccagaaaagccgtggagcaagcaacagcatcacacatgttttactgacaaacgttgctgcaggacgccggcattactggagccaaacacagaaaaggtgctgcgttgcatcattttgtctgcgtcctacaagctcgtcacatgcaaaggggcgtttatttacggacgacagacgtgtattggatacagacaaagactacagaggtcgttcttttgccagcggcacatacattctgagaatgaagagttctgttctagcctccctctaccacttaccacggtcgtatatgaaatcccaccatttctagcgaaacgctaagcggagaagcagggtcccgtcgcgactggtttcctacgcttgcctcgctctgctcagtatgttggtgagattgaggaaagaagccaatacgcgcactgccttgtgctagcagctgcacagttatcgaagcactttctcggcactgagtcagtgacgcgaagtagaaactgctgcaacttcagagtgcgcggacaatttaggatagggtgcggccgtatataaaaagactgttctagtatctgcatcaagtatctacagaacctatttgcagctctatcgtgtcactgactcggtaaaagccttgaacgagttcgaaagctgtgacatacggtgggtgagttgctttgtcgttttgctgaagcgacacgcaaaacatgcaagtaaacctggctgctgcttccaggcggcggcggtgccggcaggataagtgaaaggtactggtggagacagcacaccgagcaagagcgagcattgctttacacctggtgatgaacagagtttttgggctgtttcagcacggctagttccacattttgtgtgccttccgcgcctggagtcaggtgagtgcgtcacgtgaaacctggtgtatgattgagaaaagctggcagtcgagggcagatccccagccaacgaaagagcagtttcgaaatccggaatcgaactaagccacagggtcttgcagaagtaggcgtgagttttgaataccctctctgatgttggtgaatcagtttgcatgcgtgcgcgttgtacaggacacgcttcagcttggggggtgtcgccataccccaagacaaatggtacgcatgcatctcaagagaacggcgctgcgatcgctggggatgctgtgaagtgtggagaacgcaacggttggaggaatgatgagtcttcccaaatgaatggtgcctcgttttctcttggcttaagtcaaccacaaagttcgccactacactctctcgcgctcgcaacggttcttgccagttgcagctccagctggaaaccagcctcgaaaccgttcgtcgtattaccgcgtcagagtaaaaacgtctcctacctaactaggctgaattatcttttgtgcatgtgtctgctcaagatcgccgcctcgtttccgccagagcagctccccgtgatgtaaccggattccgcagttaaactagaaccgtcttcaatcatcgagaaacttgatcacgatgccacgcgcctcgataaacggctaccaacacggacatctgcgtccgtgtgtgtgtacatttgtacgcccgtgcctataggacgccaacctgaatcttcttgcgccagcggcgcggtgtggttgttacaggggatttttcgccggttgttgagtgccatgcagggaggcaaaataaaaggctttagttgcataaaa

SEQ ID NO: 1267 - DNA, 2219 bp, Toxoplasma gondii
  source 1..2219: mol_type = genomic DNA
gacgttcgatggcacacatactgtctgtaactcttgttttggacacagaaaaccattattgtcagatttgttcgccagtttcactgtataggcgtgatataataccggtagcgcttcagactggagaatgttggtgcatatcgtctctgcgagcgtcgcagaattttgctttttcgcgtttgcaggcacgtagctcgagtgacacgctgacaggttcaggaggtactgctcttggaaaactccgccttgcagcaaagctgcctagtgtggacactgtgcatctgagcgcaaagtgcttcgaagctagaaactgaaatccactgagtacagtgcgcgagtatgctctggttttccagggcgttcgtctagaattgtttatcagttcacgaatgcttgcacataccaggtagccatgtgtatcaaaagatgatttaagcaggcctccaggcgagttagcgcggtggtttctcccggagtaccagaagccatgtgatcaacatagtttaatgggaaattaaacggaacctgcgatggaaaatacttgcatcaaggagccctgagtcaagcgtgcaccctcctgaaactcgacggtttcttttggggcagcaaattatgttggtctccaactctgtgtggcatgaaggagaacaacaatcattgctcttactgcgacgtctttatgtctgttccactgtcttccagttcactcgtgggtattcttgtcgctccatgcgctacccatggacagcataggtgtcagtccaaatgtggattcccaccaccaaagaggaaatcggcatccaaacacgttctagtgtctgtaattttaagaggcgggaacgcaggccagcgcggccaatcaaacacccttgacgcctcagttgaatgacacagactctgtttaatgaatacctacagtggcgtctgagtcgtcaccacaagatcaaagtgaaattgagacggggtcatcagacggtgctgcgttcagtgctgtatccagagaagtaatgttgggtgaggcatctgcacgattggccggctacgaatcccttgatattcacacagctgtagtgcagaaagaaaaaaagctagattctaccaaacattttactgaaatacacagaatgatactatttgcccttttttgccttacttccccagctcaatggacacccgacagtttcatagcgattgcataggcgcgaattcaaatgcaagactgattcttgatctttgtaagctcagtgtagctgccttgggaacaaccttgtatgcgcacaggaacaagatatgtacctatccatttgaacggcattctaagtcaatgctttcgtttatattgctgtaggccatcgctgtggtctttgaagcatcatcggatggagtacgtatgactgcgtaacagcacagtgacttcgctcattttcagccctgcgagatatcgcacgtgtacctctcagacagacgggacgggatgtcgcgtctcttcactacaaaggtcaccgacggtggcgactgttcgccttttgcttacgaatagacagctactttctttccataaaaacacaatttgtccattctcgtttccccacggttgccatatttacagaatgtgaaggcaagaacccgagtcagtgttgttttcaaggtttccttttcaagtagcggagtcacacagcgaagtggcttttcccgccgctgcttacccacctcgttcgcagttttttcggtttctcgttgcgagaggagaagggccggaaggcattttacgtcgtattctcggggcccgagtggaaaaagcgagacgagggacccttgttcgagtggaaggtggtgagagatcttctaccgtctcgaagcagcgaatggaacacgacatacacagctgttgacgagcggcgctcaaatgcgtagtggcggctatcgtaggccgcacatagttttgcgcccgtctttatccactgagagactttcccatgtttgtggtcaatggtttcatttggaaaaactatgtggtcccttgacatcagccagctaaaaaaaacaggtcagcagcaagtgtgcctcaacttcatggttcttgattttgcccatccgcatgagtgtgtggcccttcagtgctgattgcttggtccctctcgtcattttccagtacgttgcgtcagcagtcatatgttacgtttcgtcctgtgtcgattagcctctgcatctttttttca

SEQ ID NO: 1268 - DNA, 1307 bp, Toxoplasma gondii
  source 1..1307: mol_type = genomic DNA
tgctcctcaatccagacttcactacacaaatctacacttagatagatagccatccatacagaggtggaggctgcgccccacaaagatgcatatatatatatatatgtgcaaacgtgaggacgaaagaggagcgacttcgcctcctgtttgtctgatgcgtgagatgggagaagtcgttttcgtttttcatgtcttgcggtttttttgccgtccagcaaggaagacggacatgtggtttgttgtcttcctggccgtcgttctcattcgttgtctcctgtgcttttttctcctgtgttcgtttgctatctcattctgtccatttgcggtttcatgctctttcgcctggctttgctaaactgttcactttcttcctcgaccgctttctttctctctgttgcatcctgtctttctcgttcgccccttcagttccccgcggcgtcttcaccttccctttccctgcagtatcggatcagttggcgttgacgcgcaaaacgtcgcccagtctcgctctgttgcaagcgtccgaggaggcgcagacgaacggagaacctgcgagcgaaactccgcgagagagtttctttcagtcctcttctggggactctcccgaggcaggctctgctctaacaggttcgacctggcgcgtcggccgccagattccagtgcccttcctctgtggtgactcttcgagagaaagaagaggagcaggaaggcgcgcaagagctcaagggcaggaggactcacacaaagaggcgaagagcagctaaacgagagacatgcaggatcgagagtgaaagacaggagagaagcagagagaccgagagaggcagggagagctagcaaggtgaatacggctgaaagaggcagagatgaagatttggaagaagagcaacgagagatctgcaaacatccatgccaccgaaaaaaagttgagagcagagaagagagaaaggaccggcgaacgaaagctgagtgcgcccgcgggcatttttcgcgcttgccaggttgcatgcaaaacagaaactgcgcctgaagcgcatgcacgcggcgacatgaattgagttgattttcttctctttcgctcccttttcgcggaagaaaaacgttccagttcagtgaattgtctcttctttcctctcgcgccttcgggaggcgtcgcgttctctgcatctttctgccggtgaccttgttccgtctctcccgttgttgcgttctgctccgtcgcagttcgcagactcatcttctttccttttaggcggtctatgtctcttattttctcctccgcagttccttttcttcgaacgcttcta

SEQ ID NO: 1269 - DNA, 2208 bp, Toxoplasma gondii
  source 1..2208: mol_type = genomic DNA
tttgtagaaattccgtaggtttccgatacagccagcactgcacagccacacttcgcagccaccagtgacagtttcattgcagcacgcacagtgtactgtcctgtgggggcacgtcttcatgtggacctcaagctcgacggcctttatgtatgtctggcaaccgtcgtagacgcacgggactattctctgggtgcagtgggacgctaagtgctgcggaaactcgcctagtggaataacctcttcacatccatcattgctgcacaccattggagttccctccagaatacgaatgaacgatttgttggggtcagagaaaagccatgtatccacagctctgccgtcgtcgtctttcttcccgctggaaccgtatgtttgcttgttgcaaagagggcacgtctgaatgccagacttcataagattttcacagcacgacctgcaaaaatggtggtcgcagggggttgccagcgggttgtccaggagatcttggcacacggggcatattagatgttccaccgcccttggtccgtagttcgtgttcaaagcacattgatcgaccggaaaacggctaccagtgattttcgccatggcttcgtcggtactctgcaaaagtgtgaaagatgaacaaaacaagctacaccctcttcagagacttcatacagttctccagtaacgttgtggcaaaacaccaaccagagctccaattcaagtgacatgatctcgaacgacattaaacaactttccggagtgtacgtacacccatacttcaaacacggcgttactattgtgatgccaggaaactgaaggccgaaagaatcacgaatccccacatatgaataagaggttttgagcgctgacttttttgagttcatccatgctgacgcgcatgaccttccgtttttggtgttatcctggtcgagaccgctccacgttagtttcattccggtgaaccacatttgctaaatttcatatctgactctaatcagtccccgcctgtatctaatacttttatcaggttcaagcaataacgtacgctgctcgcaacttctctgtcgaatgtggaaaacggtagtgccgcgtcaatgaacctgtggtagtaccaggctacctcgacggctgcgccacccagtagcttcagcatttcgcaccttctttatgtcgatttccttccaggtggcgctgctgtcacaatttcctcctagtagagactctaatacacaaagtggcgatgaacgcgagtggttgccaagcgtttccccgaatgacacgacggcgaccaatctccacttatgaagagcaccaacagcccacacagttgacagttgtagacgctttctgtgatgaccaaattagttagccgcaagttctaccgcccaaaatctatcttgaggtgtctgagtgaggaagccccgaatattttgatgcaccgcgatgcgtccaaccacggcctgttgcaggcttccctaaaacgtgtgacatcattggacaccacaaccgtaaagaaaaagtgtcaatggccgtcgaactacagtgcatgtgtcaacaaactatgcgtcgcaatgacgcacggcggcacctctgctattttcgaagtctttcaaccgcagcatgctgtagtcactgcatgcgaggcatcaaaacggtcgcacacggtggtctgcacgcacggcagccatggtgccaccaaccatttacctgaatttctgttcttcaaacagtcccggtcttctctgcatttatttcaggcggttctaagggcatgaagagtctcggaagcgggggataggcggtttcacacggaaggtagcccgcctgcaggccccttgatggtagcgtgtgtccaccaagacatctttcgcatgtgtaaaaagatagcaagcatagggagattcgcaagggatggaaaagagccgcgaaattccattcttttgcactgtcctgagttagtcatgtagcattcggggcgcggtggtacgtcggtttcacgctggcgaggagctgactctgcatgcagctggttcagtccgtcggccgctgttacctggcccggatcgagtcttggtccctcgaacgaaattctcgtctgtacactttgccttcctcctgaagctgagactgtgcacgtgtgtgtttgttttttcggtactgtcttgctgatctgcgctgtccaggagtttctcccctgtggcttgcaaccgggctgtgtcaaga

SEQ ID NO: 1270 - DNA, 1926 bp, Toxoplasma gondii
  source 1..1926: mol_type = genomic DNA
ctgtttgcgcctttgttctccctcttcacatctgttttgcgttctccgttgagttctgcgtcggcggcttccgcttggtgccttcggcgactttgctgcatgcagtcgacgagcgagtccgactcatttgcgccgtggagaggcgcgatgtggtgaccacagcctctgcagacgagcgctgcggacgcgtcgagcctatcctcctcctccaggagcggcagcagatcgtcagcgacagtgacggaccggccgcagttcaggcatccgagagcaagcagccagtcgtacgagacgccctgcgagcaagcaacccccacgaggcttcgagcgtctgctggacggcgtctcggctgcgcgctttcatcctctctttcgctcgcctcgggggcacccgaaggtgagagggaggcgcggcggaagccagtgccttggtagataaacttagcaggtccagcgacggtttctgcgtcgtcgcctagacggtgcagcagagcaaagtactcgaccgagtcgtccagagactgcgcagactggtgcagcaaccgctgacacggagaagactccggaggcagcagagaggaaagcgcggagtccgcgccaagcggcacaaccagcgaggacgccgcctgcgcaagcagcagcgcgtccgacgaaagggagcgcgaagaagggcgaggaggaggcatggtgagagaacaagacgcagacggcgacagaggcgcaagtgaagaggcgagaagagagcacagcgaagaagagaagaagagagaaggaccgaactgctagaggaacgagggaagaggacgagcacccaagagaggaagtgaaagagcgcggagaaaattgtgggcgaggagagagaagagtcaagaggatccccgagaacagtttccccgttttcgctttgccagccgcagaggggggcggggggaaggatgagaagtttgcgcgccaggcaacgaaggaaaaatagtggaataaaacgaaaacggggaaacacacgaagaaggacgtgtgagtctctgcgctcgaaaatgtcagcgactcaacgcagatgcagcggcagacgctggaaaagaaatcgacgcctggaagaaggggatccgatgagaggagacaccggtcacggaagacgaaaaataagaagaacgagaaaacagtcacgatcggatggcgaagtttcaagactttgagagcgcttccgatttttttcgcgcaatgcatgcagagagagaacggggctgcttcgctcttctttgcggatcaaaggaacaagctgcggagtttctccttttctgtgtactttctttgtgaagcggatctcaattgagtcaaaagatgctgagagaaacaagggtgaattcactcctgtttctgtgcgttcctccagaatatctcgatgcatgcgacgagctctcgggagcgggagtcctgaaacagctgtctcgtctgtctctcagcaacgcagccgacgttatatacacagtgtgcctctctctcatgcacgagaaaggcgtcttttttttctttctttgtttgtttgctttcttcgttggtttctttctttgtctgtttgctttctttgctttctctctttgtcttctttcttcctgtcttctgctttcttgcttgcagctccctgtataccctcttgcctcacttctctcgagtgtgttttcgtctgcttttcgagtcttcccactgccccgggtgtctgtacacctcagcgcgttcggccttctccggaggctggaggtcgagacgctcgcgttccgagaaggagaggttttctctcgtcctccagtcagtcttcacaatgaggacgcagaagcgtttctcgttgagtcagtgctttcgcgtttctccccagtcgaacagaacgcctgaatctctcggggagcctctgccttctgcagaaatcggaga

SEQ ID NO: 1271 - DNA, 3409 bp, Toxoplasma gondii
  source 1..3409: mol_type = genomic DNA
gtcaccacttgtaaattaaccgtgcaggatcggtgggtgcgtagacaccggccgactgcgaagactcgtttgccagccatgcgaggacaggaacttcgcagtttgctgcaagtgagtaacagaaacgaagtgggtagtcacaaaaagttgaacggcgcctgccgtttttcataggcgacggcttgcggtgctggacaggtttgcagaaagactgtcaaaaagaagcggggaatcagatttgccagtccatagaggaaatccgcaaacgtggacggcaggtcgcgtgtccgttgcggtgtatatccaccacgagcttttgcatttttgcctcttggcaatgtggagggtcgaatgggtttcgtgtgaggacaaagtgcagagccgcgaaacgtgtccaacggtatcgccgctcgagtcccttgtactttacatacgatgcgagacgcgcaagcgaccggttcagtgcgtagatgatacaacacacagagaaggattcgttacgagatctgctttttttcggtatctgtgccgccgtagacatttcggggtggcagaatggaacgaagctgcgtgggtgcacggaatggtcggtaagaagtcctcgcctgtgcttgccacggggtgagtacgcggtggcagcaaggcgcttttgtgcggaacctttggccccttgctggaagattgaccgagaacggttcaacgaaataatatgaggcgggaaatgtcacgcaggcggggtaaaatgaaacgatgatgagtgcctttagacagaggcgttgcgcgtaagacacccagagaaaaatacgtaatgaagaaggcacgcagaatcgattttcgtgctgattgtccatcctcgccttcgaatccggggacggaatggcggatcgctggtgaaccgcgcaacgctttcggaagtgacaagatcccctggctgccgcaacttgtatcacagttggattaccgcatgtggtggtcagtagcactttctttcctgatttaagttgcgcgatggttagtctgctcgggcagtggtcgaagacatttatctgccctatttaggttttgttcttttggtgaatctcctaacgatgtggtttcatccaaacacacgcctgtcacatgcattcaattttttacacagctggaccatcgagtacggatgcattcaggacacaacgaagagacgacttcaccggagattcttttctcacgaggccaggcttcatacggcaaaaactctgccctttcttgggagtggtagccgtcttgccgctgttcgacgcatgcgcccaaatcatttgctctggtgccgtttggcagaaggaaaaccgatgaagagatctgcgtaaaaggagatcacgctggcatgtgagacttgcgtcaccgaatatcgtgccagatccgctctagcggatgacccttgcagacccatggggaattttggcacacatcaacacgacaggttttagggcttagttagagttcctatgaaacgacgttcaatcacttcagcggagaactgtttcaacaatccggcggccgtggtacgaaaacttcgccgcggtgatagtgtgtcacgtgcatcagcgtggaaaggtaggtaacatcgtcaaagtgcgaagacagagaaatacatttctcatttccttctttataccatcgctacaatgtatcgctgtctcagtggtttcgtaactgcagaggagttctgacaagcttcgtctttctttgcaactttgtcggggtggcaagtgcaaatgtaacctaaacaccccctggcccagtcttggatcgtttgccatgtgtcgcgccatgatcggaaccgcgttctacttgaaagaatacctcgtctgcagtcaaaacggtccactcaaagagaagcgcagcgtgtgtggcatctttttagaagtgctactcagaggtacgggagagccacgtataactgcaagacgttgtggcgttgtgaaagcgcaaatacatttagcgactagatttcgcagtaacggtccctttttgcttttccgaagcaacttatttccacatcagacatggacatattcggtgtcagttcagcaagagcgggggatcattttatcgccttttgctaaagtcgggtgcttccttggcttctttgtaaagatctcatgacgaagcagttgccccgtgtcttgccgttgccgagttaacgcacatagcttgcacgaatgcacttgttgcgctggctgaagtgcgatcgcttttttgacaggtagcgctggcttgaagtccgctgtcctgggcagcagcctcgaactatggcgatacaggatgcatcccgttactcaaacgtcaaaccgtggttgtatgcaaggtaagtggctgtcgtacatgcatctccgacacagtgattgaatcgtcgcgtccttctgactgaacttccaccgtgctgttgacatcatttttgtgaaacacactattatgtcctaaagggatatcgtgttcactgttatctgagaaaggaacgggtgagagtgacggtgtcaacggacgagacacacagaaagacagcgagacgcttccgagccccccccccgcccccacgctcacactgtgatctcaagttggcctttcacgctcaagctccaggggaggaaaaatgctcacccgagaaagacccgttttatcacaaaatcgacaaaatctgctacacataggccaccagttgggcttcctgtcgaacgaattgtggttggaacgcacgcgtgtgtcacacgtactccgacaagaaaccgtggtttagcggccgctttgccaactcatccaacaattgtgactcaccggcgaagaatcatttggctttcttgtgatcgtctccagtttcacttctcttcggcggtgtgaaagccgtttttcgcccctgtggcattcgtgctgtgccctgtgtgtcgtttcgccatcgcatgcaatcgcccgaagatcatttcgccagcacatctgcggagtttctcccggcggatgctttcttttctcccgccagtcgtgagacagacacacactcactgcgtcgtttgaaaactgcttgcatctttgcatccacttccacctctccaatgtgtcgtagtagaagctacacagcgagctcagttgacgaccaagagacagtctcgttgttccacgatccttcaggtgttaccacacctcatgcaacctgccagtgttcttgtccgcgtgaaccactcgtgccagtttcttcagttttcctcttttcccttgctgcctcagaattttccacgaaacacgccgtgcctttcgccctttccagttcgccgccgttctggtgagcctgcctgggcggtgtaaaccaaacagcgctgcttcgtttcttgtcgcaggccgcggaaggtcagccgcccccgtcccggtgtccaca

SEQ ID NO: 1272 - DNA, 1762 bp, Toxoplasma gondii
  source 1..1762: mol_type = genomic DNA
cagacacaaaaagattcaaagattgcaaccagcacagaatgtggaactccaccttacatatacatatacgcatatatatatatatatatatagagagagagagagagagaggtatacgagcgtagctgttgtgcctccgttcctacattgatgcttttggggtccaggatatcaaattgaggtccagttgccctgttgccgaggaagcgtgtctgtatggaaaggcaggagggggaggccgctgggtttctagtgaggatgctgcatcgtgagaaaggacctgcgcctgcgaacgagaaaggcgctcccgaagtgagagagacggcgctggggcaggcgagacggccagaaaggaatcgacgcgagacgagttgagcgcgggtggcggccggcggggaggccatcgccgcgagaccggaaaaagccatggcgccccgaaggttccagaaggtaaatgggggggggaaggcagaaaaggcgggaaagcgaacgaaggcgaagagaaaaagccgggtcgaaagtcagacaaaggcgatttcgcgcctctccgttcgcagctgcccaacgcaagcaccggaggcgcgcaggtctgagcagtacatacacccgggagacgccgcaagtgcgcgtggccgccaaatgtggaccgttgactccgtcagttcaacacttgtagatgcattccgagaggaagaacccagggtttttcccaggctgtctcttctggctaataggattcttcgccttcctacacgggcgtctttcgcggtggaacgcccagagttcgggcgaggatgtcggcgaacccccttcttgcaaacgtctgtctcacagactgcctccaggaatcggttttcccgggtaattgcactgtttcgctccgcgaaggacgcggatctgtcgagagatgccgaagtcactccagaaggccggacatactttccgggccgacggtgaactcccgcggttccgttgcccctcgcgtgtgacagccgcttctcgtgggtcgtcgtcagtttggccagaatgccgcttttcgagagaagatgccagtgagaacccgtttttcggtaaccatgactccagcctttctttcctaggtccgccatagtgagaatttctctcctgcacggattccggagcgtttcctccagcagcgtttttcgcaaagccgccaagttccccgtgaaaagactctgcccgcctgccccttgcagaaaatgccgccagacttcgccggcggcgcctgaaaagaagccgcgcacgttgtctctgagggactccgtttgagctcgttctttttgggcgaaagtctggaactttgtttgcggcgagaagccacgcgctcggcgtctcgaggcagcgaggcaccattttctgtcaaggtgtgtatgtacggcgccccgtctctttttttcccgctaggtttcagctactcttttccatagtcacggcggcgcagcttgcccggcatttaaaaaccaggaaacgcgtccctctgtcagtcttccgtcacggaatctctcggcttctcttctcgtcgactctcgacactctgtgtttggctgcctcctttcgcgtggcatcgcaaactctgcgctttctccgccgccaagttccccctccctttttccaacacccctggctagtccccacttcctgatctcgactcccctacgcgttccgccacgttctgctgttacctgcctccttcgcggtttccccggctggctcagacttgttcgtcctctgctcggcacga

SEQ ID NO: 1273 - DNA, 1764 bp, Toxoplasma gondii
  source 1..1764: mol_type = genomic DNA
gcgattctgaacgtgggcctctgcatttcaaaccaaaatgttttcacatgaacagaaacatatactcacacacatgtgtgcttgtgtgtgcatatggtcgacgctcctttgtcgtgtggtcctgatttcccgatcacttttgcatctttagcataactcgtccagacagggaaaattgttaatctcatgttgctgttttacggaaagaacaatgtcgctcttcgagtgtgcatgtccgatccaaagactaatgcgccctttgtgatccacgaagagacacgtgaacgattcgttggtccagcggcaactgctggaatacttgtacagcggtttttaacaaagataactgagagctcccaattcgaatagcaacgatgatgggaactagcaatagcggtgcttgtgtgtccttcccgttccaccagcaacggaacttccattctctccccctgacaaaatcacagtagctaccgtctcagtgacagaaagctctcttgcaggcagtgcgtgggagacacgatcggaagtcctacagtttcgaattttccacttcctcgattaccgccagtgaaacgagcttttgcgtatggcgcttgcccgtgagtggcaagcagcagactgacatccgactggcgacactccagcgcttgatgaattcccagcagcttattgctcgttccgacccgtggtcacgttctttgtttgcgaccttgccgctcaggggtcgttcctgttatacttacatgacgcatactttcgtgacggaaacccacgcgaaaggttcttgcgttgatagttatcgcttcagccttcagctgtagaaatagaaattacggaatactttgcaaaacagttccaatcctcatcctgtagaccgacacccgagtcctccctaggtggtccgctaccgggacacagtccggaaagcacagcagcgtcaggggtatgctcagacacttactgtaggttaaatcggcacattagtgtggactcgacaggaaaggagtccttacgcgttcttccggaacgaactgcccgaactgtcgtaacattcaacgcaacaccgctccagcggtgacgtcgttcagcagtttccctctaggggaatggacgttgaccggtcatctagggtagacgcagttccttaaacgcaccactttgatatgaacgtgattctttcccttcgaattagttgctcgaggatatcaggtgggcaaggccaagtggagtgactttttccagagtcacgccatccgtggaggacatgtgtgcactattcaaatgaggctgaggacagatctccagcgggcatcgcggtcggtgcccattggctagctttcagtcagctcaggggaacgggtcgcgttctggtttgctgctatcgctaggagggacgtctggtgaaatccacatgtcacaacccgcggtaacagtggccaaggagaatgccgaatgccaaacgagatctccgtgtttcacgcaaacacccttacaatctcccgtctcgtgggttgtacaagccttgctcgagctaccggttctattccatcgaaaccttgtataatttctgtcagggttccaaatgcttaccttattgctggaacctttgcagctttttttcttcctgtgtgcaagcttgtaaggcttgcagtttaaccctcgtggcatttgctcctctttcgcgtgcgttcgctgtttgctgtcacgtaacggcgcgtcgcacgactgcgttctcacgctcgccgtctggttgagtttctccca

SEQ ID NO: 1274 - DNA, 2072 bp, Toxoplasma gondii
  source 1..2072: mol_type = genomic DNA
acaaacacgagacagagtgaaaaagcgatacgctttctgaagggtggaaaaacgagaactgacaaggttgggcgccaggtctcacccgtagctgcaggggactgcgaatgctggagatttccccgcaagacacggcgtatttatttagtgtgtaggaacgccttctactgaccgacaaagcagcggggaatcagagcagcttgcgtttttcctctggggtacacgacaactaggtgtgtcactcccgacatgcgtttttcactttgtttctgcaaggccggtttccgattgcaagttccactctcagccttgaaaagaacacaaagctttcgttggatttccaaactagactggagacttgctcccgtgtgcagtcttcttctgccaagaaggcgctaaaaaggcctagagaggtccggccatcttgcgagttgtcactgtgtaaacggcaactccgaggcctctgtagcgacaggctcgccagacaggaggcacctcagccagaatggacactggaggtcgtagatgtcaagcagctccgggggctttctggaaaaaaaaccaacgaaactgagatacgcactcgagagcgttggaagctctcctcggtagccgaccaagcgcggcatttccacagcctcgccgtggaagttcgacaaaagcgcagagggaagctgaaacgcaggacaagattactaccgcgcctctttttcgtggaagatcctggggaaagccgacgaatgactctgctcgtgtgttctcactcctcgctcgatggggctggaaacagtacatcgagcagtgagagaaaaagagatcacgaaaaacttgcttccaccaaacgctccggccagtggtgcactctgtattctgaaatggctgtagaattcgaaatggaagttcgctgagctcatgcggaccatcggcgacttgctttctctcaacgctggatgtactcatatatatcctgcaacttgcagacagccgtaagccacacgaggcgccttatggatctttttcgtatccactcggcaaagacgcggaaaggagtaacccaaagaaaaactggaaaacgcggctttgctcctcattctccgcttacttccccaatgtctcgggatccgcagaaaaacgcttctgaactcgagaggttcgtactcaccccaggtaagagtgctcaaattccttttaagaaagcaagaacagggaccgtccgcatcccagaggtgtcaaaagagtccgttttcactgtgcgaaaaaaactgttctggaccgccagccccagcctgtcttcttggccgccagcaggggcctctcgagtttggtcaagacttctcgattcctgttttctgatttctctgcaaagtctgtttctcaggccttgcccctctttcgaagcgaagcatggagttcgttgagcgcgaaacgcagcgacgaaaatagatcttgctttgtgtctctactcctaacgccgacgctgcctggcggcgttttttttttgccgggtctctctggagtctctcgggggtgtctctctgttgttgaggctatgcatgcagacgacgcggcgaaaacaggttggaaacaagagggcagatggaatgaatgtgcgcgagagaggagttcaaagccgagaaactcccatgttttccttcgccgttttccccgttttctgcagcttttttttccaacctttctgggcgccgtccacagctgcgctcgctcttccggctgtcgatgcatgcgatgtgtgtcgggagccaatcgatttttctttgaggcgaggagaaaggacagagatgaaagaggaacgccagaatctctgtaaaacttgttttttcacctgtggagaccgggggtccccggtgttcggacgcctcgacaagcacctggaaagaaacaaggctgcagcgtttttgagtcgcgagaaactagcgaggagagaagaagaaacctgcgtcctcgggtatctggctttgtgaaaactgtcgcgaatggaacttctccttttctcggcctctcactggactcgacgccttctcttctccgctgctctttccccctgttcgtga

SEQ ID NO: 1275 - DNA, 2370 bp, Toxoplasma gondii
  source 1..2370: mol_type = genomic DNA
aagagcacacaataaaaggaggaacggcggactgcttcccttcaaaggcgaggcgctgcccgtccaccatcttggagacaccgcagcctgcgcgtttcgcgcagaggagaaacgccaaggtgttcgacgtggaagaactccagagaggagaggagcagagagagctgcgcgagggagagaactcgagagtccaaactcccagggcgcgcgtacgggcgcgaaggagatatagacagaaagcacgtcctcaagagaggagaagcgcgagcggaggcaacaacgtgagcacaagctctcagaggcgatcaagacaaacgactcgaggaccagtgaacgaaggcagtttctttcgatgacaacagagacaggtcaccgcaagcagacgcgccttcgaggcttgtcagcagttgtagacaaaagaaataacaacgacggactgggtgttcacgggactctgtggcattcgcgcgctgggccatctctctccgtccattcgcttggctccctaacaagccataggcctcttgtctacggagcagatgagctcgatgcatgcagttcattgtccagagaagacaggaagcagacgcagaggaggaaacaaaggagttccgcactcgctgtcgcacttcgctgctcctcaagaagttgctcttactcttctcgagctcaagattactcgttttcctccttcctctgaattcagaaagcagtcctcaggttagacacgacccactttacgcccagcaattttgggaaaaccgggagaagcagaacgatgaggacagcagacacgagagcgcgaggacaagacacagctgtcgcgtctgcggcctatctctggctgttcctaccttcttccgagaaagaaccgagaaacggcagccgaggactcccgaggaagcccagaaacagagggcgacggagaagaagctgcatcttccgtgcgagacgcggcttggcccttggttcgtttgtcgaagtgagaagagaaaagctggcaggaaacaggtgaggcaccttctctgtgtccggccactttacgcgaggaatgccgacagtgaaattctccgctgggatgatgaaacagcgctgcctttgcgcaagccagacaaaagtccccgagtgagaacggggcagaagcagcctctttcgtgtcctgtcgaaggtgtccgtttgtgccagaaaaaagtaagtgagggactaaaaactcggagagatcatcgtcgctttctggacatcccatctcttccgcacttccgttccgtagatgcccaccgtgcgtgaaagtcgcacacgaagaagcagtctctcgtcccgtctcccgtcctgaaatccgcagagctacatgtctgccccatcccgggatcctctttcactttgtgcactgcttactgtcttgtacatgttcagagttttgtctttgtcagcgaacgctgtccgtttcgcctctatgtcgtcgtccgtcgttcactgcttcggagggtgccaagtctagctgctggtgtgccacaaaaaagcaatttgttgactgttttgtagctttgacgaactgaaacatcgaaaaaacatttcaagcattgcacttcttcgaatgtgattgccgcgacctgtcaaattcccgttttcacgccggtttcgtgcgttgagcccgcaagaggcgagtcttggtttcccgcatattttcgctacactgtagagagggttctgccagcgtcagaatggcggtgaacgatgaggattttggaagagatgcgaggagcccagtcatgccttttcttttccctcgacttccttatgtttcgccttgtctttcagcagaatctccccgtgcttccgcctcatctagattcctgtggcggagcggaggaagtgtcaccagtttgcacagcgtggagcccttgaatccaagtgtatgtccacctggaattcgttcccctccaaacgccgaagggggtctttacgcgttttctaccgtttcaactctattttctaggccttctttctctcttttccgtccacctgtcttgcccctgtttcccccgtcctctggtctcgcgctctgctcgtctgaaccggcaaacatccttccgaaagagagtgtttctgcctgtccgcgagcgaatcctggcacctgcccagttgcgagtcccgccgccacctcgggtcaggggtgtcctttcggtcacggaaaatcaggacaccctgtgtcagatctcctcccttctagcccctcctttctttccttcgaagcttcctctgataccgccaatgtgcctccttcggcgtccagcgccggatgttcgatcaaacatggatctgctgcttccttttccgacagttccgcggagctgccggacgaatgtccca

SEQ ID NO: 1276 - DNA, 3550 bp, Toxoplasma gondii
  source 1..3550: mol_type = genomic DNA
actcgacgctggaagacgacatgcgaggaacgactcgcaagagtttcgtcagcgcgctggagcaccggctctgccgcctcctcgacagaggccagcggaactgtctccagtgtccttgtttgcagcagagacgccgagaaagaagaaggcggagacggctgttctccgacgcctcctgcggtccgaagcgcttccccgttctccctctgccggccgacacgaaggctagagccatggggagttgccgccacacacaggaactgtgcagcctctcgagaggccgacgcagacgacgtggtgagaccgaaggtgcctctgagaggcggtgacatgtctccccccttcaagctcgcagagccagacggaacagaggccgctccccctgcgtcccgaacgggcgtcttcgcgacggcgcctctctcgtctgcatgaagagcggcgggagaagaaccgcactccgtcgccatcgttgccgactcactactcactgccaggctcacaggcgaaggcgagcccctgtggagataagacactggcgacagttttctcgctccgtcagagacgcccgacagacgcggcgcagtcaggactccctgcgacataggagtagacgtagacgacgaagaggaagaacaggaagaagaagaagagggagaagaggagaacaaagctggagaaccgtatacgaaggtgcttggaacgatgccaacagcatatgttggcgggtcgctcggggtgttgacaatcgccatggttgattctcgaaagaaacgcagattgacggacgacggacgagataagcgagaggagtgtgaggcttctatcccacgacacagagaggttgggacgtagaaatcgaattgcggacgagttgaggagagagaggcaaagcggggagacgaagcgcggagctgcgtgggctcgcgaagcaccagaatggagcaaatcagaaaattaagagatgcagagaggatagagaacggagaaggcgacagaggcgattgtcgacacagagatacacgcgagaggaacgtgagtgggttcgacagaaccgtctaaccggtgaggccgcaagtttccaccactgacactgtctcctggatttcttccgaaagacggactggagcaaatccaacagagggggcagtcatcatcgagtgaggagacggcgaggcaagaacgcccgcgacgtgctcgaagcgctcgaaatcgcctcgtgaagtggaggagcgccgaagaaatccagcgttccctctgggaacagccgcctcgatacgaaaccctcagtggttgctttgtctgtgtggttgctaccgaggtgcgccgctgaacggggaaaaagagaagcctgacaagcttggaaggccgcgctctacaagacgagcgctgtgcacttggtcttcggtgcctccttacgccgattagagctggctgtggatgaattgcgagagaagagctgcgaacccaaccggaatcggaggcacttctcctcggtcgcaaacagccacaggtctggcatgaacaagaaccttgtcgcggactgcttatcaggcgagctcgttcctgcgattcggcgtgcaagtcatcgccttccccggttatcccaagtgaagctcggtaaagaaatacaggtgttttcgccgaggaaaagcccaaaaaactgcgagcaaaaagccgggtcactttgacagggacgcgcgccgagagcactggctaagctgcgaaaagcggacagggcacccggcatttgaggccgggagaacttcctctcgcgcgcaactgattaaaacaaacgaaattggcttcgcatttgcctcaagttcgttttctccatcgctctttttatacgagaagatgccagatcgacactcgcatggcaagggccgcgcaccggcccttgctgacggctgtttgcaaggtgtgtgcccgcggaaacgggagtgtgccggcttttgcgctttcgttggctctccggttctgtgttccgtgactgctccttctaatttatctcacacacaggaaacgaaagccttccagaaatttccttctcaccagttgagggagttgggcgaacgagcctcacaggggagagggctctgcgtttctgcggcggcacccttgacctctttgaggcaacgggaccgcgagggagaactcggcttatattcgggggtcgcccgttcaaaagagcaggataccacaaatcgacgggaaaacagacaaaaacaccacacaaccacaagccggaattcatgacgatagatcgtagccctgaagtgtctgattatagttccgtttgggagaaaaagcagaaatacccagcgtcgacgccgccatcgcgtctctcgacagaaggacactgagagaagacgcgccacaacctcagaaaaggcggaagttctggggctcaaggagagtcctggctagaaggtcacgcggcacatgaactgcgaactcgcgaatcttgagaggtagggcaggaaaagcccagacgagaaaaagagccgacgggaaagccaaggcaaaagcaatcatgtcttcgtgcatatttctctactgctctcgaagctcagtgaaacgctgtgtgccctcccgtcgcttgctgctcctccttcgagaaagaacccttcgctcgttagagggcacagagcaaacgacagaaacgcgcgaaaatgaacaaggcagaagaaaaggtgcccctttgtttaattcgctaccgttcaagaggactcctcgagaaccgcgacagagagcatcgaggaagtcgagcaaagtctccagacatcgacaatgcgtgggtgtgtggctgggaagtggagagagcgagacccagactcgacctcgaggaccgcgtctgctgtctgcccctcttgctttttctttcttttctttttttctcatggagttctccagacgacccgcagaaggcgccgaaaacagtctgcggcggtgtaacggccgtcagcctgaattgtttttacgcttctacctttggtcgcgtggcgtgcacacgaggaagcggtcgcttcaattgcggatctgtctgactagcgggatttttagagaaaatgccactacctgaatctcacgaagaaacgaaaaacaaaggcgtttcccgctgcagcgagggctgttccggtgtgcgtctgagcgagcgtggagagttgagacgagagagacgtcttgggtctcttttttttcagtttcattttagacataaaaaagcctacaatgttgcccccggcttccattaaatgcttctccccgacgccacgctccgcgtttccccgctgtcttctcacccggcaggttctccccgagacagcttacgccgatgttgtctgaaactcgattctcttgtgttcggtcccgatccctcctttctggagattgttttttctgcctttcggcgacctcgatatcgcccgcttctccctctgctctagtagctgtccagcacagacctgccgtcgagacgccattctcgctctttcgtcgttaagtctcttccgcagctctgtctcactcgtctgcttggcgccagccacta

SEQ ID NO: 1277 - DNA, 1440 bp, Toxoplasma gondii
  source 1..1440: mol_type = genomic DNA
gaggagacgagtccgaatcagagcggccaagttgaacaggaaggagagaagagaagacgaacgagaaggtcatcccaacgaaataaacgaaggaggtgatttggaaatgagcaggacggggcagttctccgacatggcaaaaaacaaggaggaagatagcgaaaggagcagagcatccaatcgaaaaatcgatgagccggggacaagagaaacagcgagttcttgtgcgagagcccagacagagagagggaatctcagctggtggacgtcgtcggtctgctcgaagagaagcagaactcagagaagggcaaacaccgcagagagaatcttcatgcgctcacctttcagcttcttcctctcatggtaagaataaaaggcggcgctggtggcgttcttgctgtgtcgggccggcatggttgaaacgggaagtcgagggaagttggaagaactaaaaaaaacgtcaagaaatcagacggattctcttgaaaagcaaaagcggggtcgagcgcctgcgtgaaacatgcaaagtgcctgagttcgagaagaagaaaagagtctctgcggagggaagaagaaaagaagcaaagaaaaaaagagaaccgaagcgaagcaggaaaaggacgaaatacgaagatgaggggcggacaccggacaaagcctcgaggtgatgagagcggcgaaagaaaactggaaaaagggaggagcgagctgcgagagaagaaagcgaagaagagaaaacatagaaaaaacggaagaggaattacgaaaaagaaacagaaggcgacggcacttgcaaggaggaaggacgaggatgaaacacccactgaggagacaaaagggagagaggcgcgtattttctttttcgcggccttctgttgcggctttgctgcgcatgaacaaaaaaagacagagctgcagaaggtggaggaccgagggagccagagaaaccgacttgcctgtcaggcttttaaaaatcggccaaagaacttgactgtaagttcagtctcgcttccatcgctgcgagcatgcgacgagtcggcaaagactgtgcatgcaaggcagcaagcgacgacgacgcacaaggtcaccccagcagcagctgagcctcgatggaggaacttcttgtgtttgaaaagtctccggaaagtcttcttttctttcagccaaacaggttcttctccactccagaaaggaccgaggtgaagcgggacatacagcgacggcgactggctcgggtgctctctgtctgctgcgttcgcttgagtcttccacggaagtcaactggtctttcttcgtctcactctcgtccgcatttgtcgtctccttcggtctcgattgcttcaccctccttcgtccgccgtcttctgcctcccgcgttctccctccgtcaccttcatccctcctctctcctctcccgcgttctccatccttctctcctca

SEQ ID NO: 1278 - DNA, 3766 bp, Toxoplasma gondii
  source 1..3766: mol_type = genomic DNA
gcaaagaaaagccttcatcggtcgcacgtggaggtcctttagtgttcgagcagggcaggccttcgtttcagagtgaggaacacagcttttgtggcagtcagggggcaagccttagagatgacaagtgttttcgagtatgtccttctaccacctacgaatgtaggcaacggaatgtgtagtttagagaggggcaagatcttaccgtagcggccctctgcatccgagtgaaaagacaatagtttcagtgaaagcaggtttgttctagcgtgtcgtaccaccagaaaaaactgcaggtagtggacataggatgtgttaaactgtccccaaagcttatcctggtggttctctacattcgaggggtaacgctatagttttactgacggaacggctatcccaatgtgtcatgctaccagcaaatgtaggtaatggagtccgggtgtgttggagaaaacaccaaaacctaccctagcggctctctgaatccggaagaaaacacgataattccaattctgcaaaagcttttctcatgcgtccttgcatcacccgcaactggaggtaattgagtcagttggaggtgatgaagaaacgccaaagcctatcctggcgggtcactaaagcagatcgagaacacgataattttatagtgacggaaggcccttcctggtctgtacttggatcacctgcaaatgcagatcatgggatataagcgtatcgctacgcaaacggcaaaagctatcctagaggttttctgtgtccacaagaaaacacaatagtttcagtgatagaagacattcctattgtacacttggaccacatgcaaacgtaggggacggagtcactgcgtgctagagagacgccaaggcccatcgtaaaggttctctgcattcaaatgagaacacgatagtttcactggggggaagtctcttctaactatccctgtaccactcatcaatgcaggtaatgaagtccaaatgtggcgggagaaacactcaagtctattcaagcagttctctgtaaccgaatgaaaacaagatagtttcagggaatggaagtcttttgtaatatgtcactgctacaccctacgtagcaattttcccactggttgaaacacttgcagtgaactttgacaaactttatctgttgggaataccttctgaacagccaggaaggaacaaaaataagacattggtgaatggaggagtgtatattcgaggttacccccatactcgtttatttatctatacatagtgttattaaagctccttgacgtcagagctatccaagagtctcgttggcaacacgaccttcaaacacccgctaaagtgttaccgaatcctccgtacagagacagaatctactgtcaatgtgataccacacagttgtcgattcaacgttagaagtaccgtatacggcactaccacacgtgagtgagtatgacagctaacggtgtaatatcaagcagaactgtagcttatcgagactaaattcgggctcgcgagggtcatccagtaactagccaccttctgtagctttagttgttaccttatttattttccgtgttcgtttgaaccttttctcccggcaacaaaaaacgtgttgtcacaaagtagaactggcaatactatcagtacctaatatatacgagactgttggctgtttgaccatgtgcaatgcatccagcacctggcgttccttcgtcatgcgaaaagcgtgttgcacaaaactttgaaacggtggttcgggtatcctgtatttgcttccactcgcattcccagttcattttgccatgcatccctggtagtgttaggcacctaccagtggaatcaagcaaatggtggcaacccggaaataatcacccagagtgtaccccgactgcacaagcaataatatctccagaagcaaagcacgtttcatctcagagtgtgccggatctgctgttcccgctctacaggcgttttacaggactctcgcctccgcgacacagagccagaaaccgatacaatttattcaagtatgctgcactcatgtgttgcccccatgtggcgcttatattgtcttaattccaaaggcagacggctgcagatcgttccatctctcaaacggcgtctgttgccttctagtgctcgagctagcaagaatcagcgtttgcccctgtggttaatttcatgtgtcaaaacgttgtagaggcgtttcgcccgtctgcagctctacggtggggacgaaggggggttaacacacagtagttggtgctttctgtccgacttataattcggttacctggctaccagcctcactgtcacagagcatgaacaacttcgggtttttctcttgtactcatagaatcggcactaacgaaaagaggctgcccgtactctcagtgcaacaatagccgtccgggaaatctgcgcattcggaatagcggtggccacgaaggactgctaccgtacactccatgctgcgtgagaggtctggtgagtttctctcgccaagacacggagcccttccgtgcccgtgcacactcgtgtgtccgacagatagccaaatcagaaacatgtttgtcgtaggcgaacgagcatggcgacagagagcatactcatcctgactatctagactgtatagcttcttgggagggtgtgctcggcgggtgcatgggtaatctctgctcattggtcgcgtccacggtaggcacctggtatgacctcagcaccgcgggcaaaagaagccatctgacctttctaaagacaaaggtatctacgagctcgcacttggcgaatttcagtgaactgtagcccagaaaattttataaatataacctttgaggtgtgagcgtacagggaaaagacagccgtcatccagagaacgacgactcgtttaggagccgctaaaagacttgtttttggaagcgctgaagtactcccagaggactggaaggcactcgcacagcgacttgcgcacacaacaaggactgccctttagaacaaagggcattgagcagaagaatctgttgctgttcaggagcatttcaaggcttcaaagacagagagacgaaatctgtctttaggtaaatccattcgcttcccaaatttgcgtctctacctcaataattgctctactcgggggagatggcgcctaccaacgagagtgtgtaagtcagctagcacgccgactcttcctttacaagtcctcgcgaagatgcttttctttaacaacctcttattttcctttccatccgggagtgaccgtctctgcagctctttaacagaagaaggggttacgtcaattgtcaaacaactttccgcccctgtacttctttcaagctctacccacctcgcgacccccctgtctgactcatcttaagaggcaaatacgaggacgtccgccatctcagtctgaacagtttctaattcccgggaatccgcttttcaccgtcgttttcgcgttcgcttcgccatctcccttccaagctggtacgggccattctgtgcaaccccggcgtcgacacctctccatcgaacgggaccatgaggtcaagcgtctttcaacatcgccgagcgctgcaatgatgcctcgcctgaggcggaatggaattcgaggaacagaagacgcgcacacataccagaccaacagcagacatggactactggtgtagcgtaaatcaaacaagatccttcgagttagacaagagacctgtctgatgctccgcatggagagacgcactctaccgtcgctgaagcaagaactggcggcagcgggggcggtgtcacaa

SEQ ID NO: 1279 - DNA, 3132 bp, Toxoplasma gondii
  source 1..3132: mol_type = genomic DNA
taattggcctcctcgtatcacgctttcaaatgtgcacctgttcgtttctctcaacattttgaggacctctcggaggggacagggtgcccggaatttaggtaacaggtgacattgcagcaagttagttacgctttcacgaaaagctcaagtacgcatcttgctacgtttttgagggatttgtcagatgcgcgtggaactgcccctgtgtcaaatcaccataatagcgtccgaaaaatgacgttcacaaggcactgtgatagaaacgcttgtcataacggttccagggggagggacagtcgacagcaccaccatgcccagaacgaccagcgggtgcacacgcgcctttttgtctccgatgtatgtggagtattttgaaaagggtagggatagggttgggagatagcgttttcgtgcaagtatcgaagtgcgtacctcccctgtggcaatgggattcttgaactgtgcgtgcaaacaatgtgccgaccaacaacgacgaggaataataatttgtgcagttgctttggagacacactgttgcgggcatcaggcgttgagtgtagttgcggaacgtcgtttctaaccgatcgtcgaacgaaagagagctacccctctgcacacaccgtactttcatcatgtcactcctgtcgcctagtgtttgtagccagatagtaatgattttcagattgtcatacgacacggatgttcggtgatttttgtccgaggactagactggcgtagtctatttcttctatatcagcgtcgcattcttcacctgtactgtctagtgcggcagcaaagaaagcagttcttcaccaggctagtcacagcgatctgcgcagatgttcacccattgatgtcttcataagctcgtgtgatagatgacaccactcgcacgtcgtctccgcctgtggatgtcccaaaggcagagtagaatttctttatgtcaccggagtgcatctcgctgcgactggggcgatccgtgaatattggcggtaccacggatggttcaggatactcgatgctgcgttggatttcgttgatgcatatactcaattggctgtctggtctgcatgcttttgctgatccaggatcagtgagcaacgtggcatgttttgatcgcctgaattcgcggcaccgcctgatgggtagtgtgtcctttctcccgcaagacgagggtaccgacgcgacacgtgagctttcggtgaaattgctttttacactgttccccagaagggctctggctgtcagtttcatcaaagcggctgaatctagccagtgtctcataaggcaggggtttcatcgtccgtgtgtccgttgtttacgagcgttttgatagttagcaagttgaagacgtttagatctccttgatccttatacagtagccagttcacagcgcagaaaaaaaggggtatctgtagctctctagttccatgcttaccagtaaactgtatagaacttcgtgtaaatgcgaagttatactatgtaagatcttctcggaaccatttacattcttttacctacatttcgtcaaagcactgtggataataacccacgtgacctctgcacaagaaacatcataaatgcagagctgcacgagaagaaatacggctaactcttacaacacatccattgaaattttaggcggaaacagaaacaggataagagaatagataagatgcgtcagccgggactcgaacccgggtcgcaaccttgggagggttgcatcctacccctggactactgacgcgtcgaagggtcatggggctagacaaggtgactgtgggagtgcaactgcctacaaaatcgtattttttgactgtcagcatgagctggtttgctgcactgcattacccgatcttcaattgactcatacatacgcattctattcgtgcgttttcatgcccactattttaccagcttccacgaggagtaggtgtgcagttcctgccgatgttctgttggaatgtagcgctgcggtgggtaccgctggcggttgctatttccatgtgtcgtataggtagaagctgatgcttcatttcttttcacaggttgtcagccacgttgacagcatcgagaatccttgccacagaaggactaccttctctccggattctgctgtccttttatggactttctggaaccggagctccccggagatatgtaatgttgccaagttgtcctccggaaggaaatgcagaacaaaatccaggttatttcgtctgctcttttcctgtgttcgttgtttatcactcatagattctttgatatcacgtcatagatgcatgcacatggcggttggagccgtcggcgtagtgtacagcggggaagcacacgccgtataccgcttttctgatccgatgtcatgcatgtcccgacagctctgttaatgcttgagaggagtggaccacgaatatttcctttcttgttactgaagaaacgacgctataactgctttctcgtgtctcgtcaggagccgaacactgccgccctccacacacactacaacacacagctttttcgtccgttctgggggttgaatagtgattttcaggcgggcggccgtgtgcgacccggattttcttcccgcgcttttcgcgctttccttagtgtgtcgttttccagtattgtcaaggtgtagacgccccctgtgtagccgtccgtcatgtgcgtgccgcagtcaaacacgtgaccctttgtcgccagtttcccggtgacaagacacgaaaattctccaggtcccggggacagggaacgctggtaagcatcttccagctacaagtgactcttgtctctggaaaaaacgcggctatccttttcccttcaactatttgccgccattttgccaactagagaaatgccgcacacagtggacagcagctgccactgcgctctccactgatgcaagcaccgggtccctaggggactaggaaacactgtcacggggagaaagccatgtagaactgctgtcggtgcctgtttgtggggagaaaacctctgtttcttcgacctcttcgacaacagcagtattggttctgggtcgtcagtatgtgtcaccgagtgaactgaacggagtcggtcgattcctttgtgcgccacttccgcgtctctcttctctttctcattgcttgacaa

SEQ ID NO: 1280 - DNA, 3750 bp, Toxoplasma gondii
  source 1..3750: mol_type = genomic DNA
cagtcttcaggccgatttgccctttgcttgaaaggaaaaacccagtcgcgcctcaaagcggacctcttctcttctgtgaagcagagggggcgctgaagctgctccgccgcctcgaaatcacagccccttgagcagacggaaaggtcgtgtacttgacttcacgtccgtcatggaaggcacaggagatcttgaatcccacagttgaggctttcgagatctacccctggagttcaactcagagcgcacatagtccccataagaaaatgtttctctcttccctctgtccgcctctgctttcgacttggaccggggaagccacagacacttctgatctatcccagaagcccccgatggggttacgctgttcgcaaacacgagaaatcgttgaccaattcaccaagactttcgtggtccacccccccccccccccggagcccccactggcctgtggccgtccacgcgaccttcaaccgtatttgttcatcaactcggcacggtactgtggatcgaagaacatgcgggagctgacttgcgcgacatagagagcaagatgtcgtggcgtctgccggagacgcaggtccgccgctttccccgcagcgacagcaagagcgccgcttgctgctcgggcgacgaacgcctcagcctcttccaacagcgaggcccgttttgactcggaaaacgccggctttgtcgtgaagcatccacgcgtccagacgcaccagaatggacacgcgtctccgtcaccctgatcgccgcagctgaaactgctctcagacagaggaggtttggggtgagcctcctgggttttgctctcctccctcggcgccacaagtggacgccggacatcgctgtcgagaaaccccaactctggattctgttgaaaatctggacgtcgctgcggagctccgctcttcgctgcctgctgaaacgccagcgaaggagccacgccagccgcggactcgtcgggaccggaggtgtccgaacaccccagaccacgggtggatgcttcgcccgcgggttgagaagagcagacgccgcctggcccgccagtctccggaaaggttctcccccgcgaattctccagatcgcgagatggacccactgcatcgactttggcttgcacgtctgccaactgagaaggatccagcgagtctgagggactcgctgcgccggcgacactctgcttcactccccgatctggcgagcatgctgatgttgtgaaatcaggtttttctccgtctctggggtttagacctgcactagccgaggaggcactcgacgctgctgcgaatgccaagtcctcctcataaagctgacaggcaaggctagcgtctccccagtctctctgctctgacaaacaccacgttccaccgacctgtggctgttcagactgcgtttttgaccttctgtcgcgtctctcgagccttccctccggcccaactgcatgcgcctcgtcttggctgaaaaaaagagaggactcgccttcgcgtggaagcaagtgacgcaagagaaaactcgaaaccgacggatcagaggtgttggcttctctgcgagacgacaacgaactccactctggaagagaagcgcctgaagatggaaatcctctccccaactctcctgaggaaacagccccccgaaggtgcagggcatcatctctcgtctccgcgaggaactccgaatataggccgaaagagaccaacatttttatcgtggatggccttcgacgacgaggcagagaccggagagatttgagcgaatcagaaaaacacagaaaaaggaaaacttcaaagtgaagacacgccacggcatacccgtgcttacatctccctcgtgacggacatgcatggacatgcttgtacatttccattacaccagtccacacttcgaccgagagagctttcagattcgccgttggacccgactccgggagtttcagtcttttcggagaaggacggcgggcggcaggctttataggcaattgagagagagaaagaaaggaaaagaaatcgcgcaagagcagtgaacacggagatacctcagagcacaaaacacagtccttgaagaactggcgtctcccgtgggtggtgtggtgcaggaattagcaaactgagacaggcaatgtggctacaagtaaagaaaggaagccgtagggaaaacggtcggaaaagactttctgaaagaagccccagaatctctcagcttcgatcgaatttcagaaaaaacgccctctctgcttgcgcgccatggcctttcaccaccgtcaaacgtttcggaccccctcaaagagccctgtgactgatccgttcgttttcttctctgtggaatgctgggggaaaagatctttcggcgacaagagaaccagtggaaagtcatgcacatctggacaaaagaaggagggccatcaactcaagaaggacaggagacaacacacacacatactgccacataaaccactgctcaaacaagatatatatatatatatatatacatacatacataaatgtaaatggatacttgtataggcaataaagctgttatccttgaggagagtcttggcagaggagacgaggagccgtgactctttgtgtgatttgaaaggtgtgaaagccgtttttcacgtgagtgaaaactgtctgaaaacaaaggcgagacgtcgatgtccacgtgcggagttgggtggactcctgggttgtgttgtgtgatctttgtgagaccaggtgagcatttcggcggtagaaaagagaagaaaagagacgaagaagcgttttgcgtcccttgctgcctccacatagagttagaaaaacacagtttcttccttctgttcacgcccgcttgcgcccaaatcttcgtggcgttctctgtctcgcgtcgcacccgccagtcagaaactctcggagaaaaactccattccacacgaaaaacgtgaaagaaacatcacaagtctgagtcttctcaagggactggaaaggagggaagcgcggcggagttgcagaggcgaacaatccagagatgccaccgaaggacgcgagacagcaaataggcttttcgccccgcgcagacagcgacatgcagaagcgagcgcgtgtagatacactcgaaaaaaactgcatgcgtttctgtcttgcgttcttccggcgtcgcgacctcatgtgtttgtgtgtgtgtgtgtgtctttctttctctgtgtctgcacttttccatcggatttttgcggcctctcagtctgactcgcctagtcgcgtgctgtgcatccgacctctgcacggagggggagaggacttcttttgcggtctgaaggcgctcttctccggatgggaagtttcgtttttgacttacctctgtctccgtcgagaacagcgcttcgcttctgccacaattttctcgctggaaactgccttctgctctgtcaaaagaggcctacacaccccccacggttgcagagatatcaaacgcggctgtatagagaagctctcgtttggcgcattggcctctcctttctctctgctttgacacggagttttcttgtctttgacgtggcttttcgctgctttgacactggctgttgctctccgcactccgtctcgatgccgggtgctttaccgcgtcttgacggggcctgcaaagaccgcgaggcctcttgactcggagatcctgtcgttttggtgtcttctttccgttctgtctcttcttcttcgtctctcgctttccctgcttttcttgtctctctcccctcgcgttcacgaggaacca

SEQ ID NO: 1281 - DNA, 3580 bp, Toxoplasma gondii
  source 1..3580: mol_type = genomic DNA
acctttgttctttgtcgggaaactaggacgggaaatgactctcgaggaagccgcggaatttcaactggaaatgacagctgaggaacatgaggtgagctacgtcggccagtcgcccgttcctggcgaggcgccggcacacgccggccggagaaggaagggcaagcttctgtaatgaacacagaaggggcgttacgaaagaatagcgttcgactgtgtgaggggctgaacaagtgaaggcgagtaagcaatgccgtctagccacaacgcttgcgtggggtgtctagacagcggaatgcggctgcggggctcatgagttttttttgttcctgttgcaggtgatgattgttcggttttctgcgtccgtttgtttgcagcggttcatggagcttcaggctgtgtatctcgatgacatctaagggcgacaccggtacaaagaatcagctcgctgcgttgactgttggcttgcttcaagaaatagaatgccataaatgtgcgcctcgcagtcagggcggagaactggggaggatctgtcgcttgtcattcgcgaagaaacggtcatattgctgtgttctgtccacgccaaggaaacacacaccgctttttttattgcgctgtcgctggtatttgtcattgaaacggagctaggaacatgcacggctctatggcggacggcattctgcggagccgagaaacagatggctgcaatatttgcaaagatgatgcccaagcggcaatcggaacgcatttattttcatggtaaacgaagcgctcacagttagtggccgattcctggtagtttaatttccggacgcgacggttcgaaacacctatcgccattcgcagaaggcaaggaaacagatgttgctgccatgtagagtccgtacaatgtgcacggacatagaacgcccatttcacaaatagaagattagaaatcctccttcgacgtgctttcggatccatatcggcagacttatgagtgtctttcatgatagagccacatttcggagcaagtgtttggttttggaccgaacggacgtagcagattcgcaaagggcagcacctcttcagtgacgatctccttcaaggtccttgctttagagcaatactggcacaaatccttctccacaaccacatggcaactctacgcgactgtcctctggtgaacctagccggaccactgacatgactcagagactgtgctctggaggtccctgacttccaacaatgcatcggctatgattggttgaaacggccagccgggtcctcagtggtagaatcacgaagaggcaaccaacagaacacgattatttaaattgtctttgcagtgatatgcgttgtctcagagtgcctaatccagcagggttgttgcccagcgagaagcacgttaacaaggctcgtagaaacatcatgcgatctgagcaaccacactttggataacgaatctacgtgactacatgagagcacgatggtatgacagtttgcggctgtcacagtgatattgtgtagacactcgttcgaataccgcttgtcctgctctgcggaggataagcggcggtacagggccagactattgtatgtggtgcttaccactggatctgggaggccgtctactcggccgctgtgggcagaatcgacacacttaggaactgggtgaggatgagtgtttcaaccccgagagaaagactagttccagacagacaatcagagacaagacttcagtagtccgtatctttgcctgacaaggggttccgaggatgctcgactattcgtatgtttcgctgtgtggcgacactgcatggagcttttccgtattcgaccgcagccgttctcccgcagaaagggagttttttgaggctacaaaacgttcagtctatatatcagatagctgcctcttcagcagataatgcacatgctgcacagttgatcctgctagaagcgcttcactgtcatggtagctctcacgtcctcgcttccagcggacactttccggactgtcggccggttgcttagcacggcacaggaccggaacggggaaaacactgctttagttgaggaaacagcacatctagcatgggaaagagaagactcctggagagtagacgtgagcgctttccacccgagttcgtttggtaagctgtgcacgacgctaccgccaccccgaagtgcccctctctccatgtgcggcttctcagtagttgcccgtgctgttgtcctcccaagacacgcgctttcttcagcgcttttgagtgtttaccttctgcgagctccgcagggatgtccccttctctctttctgtggggattgacaaggaaatgaggaactccgccgttttcacgatgactgacgacttctgttggcggtttcgcacaccctttgtttggggtgcctagccagtgcgcggccgcagtcttcgcggggctgacttcgatgtgctctttgcgtctttgttttttgtggagaagttggccgctttgccatagagtttttgtctgcgtcggaggtgttttctcgcgcgtgcatgccactcacttcctcgcgagtttagctttgaagcgatccgaagcgccgaacttgaggccgagctatcaccagcacagcttttgccatggaactggccgttccgaggacagacaaatcccgttttctctgttacactctccgctctgtctagctgagtcagagttcctcattccaggatgaattttagactggaaggttgaagttggacacctgtgtagaccggattcacctccggcaagtcattcataaccacatgctcacctcgtccgtagttgtcttgtccaggccgacaaaaatcgcgctttgcacatcgtgcaccattcttaaccgtcttctctttgagacggtctttcttttaaatgaaggcgtcgacgcgagaattccctcgtttgtttctggaaagccagcggcggctctgcgctttgccaccccggcgaagttcccttctggccactgggagttagcgtttttctttcgcctgcgcgagcccgaacggatcgatccctctactctacgtcgagtctcgtggatcgtgtctacctcaacagacaagcgtctcgatttttgctgtgaatcttccgatcgtcttgttccactttcgtcacatagtgagtctcgatttccctgtccactcgcgtaacaagtgcctactcattcctttttgccttcctcgagttcccaaagtttgttctggaattccctttcgatccgcgtagcgagcaactgttaacccgttttctcatcaactgacacctaacaaaagattcttccctttacgtctaatccgccgttcctagcactgggttttccgcgttcctttctaactcgcaggccctctgtacctgtctgcctccaaagagaccccactccagaggactgcttgaggcaggcgaacgtgtaggaatcaaaagcctgccgacagtcgtggtcgcttggaggctacagtccgtaacggtgttagatgcatgaaaaaacgatacaccaatccagtggtacggtttaagatcgtggcgactctaccggttatctcgtctttctcctcacaggtgttttttcgcga

SEQ ID NO: 1282 - DNA, 4253 bp, Toxoplasma gondii
  source 1..4253: mol_type = genomic DNA
aacaccgcacgacactgatccctcacaaatggagaacggattcgcgtccacagacggcgacttgcggagcagtctcatacccgagctggcacagaaaccccttcctcgagtgaaacggtcaccaaaaaatccagtgtttgtagttcacgcaagtggacatacgatgcgaagacaccccagctcttagtctacaccctagtcttctagcgctgcgacgacgcaacgtccaacgaaatcagcactgttcctcaagagtcaaacagcgtcgtcaaacagattgaacacagactggacggtactgatcgacggtatttaggtcctcttcagaacgcagactttctagatccgagcgacaaacgcgggtgcaagggaagggatttctcgcaactttcgccgacatccaaaacgagtctcgtctctgcgtcctgaatctgcgcgacctgacagctcgacgatttaacaaaagtggaaggcgtaaagcaccctcctcgagaacatgcgacaattcgccctcgttacagacaccagtcagcagggggaaacactgtcatgcttcccgaacgcgaagacctggcttccttggagatacgtgaaattcaccttcaggaaatccctactggatgtggcggaagtggaagcaagtcggccctcctgaagttgtatttcttcccttgcgtacaagtagaacgtcttcttgtgatcttcgtacgatgctgcattgaaaacgacaagacgggctgctacggggcaccggttgtgacgagaatcttctcagtttgagggaagtccagtctcagcagatacgccagtcactctgttttaccccgtcgactccatttgtcgaggcgcgctcgtgcagcgacctttgaagatttctgctggaatgctccgcggaagccaagagtttcacgcgcagagccttctcacgtgttgcaggaggggaagtttgtcgagttgtcagcaccgtcgtttcgccggtaagctcttggacgaagacgtgcgtggatctctctgtcaaaaaatgaaatgcccgctgcgggaagctcccgtgccgtaggccaaagaagaaatatgtcggcaacacccagcacagcggactgagaattcggaagccggtgcttacagccccgacgtcttccaaaactgaagcagtgtagcgaaacgaccagtcgaaacggatgaaggaagagaagtgctttttcaaatgaaagagggtgcgtagcgtgccgcagaaatcaggaagggaacaaagccaccgtagaaaagtgacggttctaccccttgcatgcagaacagcgcagcaagacgttgtcgcggcgaattgtagaaaacagagagaaccaactcccggtcacggggaacttggcattccttcaacgccggaaaaatcaccattcggaaaagatccctagacaaaacatagacacacaggtggggaatactctggaagcggtactgcgacgcagatggtgtcctcttccggttcagcgctgtgttggcggccgtcggtttggtcaagattgcaatcggacagcacaggaacgcgaagcagtggtgaggctttttgttaagagacgttatttcccttctcagatcatgctgagaacacagacacagcagcagccttgtatttctgtggttttgtgtgcacagaggcacactaatactgccagttggcggggtacggggacgcactcaaccatcctcgggttgttgacaatgccgagtagctggagacaagaaaaaacgactccaaacccgcgtaacttcacgatggtgtccaccgtgaggcgttgtttatcccgccattctacccgggcagacccggggagcactcgacacgcacaagcacgcaacgggatggttgtaggattgattatcagctgttttggggtaggatcgtatgagttaaactactcgtttagatcttgaaggtccgtacactgtcgtctttgcttagtggctgccggtcaccctccgtggttgctgcgcggaacgaagcacgtggatgtgggcgtgtttcatgcggggtagtgttttgggcgctaccagggtgcaagtaggaaaaagtcaagaggagctctgtctgcagggaaacgctgtggtgtgttgagcattcccggagagcaaagaaggaggaaacgaatgagtaacagtcttttcggggacatgctcaacacttagtctctgactagatcgtccgaggcagcagagcgtatgactggaagattgtgctgaaaggcactgtgccccgctcttctccgtccttacgcgacaggtttttgcagtagctgtcctacttctccgtcggttcagaagagagggcaaaagggagcatgcagacaatggtcgcttcccttgacttcatttatcgttcgcaagaataaacggggtgaatgtacataaatgaacaaatggaatgtttacgtttgctgtgtattgtggagagggatacagatgagcagagtgaaacaactgtttttttcacggccacagggaagacacgcgcgcacccagaatgtcacatcgtagaaacagcagactaagaagtgcagtagactaatgtccagccggttctttccataaacgaaagacagctgcgttgcttctttgctggcgcctcgattcttcccttattgttgtcaagacgcagaagagaatcagtcccatacgtcccgaagatttttctgaatggtggtctgtttagatgtgtctgtggattaaaggaaaccaccaattgtacaaggcatgtacggtagtcacagccgcggtttcaaccacactgagtatctcctgtaaatcacaaatgcaagacaggcacagtcgactctttctgctctagagtaggcttcagctgtgtgctaggagtttatgcctctacggatgtcggaattatttatattgacgatgaaaacattgaaagcatatgcgttattgacagctttttggcacatgaatcaaagacccaggcgagaagattggaattgaagtccgacgttttaaattgctggagaaagtctaggtttcgcgttcgtaagaagacacagccatcctgacaatagcaaattcccaaataccaattgaaaacgtcttctgtggtcaattagatgagccgagggaggcaacatggaacagattgtctccagcgcttatgtggtggtgttaatcagtattctatcggagacaatgttgttaccggtggtatgactatataaacatggtcacagtctcctcaaacgcgcttatcggtggaagctcgcaaaggggtctttagttgtaaaagaaaacgttgacactggcattttctcgcaatgcaaaagatttcgctgaatgacggatggctctggcgctgcattgggactgtctgatcgacgtgaatcttgcgtagtcactttcctcatagctcattcttcccatggtcaatcagatcgtcccttctgcgagaacttttgcggaagagtggtgaacacatttgtatgcaaatgttctaaggtttaatgactagtgcggctttagatttcaaagacgaccgcaaaagccggtggatttcagcgtaaagtgacctaagggtgcgttctgtatacgcgccgtctacagcagtcgttctgaatgtgcgccgggtcacacaaaccggtgtactgtcggtcacgatcgctttcccatactgtcgagaaagcgctctaaaaaaggcgtggtcgctgtgcacgaactgtggggctgaacggtggacggggctcttgtctggggtaacgattgttcaatatcccaccgtgaaaaggtgccctatttggttctgtcttcgttgtcgattgctcgtttgcaggcgaagccgacaatctagaaatcctcttgacaactatggcacaccgtttcactgatcgcagagtagtcgacagatccatccaacacattttccgttccgacacagtgtggcaaactgaaacgccacgagcctaccgttcgtccggtgtggcgtctgaagagaagcagcactcctaccgctttttttaaagactggatggtgaccgttatttttgagaaggggaaccacccttataggagagcgagcaatgcagtagcgacacgttgtcagcgttaattcacacgaaccagttattttctgaggacgccgctgccaaccctggcagctgctgacgatgagaggaacaggagacatttttctctgcttgtcattccaccttttcactcacaccattgcatccgctcgccaaactggtagcctccctctgtaa

SEQ ID NO: 1283 - DNA, 2839 bp, Toxoplasma gondii
  source 1..2839: mol_type = genomic DNA
ggtagttgtcacacacacgttcgtgctctttggccgatgcgtcatcgccgccagggaagccgcgacatggcaaaagcagttgcactcgtcactcagggcacactatggtagtaaaggtgtcctgtccaccgcatgcggcctagcgaacgagaaagaaatagagttgtgcgtcgaaacgtttgctcgaagagaaggctcgcccgtgtagagaagcagcgatgccagaacgtgggagagcagtgtggcaggtagtaggccgcatgcgtggcaaccaggcctgctggcgcaatccagtgagtcaccaaaagaactcacgaagaggtgttgtcgacacaagagcaagcgttcgcgtctttgggtgtggcgcttcgatccacgtaccgccaacgcgagcaccagtgcagaataggaaactacgcgaagaagagcaatcgtggttacggaagtctgtaggcgaggaggcaggcagaggaacaaacatatggagttctcgactgatcggtggagacatctagggtcaggtcgcgactgttccctgcacacaggcgggtctagatcgatcggtttcgcagatcgatttggttaaagcaaagttctctacagtcatgaggaagaccggttgaccgttgacagaaatagatatgctaaacagatatagcgagtaccggtacacaacgtattgtcgatagacggaaacaaaggtagatgcattctggcatactggacgggcggtatcgcgaagtattgtcaggaggttcgatattcaacacgtattgtttgccgaatagccagaagctttcataacgtgtgaactgttttgaaaccaaaccatcatctctcgggaggcccaactcagctgctgttcgattccgcgttctcgacgcttcccaagcgcctccagcctccggcatcacagtggcgcctgtggcaaggctgctcaaggtacacaagtcgtacagtttcagacaatgcaaggagtgcagcacacacaacatgcgcttccaggctgaaaactccgaagggaatttcctctgccgggtagaaacggcacgaacacgttaggagtaaaatgcggagccacctttcctttcgtcgctggcgactggaatttgtgtagttcgagggcgtacgagacgttctagtgttacggcgtgtagtacggtataatgcacgtttccgcagagaaggatctgcttggagtggctttttactaggtgaattcttctctggaaatctcgaccagtcgaaaccccggtcacagctgcgtggtgcacgtgaactcgagtactgtccgcgagtgtttattcacttgctgccgctgttgacgtccgcttcaaatcctgaatccccttcgggagtaacagtgcttgtctacgtttccccatctgctttctttgtcttggttgactcggcttaaccagtccagcttatgcatattaagggcgcccaggagggtgctggcagcgtggtggtaacgaccctgctgctaggcggacgaacgtagggattcttttccctgcacactccttcgccttgtgcgttgacgccgatatgcgttctcaaaagctggtacacccgaccaaacctaacggtccaaagagaggctctggccgtgtgatccacctgaacagtaagaaccaggatacgtctagatacacacaattctaatgctctccataaaacggaatacaccgtagttatacctgaacacgtccacaggtaaaaatcctggcgttcttgactcaatcgcgacagtcttttcgtgatccagctgatatccatgcgtctggtctctctagacgagacgggcgccgtgatgaaggggggcagaaggtgaacagacatcggatatctcaggttggcgtctaggaggcgaaaatacgcgagaaagcatgtttggatccgtgaggttacactctttgccttcctttttgcatctctggagacacatgtccaattctttcctccgctcggtaggagtgcgaggcgtataccgcgtgtccgcgcgcgtcttttctctacacaaaaagaaacagcgctgcttcctggatacacatgaattccttgggacctgttctgtcggcttttccttccttgtcttccggatgcaccatttcctgtctgttttgccccttgccttcgttcctttcctgccttgtctgccctttctcgacactttccagtccccaggagagacggcctcctccctccggaacgttgcagaggcaaacggtggacgtgctcggtcgcgcctcttggacggctttccgacccgtttctcttcgccggtctttcctccgcctcctgaccattccatttgagttggagaacgagcttttctggggaacactgctccgccggctcagcagacagacgcaccgtccaaacttgcctcctctccttttcctcgccggcgcgcatgtcttctcggccgctgcgaggagagaaaagactcgagccgtctcgacagtctctccacacttaccggacacagcgatcttttcttcgctcgtttcctcgagatagaaggctcgtcttcaaacagctgtggcctcacgttccgcgatttcccgcaacgacctgacgcttcttcgtcccccagaagaaagcgctccggcctcgccttgagcgtgtcttctctctgggtcttcacgaaaaaaaacggacggcaaagccggactgcacacctggccgcctgcaggactgagatgcctcccttctgggtcgtgaagttcgtttcgaaactctctctcgcccccactctctgcctgcccgcgccgctcggtctagctagagtgtctacgtgtagctcctaaacctgcgcaaccgttcgcagaga

SEQ ID NO: 1284 - DNA, 3044 bp, Toxoplasma gondii
  source 1..3044: mol_type = genomic DNA
aaggttatgcgtttctacgtcttcgactcgcattctgcggtttgtggctaaacacacagcgacatgtatggagaacatttggacgcagcagtctggttagtatcaaggctgcatgcaagggtgaatcgcatacgcggatgaaatttgtaggatttttgtacccgcatggtgcttgcagtcgcgtgccttatagcggacaacggagcgacggggtatgtctcctttcgtcgcttggctttgctgtgcattccaggtggtacgacagggcccgtttaacgtcgcaagtggcgttagctgctgcgccgatcttgagttgcatctttatcttcctggtccctcgctgctgactgcggacacagggtctgcacgtgctttcaaagattacctcaggcaagcgcattcgaagttatgcgaaagagaaacaagctcttagtcttcgggacggagaggttgtggtaaagcttctctgttcgaaccgcgtacctctcgtcggtacctatcttccttacttgtaaggcaaccagctcctgacacgggctggatgcgtggtggtctcactcgtgaattacacatccttcgtgcaggacactgttcttcatatcttcagtcaagagcaggatgaccgcttacgtgctcgctctccgtcaataggtccttcaaactccactcgacaagccaggatttttattactggaacttttttttctaccggagagagtgtgcgtccttgaaaaacaagtcgtccagagtagagcagcccctccgccgggctgaagagatgtttcacgctcagctcctgccacatttgcctaatccggtgtacatgtacttttcgaggcttttttaagggtggaattgcgcaaagtgccctactgtgtgcagtcttttttgccggtgtgagaactcttctgaccatcttcgcgtgcggggagaatcttaacttggaaaccgaaccgagttacccttgaaccagtacgggtcgccttgagagtatggaggttttgtgactaacttggtttcgcactcgtgatacgtccagtgggcctcccagaaaaatgaaggaaagacgataaagggaaatggaacgacgatttttcgtttgtcctcaaaggaaggattctcatctacgtcacagcagggtactgcgacgttcattgtaaaaatacagtgtattgctgttcttcaaagtcttatgtgaagagccgctgaagagcgacatacgttactacacttttcgtccagggccctttgtgtgcctcacactctcagcctagacgactgatactagccccgaagacgaatgatggacttcagaatgcagttccttaccagcatttccgaaagcaagagagaccgtcctgtgaggaagtgtcttgaagggcgtcactgtctgtgcggcaacataagtcgcctgccgttcctggcaacacggtcataccgcatactagtcactcgctattgagtgaattccacggtttttccgagatcctttagtggttcggttggcatttagtaactgcataggataccaccttcctaagtggccgcgtctaccgcaattcaagtctcagccgagacctgcagctaattaggtcgtcggcgaccagtcgaggatgaaatcaaagattttttaaataatccagttgcacgcacggcctccagcgagcagacaaaggagattgcacttccgcttctgctctcctgttaccaatttcaactgatttttttccctattgcctgcttcagcagtgattggctgcccgtgcgccccggccccgatctagcacttgtatgggggcaaaacacttctcgtctggaggggtcgggaccaggctcctgtagactgaacggctgaccggtacttttccacatgaagacctttcggtataaaggtcgtccacgcgagtacggcatttatagaagcttgtgcagtttcgtaacccacggagctcaagtgaacagaagaggcgagcagttttctttaactttggatgactactttgtttctgtccgctcttcccttcgagggcatagacgtattgtacgttcgctgatctgttgctccctgttcgaggcattcccctgattcagcccagccggtacattcggtttcgatgtttcgtgaacgtcggaaattcagaggagagcggcactacgcgttgaccagtcagagaattcgccggcagatcctttcattcacagatgtagaatacctgcttcatcgtagacgaaatgcgctttcaacatgtttcccgtcacctgtcagtacgtgtcagatagtcgtgcttcgcatacttacagtgcctagaacacaactgtttgctgtcgtgggcgcacggctgtcagtgcctaattgagcgtttgtgtgtaactgcagaacccttaacgatcgacaatgtagaaactaaccgccttcggaaccataaagcgaggcacgcgaacaaccaaacgcctcctcgtctagcaccggcgcagagttgaggctgtcgtcagaatcagcccaataaaacactcgggtgatgtcgtgtgtaaacgcccgatttcgttcatgtggtcggtcacgcagaggtgtcgcacagttgcacaatctgaggtggtagccgtgctgtttgctgtggaagccgaacgtagagaggaaaagccctcggtctgtgccgagcggggaatgaagaaatgagaagacgacaacgaacgacgctctctaactgggtacaagcgaggcgacaaaccgcccctataagtcctttgtccattgttgcttttttacgcttgcagttgctttcccctccctccagacgaaaacacccacacactgtcacttgctacgtcagctgtggtgtctccagttcggcgtccccgtagttgtttgttgttcgcccctgctcccgttttcacttgactaatctcggcgcggcgcgagttgcttcgctgttcagactaaattcgaatttttacttctccccctttttttccgtttgcggtgttacacttattccctctctccgggaatcttagccgtttctgtgtactcaactccgacaaaa

SEQ ID NO: 1285 - DNA, 4963 bp, Toxoplasma gondii
  source 1..4963: mol_type = genomic DNA
tggactcaagctcggacactgcggagaagccagaactcaaaaagaagtcacagccagcagacgagaatggtccggagacagatgaggttgcaactgaggcgagtagcgacgaatgggcagtcatcgcaggaggcaaagaactggaagaaatatgtgatgcagtctattcagagtcattgaggctgcaggaactggtttcattttatgaagacttcgccgcagaatgcttgcaacgtcagggtttcgaactcggagctgcgcgtttccgagaaaacgaattgtgaccgcgctaaagggaaaacgtgctttcttcatgggttttcaaacactgtggaaagcgtgatcgtgggtcaaatctgtggagagctagtccattcctttccttgtcaatgttctgtacaaccacttcaggtcaagcgactttcagaggatgttctcgacacacatagtgcgctaatagtgtcacagccgtcatcaaccaatcagcgaccaacatatctcgtagcgtattgagacggtcggggcgtctcacatagtccagccgttgagagggacgctttcaacggcacatgcttcatatcgtagtaccgcaatggcgtgttttccctgttcgtagattgaaggagttcacaatagcgaagaggatctcgtatcaatgggattccgaccgtttgaaccgcctgccagagagagattttttttcttctagcaccttttaaacacatacccgatcgttgataggaaaacatcgcaatgacgtcccgtacgtggtacagacactgcagagtcgcgacctatgagcagacgtgtccgagcacgtctgttattagagaagtaggacgccagactcgaaatgtggctgtatttatatgaaagttccttagtagaatgcaaggcaaatgacatatcctgagtgctaacggactcagttcattgagttacccaggagtcgatatactatgtcacaaatgaaaggctggtttgcatccttcagattcgtgaataccctcgtaccctttggggacgctctgctccctgagatatgtgacgatcccgtttctgattgtttggaaacaacagtctacatctacagttctctgcggaactgaacaactccttttctagaagtagtgtcatgaatgttgaaattcaagtattgtggtggcagacgatgcagcgagcttttaaggttgacagatgaaagggtggaataagaggatacactaactcaagggacaaggaacctgctgattgagttgcaataagaggcgtagtttcgggaaaaggttgtacaggaagctctacacgcagggtaaatcggatttaccgggactcattgaccagtggaccatcgtagcacggtcaaagatgacagctgacgcaagagggataatggggcttcagtggaatacatacgcgcaggagcgacattggggcttgtttcacgttgccgaagtaccattaatctgtcataaaacaagaggcgaacgaatgtaaacagtcttcctcaagggattcaggggcctttttgcatgggtcactctttcgctctttcctagtccctcccacgagacaagtctcaccaagcactctccaacagacaacatatttctggtgttgtctcgagcgcgagagaacaagagacatcggtctgaaaaaactaccgaatacatatactttggacccaaatggtcgtccacttgaaaaggaggacaacttgagcgacatcaaactctgtcacatgatgcgatcaatttgtacgacgaagatccctgttttcttgggcatgcggccacatatgcaacgctcttgtatcgctcgaagcgtttagttatacgtcagtagcactctgtgaatttgctagcgttcaacacctgaatagagaagtagcagcagcatgggaatttaggttgttgcatttcaggcgtgttacgtttcctcttgcgttgatcataataacagtccgtagtcgagcagagcgctggtatgtccgtttacgttggttcatacgcagcatccggggggttctggtgtacgtctatatgcgtgtatatgtgtatagattggcacatccgaaggatgctattcctgtagagtcgttgtgatgcttaaccaatcgcgtaggtccctgctttttgggtcaataccgcatattgctcttcctggtttacgcaatgccatccgttggaaacgatcaataccgcaagcacgctctgtcttcgcgatatatccgtgagctgcatgttgcctaaagcgtgtgactatcacggtacagacgaaaaggggaaaatcaacagagtagaatgcagcacagatgagttcccatgttcgggaactccagaggcaccgagcgcatccgtacttcaagagatgctattcgagcactatggtgtaagtaaaaacgctggtatctgcgatggggtttccagaccaaccatgtcgcttcatcggacgagtccaaaggatttgtatcacgcacagtctcgtaagacattcgcgatcagcaagcttctattgaagactcaacacccctgggcggcccgcaatcccttcggtggccgtacgcgaaaccagccggcatttcctgtgatccgtaagttggcaagtccgacggcgttccgaaactcgtgtctttttgtggggagctcaagtacagtacatcactggggaaactgttagggcagaaaacaaatgccaggcaaacggcgtagcggctagcgccttactttcccagagctattaatcaacgaggctgcgagtttgttgctcaccggattgccagagtccctgccttactggggctgaacggcgacttcagtccggggtacgaggggcagttcccaattattcctgcttttgacttcttccgtgacgctcaacagtctcctatcacatctcgaccagagcgactgctagtatgaagacgaagagaaaaaaacgattccgtagcgcaacgaacgaaagccagatccacaaggtgagaaagcacccgtcaaccattcttctccttcccccgccagtaggcacagaatgttacgaaagacatctgtgagctgttttgtgtgcacctgcaaagacacacatctctatgcgtggaaagatgtacacatgccacgattgtgaaaaaccaggtgtgtggaatccttttttctacggtttctccttttttgcggagctcgacgaatccctcgtcgaaaataatcccttgcattttccacattcgatgcgacgggcgctggccgtaatagttcggcacaggagcttgcgtgtgtagtttcgggatggtgagatggctacccagctgaacagtggttgctcaacacaaaagagcggttagttctcataccggcacatcagtggttcagaaaaccacaaatcggcaatcgacagccagaggttgctgccgttaccgaggggggtggagggtgggggtttcctggtttgcaggaccaccgtccgactcctccacactcttgcaggactggaggggggaacccagatcgttttctcatttcgtgaggccttcgcccgaggtcctgtgagacacgcgacttccttttctcctaataacacacagaacgcaaggagactgttaggtttaccagatcttggacccctccttcatcgtcagttacactgtccttgttccctggtgagtgctttcttcagccgacccccgtcgcacattttacagtggctgccttgggtctcgccagctagatagaagtgtccgtgtgtggcgtgatggtttctgcgacgcgcttcgtttcttcgttctcgcagttttctaaagagtttgcaaaaatctgtgcacaccccgtcctggaggcggcgattcccggtacctgcaaatcaagactgggtttttcacctgcttttcgtagctagctgagcgcctatctgaatgaaagaccacagtgcgtcgggggcgtggtgaactggaggaactggctaccctggaaaagaagttggatactggggggtcggcacaacgaacgcatcttcttttcttcttcagattcccttctgggcgcacgagtgaaaacaaagacagggaactcttttgaaatcggggggctgagttgtcggctttttgtcgctctttcgcctcttcaccggaccaccctccaccgtgcacatagtttcactttgtgtcctcaccgacaggtcgcgtgccactggggggagtggaggctcgagtgtcgatcgacactcgcgcgagaagaaaatgtgttttcggaacaagctcgccaccggttcgtgttctgtgtttcacttctgaaccttgtcaaaacttgtttgttgtgccgtcccacgcacacgccaccctgttcttcccgcacggtggccgagtgtctggacaggcgtcttgtcaaaagctgttcatgaagaactcaacaagggaaaaaccttttttttctcttcgccaatcgaacgcgtttgggagtcttttctccgaatgagttcaaccgagtgaagctagtgccgcggactgtccaccggggtgtgtttcgcgagagtgtgtgtagcagggaagccgccttttggcggcgcttcggtcttgtgtaactttttcgctgtcattttcaccggcacatatttgccgggtaccaagaagcttcgatttttttatgacatcggtctgcttcacttgtcacgcgagctgtttgcatcggccgtaactcgcggacgcgtagcgtccttcgttgtagacccctttctccccttctctctaccttaccttcgcgccacttctcgtgttccccctcccagatttctctctgcctcggtgggctctctggttgtcagtcgtgtgtccttcgatgtcttcgcccccttctccgttcctcctatccagcacacctggtgacgcctctcaagtctgagcggcgtggcagcgaccaacaacgacagacacatgtcctcggccattcctgtgccctgccctatctgctatgctaga

SEQ ID NO: 1286 - DNA, 3984 bp, Toxoplasma gondii
  source 1..3984: mol_type = genomic DNA
tttaccgggttgcttggatttctgtccggctcgattcgctgtttccccagtgggcatgtccgtcacagggtcttctcgcgagagcgccaagagtcgcagagccggcactccgcgctgcgaacgccggcgctctgtctgagcgaggtgaggaaatagaatggcgctgcgcacccgtagtgatgcctgcgaaaatgtggacgccgaggacctcgctcgcatcaaggaagaaggctgaccggaaggatgtgagccgaaagagcaagaaggaaactttctcgggagcgcaggagcacggcgcctgcgagacaaactgcgaagaaacgcggatcgctggggagtcctcgcgaggcggcggcgacgtggttgtcgggacggacgaggcgaagacagcgaagaagccgagggggaagacggctcggcgggatggccatagagaagcgggaaccgtcgcggtgctcgcggtccattctcctttgcactgacgtcgctgtctcccgtttcgccagacgtggagtcgacactggtctcggaagattcggtcgtagcgtcactcgaggtgacagtggccgaagacgactgtgaggtgctttgactcctcgtggaagagtcgtctgcaggttctctgccgcgcgactgcgccttccactcgggggtctcgtggctgttccgacccgaagcgccacccggcggagtgcgtacttttcgcccaaacttcccaggtcgtccccccgatcgcctgcccgcgccgacgcgaatccgggagcgaaggtcgcttcgtgctgccggtctaaccggttcagagccgcgaaagtctgcgtcagagtcgtcggaagttcgcgtgtcagaaaacgaactggcctcacttgtttcactggatgagtccgcagccaaagagtctccctgaagatcgctctctgcgctgctctcgacgctgcgctcgggtgtatctacacctgaagtgtgctcggatagcgagctggattctgcagactcacccgacggactgctggaaagcgaggcagatgaggcagcgcttcctttcgcggattcagaggaatccgagtcgatgagagtccgccgtcttctctcttctgaagttttcctccgcgttcgttccgccgcctgcgccttgatgcgcgcaagcgctcgcacccgccccgcgggagctccggccgttccagcggacgaattcgaggaagaatgcgacaaaaaggtggcactggttgcagacataacagggaaagcataggcagactgtctcgagtccacgggcaattggaacggctgagcaaaagacggacttgcaccgttcgacaacgcctctgcgtcacgggctagagcggcggccgaacctaccgttctaggtttgggaataacgtgagtatctttctgtaaagtcgaggcgacagatgggttcaggttcgcggaagcatcgaaatgcatgatgtcttctgcggcagactgcagtgcatccgattcacagacaccgctgggagacggtgagctcaaacttttgtcactgacacgagcaataagcacaccggacccggaaggcggcgaagagccgcagcgcggctcgtgtgttaccatttctttaggcacactaggcaatgcagcgaatcgccttctttctttctaggaagactcagctgtggaaggaaggcaaagacgggacacagaaaatcgttttgatgtcgcatcagatgcgtacgaacctacaagtatccacattccaattttgaactgggaaaaagagggatgtaacgactgtcgagatgcctccaaacgcatgtgacaaaacaggctcgtcagacacaactcagcgtggacgcaagaagttcatggaactcagaatgctcattgcagcacgaacagcgagcgcttcgaccaacctttcagtagccgcttgaaaaccttccagctgctacttaatgccggacacattgtccagcgcagagcagggaatcagagcagatactttgtctacacagcagacagagtttgacgtcggcttgaactacgtcctatcaccatccgtccctccgcgttcgtgggtgaggagggcaacgaaagatgacacagcggaaaggacagcgacagtttagcagagaacttggtcactttttaaaaaggtaggcttgtttgtagaaacgggcaaccgatgtttcacgactcgactctcacagagcgctggatggcgcagccgtacgggttgtgacgaacccgccgcatttctctacaaaggaaggcgaaaaactctcccttcacgtggaggggagaagacggtgaaatgggaagaaaagatcgaacatactacggaggaggagcaaagaaaacggcctgaaatccccgcagtagaaccaaagcatgcgaaggaaactcggcgtcgcccgacagagaccatcagcaaggaagagctgtggtagagaaaacaaacagacaggatcatgaaaatccaacgagcaattttagcaaacctccaaaagcggaacaaaggaaactcgcgattgaatcgagaggcgaagaggcacgccgcacgcagaggagctagcgctagcaaaccagagtgaagtttagaggaataagcgggaatccgcatccaaaacgcaccgaatctgctgagagacaagtgtgaaactgcaagtgaaacgagcaaatattccagggaaaggcgagcaagtccgattcgggaaagtggagagcaccgcgtcgacagaaacgacggcagcatcccgttttgcagagacgacgtgtcgattcctttgacggagaaaaagacgagggcatgctacaatgccgacttgcagaggaacgagaaagacgaatctttcttcggagctacgctctttgagagtcgatcttgaaaactgcaattcgccatgcctttaggacgacatcagtgtacactggatctgaactcgcagacgaccacacgaggagcggaaaacctcaccgcctccgtgccacggaagttggacaaggaagtgaaaaggcgcttagaagactatgtctcttcttcgagttaacgcagtgaaaaatgattccacgagttctctggtttgtctgatttcctggggaaaaaagagacaactctctggctctgcctccaggtcaaaaggtctagagtcgtaagtcgatgagcacgggagcggggcggcaagaaatccttgttttccaaaagaaaatcttgctgaattgaaactaccctgtcattccgtcttctctctaacgattcgctctcagttttcgtgctcagtctggctccacgtcctggttatgccttttctgaggaaaaataggcgtagggcgagatgcagcttcaagatgggcggtttcaatttccatagaaagagacgccgtcaacgttgggcttgcattgtcgaatctcgcgcaaaactgcagtttcctcggcattctcgctgtggttttctggtcgctttttaccacgacagaggcgccagcgacgtcgagttctctcccttgccgccggtgttgagcttgaaagtcttttttctccgaattttctgcagcatgacgtgagagatacgctggagaagagaaagttatcttatgttcaaagcatgtgcttaacaaaggcgatactaattgcatctcgtctctgcttcggtgtccagccgcagctttcctgtttgtcgagaggggcaagaattagttgagaagcgactttaaaagaacgaggcaatgagtctaccgatcgaacgcaaaggactccttcttcctctccttggctgactgatctgcgactggcacctcgtgtaaatctattgtcgccaggtcttgaacacaagtcatgcagtaacttaagctaggctacctgtaacgcattatacagtgaggttcgcaggtttctacctttttctgccgagtatagtttacgaggtggacatctggcttagatctttcgaaggtctctgtctgtgaaggtgcgaactgacacacgtcagcgaggttttttcgtgccga

SEQ ID NO: 1287 - DNA, 2198 bp, Toxoplasma gondii
  source 1..2198: mol_type = genomic DNA
gagtaaagtgagtcggttgaggtgtcagccgcctagaaggttgtacgccgggggagaagggaggcgcgagtctaaagaaatctggagaaacgaaacctgatcgagaactgaaacactctggctgctgagcagcgccacccgagacgggtcggcctgtcaccccacaagaagaacctggaaaaggagacaggagagacacgaaaggagacagcggggaagcagacgcggcgcacaacgagggaaaggacccgtgggtgaggcgaggaaactgccgcgtctgggaaggaagaaatgccccgcacacagcgcccctacggatgggctccatccaccgtcgccagcttgaggtgtatgtacaacacagctgggcgcgctcgtgaagctttagccgatctctctgtcttgcgcgctgttctgcgccaagctgcgttgacgcctcgcgacaccaagaggaaaaaggacgccttttcgcagagacagcatcgccgccggacgcagagtcacagaaggccgcggaaggagcgagggaggaggggagtgagagggaagaaggaagcgagagagaagacgaaactgagagagacgacgcccatgggagagagagagaacgatgcgtcgagagagcgcccgactttcccgcagaccaaccgcgtctcagctccgctccccacggagccgagaggccgcgagctggttgcgttgaccaggcgacgatgacagtgagttgaaagaaaagaaaggagaagaaaggaagcgcagaccttgcatgcagccgaaggcgagacactctgttcgatgtctctcggttctttcgcatcgcgtctttggaccacaaactgaggtggaagtccttcgaacgcatgtgaaaagacttaaaagaaaggccttccttcgggtgcatcactgccggtggcttttcctagtttctcttcacctctcttcttctctgtctttttcctctcgcctctcctccctctcttctcttttatctcttttcccctctttctctctctctttccttctccctccactctgtcacttcttctctctctccttcctctttttctctccgtttcttccgtctctttccccttctgtcctctctttctgtgtctccttttctttaccttctccgctctcttctccctccctcgtgacctcggtgtgtgtggacggtgcctgggggcagagagacgaaggagtttctggcgcgctctacagacgctttctatcctttgaatattcagaagaaaaagaaaaaaaaaagaaaaggcatgcggcggggcgaaaagagtcttgcggaccgagaaatgttttcacacaccaacggcccggctgcatcatctgagagaaggcaggcactgccgcagcaagtctgcttcttgacgactctcggcgagggaaatgcctttaaaaaactggaggtcgtcgtctcagggagaaaaatgccatgttgcctcaaacagataacctcttcaagagaaagaaaagtcgcgaaaacgaatcgctgcagccgcatgcaggacatctgtctccatcgggactggactaagagctgagagagacgctgtattcttcctcctggagactgctgagaaccgcgcaaagaacacacgtaagaggcgccgagagaggacttttttcaggaatttccccgaaagaaactcttcgcttccagtttttcgaagaagaaagagtcacagtttttctcttcttgttcccaaacctcgggctacgctctccacacgagctcggggaatgttcgtgtctcttgagatgtaatccgtcagaggcgctgacgttggagcgtcttctgctcgttcttcttctccatcttcttctttttcctccacctctacgtcttactctcccttgtgttgcacctcgacttcttcgccatctcccatctcttcttctgcttcttcttctgcttctcgttcttcttctcctgcttctcgttcttcttctctttcttctccttcttctcttggtcgctcttccctcagttcttttctcagactgcgctcgttctctctgtgtcttcctccctccccttccgctcttttgtgcagtttattctcttcgcttgctcgcctctctgcgcctctttcttcgcgctcttcgctgtggttgcttcagcgtagcttctgcctctgtacagcacgcggttctgcgtcagagagaggccgacagagaga

SEQ ID NO: 1288 - DNA, 2646 bp, Toxoplasma gondii
  source 1..2646: mol_type = genomic DNA
tgcatgcagagtggaaatcacccggttcacgccatggcgcggaaacgcacactctgcgaggagcggggactttgcgcgcgagagacgaaggagacaaacgaggagggcatgggtgaggaagaaggacgagatgcagcacacgtacaggagtgggcaagacttcatttccacataggtcatccggggaagcagcgaagcaattggctcagaagaaaggccagaaatgggtgaggccgcgaggcttccagagtccgccgacggcgaggcaagctctgcaacgcccccaggagggacggagacaggtgcgccgccttccgtctccatggcgcggctctcaatcaggtttgaacaattcttacgggggaagaatcacgaagagaagtggagagagctctgaaaagatgctgcacagaggaaggaaaagggagaagagagttcccaaggattctcggattggataccgagatggatccgccagacaacagggggagggggggtgagggaagacggaggcaaagtgccgcacctgagaacaccctggatgtggtcacaacgtgcctacagaggcaggaagggtgagagtatctgcgacctgagaatccaagacagcgattgacagagaaacgagaccgacagcgggactgcagctatggaacagcgaaacgacgttcgacgcgaagcagcaagaagagaagacagagaggtacgcaccgcagagaagaggttccctatcgggtctgcgcctccctctcgctgtcactggaatcctgtttttttccaaacttccacgcgtgcataggatacgcagaaggcggaaaaacgcgccagggacttcctgcgtattttgattcacccaattcgaaaactacaacttgaagctgcagctcacacaatgccgctcgactgtctcgttctcttttatctctccttgttgtcgctgtcgaggccagcatctagacggaagaggtgtgccggtgccgaccttgcggcggcgcatgcagggtgaccgggagagaaaaaagacagagatccacctttatatacaaaacttcacacactgcatctgtgagtgaagtgccgttctcattagagaaaaacaacaacagaatccggactcaggagaaggccccgacgaacaagacagccaaaaaatccgtccggacacacgcagaagcaggggaagatccgaaaagccgggagaaacagacgccacagaataacgagaggcaacaaccaagtgacaggaacgggagccgagcaagaagaaggtggcagggaggagaagagaaggtggcgacaggttgcaggacctctgcgcgctaggcataggacatccgatatgtttaccggaacctgtagcgacaaacaacagaacagagcgcctcagaaaggtattttatgcagcagggaaagggaggatactccagaaaacaagctgacgaaagaagaagctgatccgagtttctttctctcatttctctatcggcgtgaaacgaacggagtgtcgcctgaacgacgcccaggaccgaccgcagcacgtagagaggggctgcgcagaagcatgcatgcgccaagaagagaggaaagaccagatggaaaatgttttaagagagtttggagcacctctttttcaggccgaaacgcggctgtggacgcgccacggtacgctcgcgcttctcgcgagaaaagggagacactgagaggagggccttctctggttggcgtcccggtcttcactgtgggattgcagaaaaaccaccttgtcttgtcactttttctttaaaaatcttcaccttccctccccgttatagattctcgacttttcaacacctttcctttcagaggcatttcctctctctaccctcctggtctcctgcctcgtgttttccctctttctgtcgcaaagtaggtggtttgtgggccttcgcgcgcggagccttcctttccctgtctttcgtgcaaaacttttcctttccccgcattctgctgggtttaagacccccctggtatctttgtctcttcgcaaactaaggcctcccgctggatttctctgccgccgcggcaggtgtcgcaaagtcgtcgctgcctaggcttcttcacacgaccagaagaatccgttttgctcgacggcagatctcccttgcttgcattttatcagcctttgttttcctttcgtattccatctcctcatcgaaggaaagatcgggacccggacctctggggctcttcagcttgccgaagaccaacacccttgggccgaagaccaacacccttcgttccgcgtccctgcgtctcccgtgtttttctcaactgcttcttctcttctcttcatctcgttttttccgcctctgcctcgctgctgacttattcaccatgcagcggtagcagcgccttgcacgcttctccagttctcccttgtctctgtcgcctccttcgtcccgtttgtctcttttgtctcgtctctttctcagtttttttgtctcctttttcgagacacaggcccccggcattgtagaggagacgaccggtggagcgagtaccgccatcagaccccactgcactatttctgccgaaacttcttaccgtcggccatctccttgtcttcttcgttgttcgctttgctgtttctgcgctttctgagaagga

SEQ ID NO: 1289 - DNA, 1931 bp, Toxoplasma gondii
  source 1..1931: mol_type = genomic DNA
aacaaatgcattaaccttcagggcacactacatgaaaccagcatctattgtggcgcgcatgttcaaaccacgacacgtaacagtttgaattacaaacatggcacgcgtttatcttaacagacattcctgttacgatgtctcagtcttgttgcggtgcatgcacttggaatcttatcaggaatacttcagtgcctctacaaaaacacaaatgggggtagaatgcgtagagacagcgtaaaattcgagagacgggggcttgtacataacgcacgaaattgaattctgtaacacaatcccgactgttacacgaccacagccagtctacatgatcggtacacttctacctggaatactgaacaacactacgaggacgtgtacgactctaacacaaggggccaggacaccgggaatcaccaaaagctactctacgagactaagctagatttacacacttgaaatctacgaagggtcaccagaaaacggtttcggatccacacgtgagacatgccacgcgtttttgtcttcactgaaaacacggtggtctcggttttggagtggccgttcagacaccagtggaccgggacttacaatgcgagcctgcgcagactgaaggcacttgaattcttcgatcataagatatttgcaagcatttttggggtcatcagcgtggactttcgcggcgaaatcattgacggcaagtcggatttcatctgccgtcttggtcgtcgagttgaacttttccggggaatagagaccgtggtggtaggccagcaggcgctcccagttcgaggaaaaacgaggtgcatcgctgaagccgccttcaggaaagctgtcgctaaccatgttggagtactgagtattgattcggtcggcttccgggttatcattgggatgaaatgttcgtgcatctgtcgaccacggatggcgaacagcctcgtggttccggttgtcgtagatcgaggagttcattcggctcccagttcgtctgttgacaggaattggctcgtttccccatttgtacttgttgaaatgtttgtcttcgtccatctgtggattcaacggcaccttgctcaacagttcgggaaacgcttccgcccccaagatcgaggctgcccccgactgccccccttcgcgagtctctgccatcttgactgtgcgggtaataggggagagaaaagccgctcctcgccaacacaaaaatgcgactcagcaaagacacctggcaacgtttccttaagaagaagaaaatggaaattctcagaaaacagtagattaacccaggccttttcctccgggggtctccctgtcgagcccgtttcgacgaaaccagacgtctctggccggcaggggtaagcgaaaaaagaggaaaagaatacactgggcagtggacgaggtgtgcatgctgaaacgaaaagtggcggtggaaaaccgagcgaaaaatgacgatcggaggataggctctgaatcactgcatgcagttgtgttttgcctcctcagcccttcgggccctcccgagaaaagggtacctcgaaggacgaaaagaagaacagaccagctggaaaccgcacaacaaaggacttgtctcgttcacatcgcgaccgcccgccctcttgccatctttcctcccagtccctgatgtctctcccccttggttttttctctgtgtctccctctcctcgtatgtctctggtctccaggtctccaggtgtgcagggcctcagaaaggcaagttgtgttgcttccttgctccctcactttccatggggagattttttcactaggcaccacatttcgtatgttatgttctcgaagggtgctagagcgggaaagaagcacgtcggcaacactctggtaactgtcgcattcgcttcactgagacacggcgcataagaatcttctgaattagcgaatctgcccaagaataccacgca

SEQ ID NO: 1290 - DNA, 1894 bp, Toxoplasma gondii
  source 1..1894: mol_type = genomic DNA
ctggactatcgagcagttttctcgaaatacatttgtcaggcgcctcgcaaccattccatcctgcgcctgcgaggcactggcgcatcacagaccccacatcctctccaagcatttggttgtctcccgggtctcctgcgttttcgtcttctcctctgtcgtctgaaattctgggactcaactggtggtgtaaaatccattctgtgcaaggcaacagtgaagcgcaagtcgggcgataaacgccggcgccggtcacaggagacgctcgctgacgacaggctcgtacgggtctctctcgccttgtctcagggcctcctctcttcggagacagtgtagcgttgaggtccaccatctgtgctcgtatttgtcgcggggaaccgaggcccaatgtgctcttcagatggacgcctgactcttttgcctcaatgcaattccatgacggccatggaaagcacagccgagctcggatccggcgaagtatattacattcaagacctaggaaggccctctcattcaaacagggtcggcagatagcactgtggagaggccgagcagagagagtctatacggaagacgagaagtcagctgagaggcaccagatcgagagacgggaaggaagcggtacaatgtacacacaagagtcgagcacggaaacaccggcttcctgagacattggtacacatgcatggaagagaaaagacgaggcttacgggagtttgtctctgcctttttgacgacgcaacagtgtgggtgtaacaggaccaaagaccaagcgcgagagaggagtctggagatacgccagcagcagccagggactacaggaaggtccgcctcgctggcagcgttccccgacagagactctccctggagttttttctagtcgacaaaggagtcacggcggcagtggaagcctgtgtggaagactcgatgaagcaaaagagaaaaaactcgacaccggcgcagcacacccacctacagctcttcttggtgcgtcggttgtcttctcttgggtgtcacacgaggatatgcaagcagcttcgctgcgtcctccaaggataatacaaacttccgacatcagaataagcgagtcgttggcagttccaaacacagacagaccgtgtgttccgcgctttcttggcgcagaaatccctccaatctggtgcctctcttgcgtctcctggcccaacggacccgccgtcgagaatcgcagacaagaatacacagttcaccctgtgtgtgacagcggcgaaactggcgaggcaagtcttctcgctacatcgcttcacttcgtctcttgttccttccctttccttgcaaaactcgacaccggagttgcttctgcttctcggccgtagagtgcacctgcctgcacactagagtctgccgtgcatgcagactggacagcatgcgcgcaaagccgcttctctcacggcggaagtctcgtctccttccgtgtcaatgtccgtttctttcgcgtcctcctctcttccccacgtgcctcgaaagattctgcggttggctgccggtctatgtgaatcttagtctcggcagagcttctgcactagtcagatcagcccgccgggacttcgaataacggccagagtcccggaccccatttcagagattctgttttgcatagtcactcatgcagcagatctcttcaagacacagaactcgggccagtgagcgagcatgggagagaataattgaatggggaatcctagagggggtgcattgtgggggagatcctctcgtcttcagcatctcgcgatgcctccgaatatctcagcgtgccaaatcgcctttactggacgaacaggagagcctcgacagcagacgcattggaaggcgtttttcttggggttttaaaagtggttgaatccccgcaggaagatca

SEQ ID NO: 1291 - DNA, 2339 bp, Toxoplasma gondii
  source 1..2339: mol_type = genomic DNA
gagcaaaactgtcacttactgggagtacagtgaacctgcggcgtcgtcgcatctgctgaggctcgatgtctgttttccgacggctggttccggtgagcccctccattactccggagactctctcgtcctccgtagtcgtttttgccttgtgcaggcgaatgccggggagcctctgcgtcctgatcttcccccaaggcacttgcgggcaaaaaggtttgacaggcgacgcagaaaagctgctgttgcttgttgcgcatcagcgggacgctcacacactgcaaaacgcacacgtccgtacagagaccgcactgcagatgtacacaaaaatactgatacagatttacccgccataatttttctcgtcgtcttccgcgcttgccgattcctacacatgcggaccactgcatgagtcgtgtgcattcgccgacccagaaaggccgatgatcgagtttgtgctgagcgcttggtttcatacacacatgcctctaagcatgcacggaggtgtccatacaccctgtgtagacaacacccctgcccaacacggatgtgcggcaccaattacatgtgttttccgttgacacatatggtctcatgtcgacatgcgtgcgagcagacaagacgcgaggccttgagcatgtgaaacatttcgaccgaggctcctggattcttctgtctcggtccctggtaaacaacgccttcccgaatctaggaggactgtgctgacttcctagtttgctctcgagcggcggtgcttctccgtgtttcgcatgtgcgtagaagcatttcggagcgcctattcgtacattttcttgcatgcaacttcgtgttcagcaaacacacagattccggtgtttcaccgttccaccgccgccaattcgaacacgcacctgagggcaagtgtcgccgagcatcgtccacccaagtagcagcttctcggcgagaccttcactcgctgttttcacttgaccctctcctgttttgccccgtctttgctctgcaagactgcttgcagccatccctccatgcgccgcagacgagaggccactcattttttcggtgacggtgcacagcaacggcaggacgagacagccgaacctcagaagaactgagtccgttaaaggcagcgaaaacggcgagcagcgactcaaatgaaggtggaacagacggcttcaaataacgtttttgaaaaaaaattgtggcagaatttcaaagaggccgataaaaaaagtcagttcgacgagctgtggatttgagcgttgtgtgtgtctccggcaggagaacattaacaagcagatacgcgcggcgagaagaaatgacaactctgcttatctgagacctctgtagtctacaaacaacagggaatcttagcaaaactggggcaaaattttccgtcaaagcgcgggtcgtacttccccgattcgcagtacaacgggttcgcgacgggtgaagaggatgcagaggatgcgctcaaatcggcttttttatgcgtcgccttgaaaagtagagggccctcaatctggtcggcagtgcactaaagatgggaagaaaccgcccgcgtccctgaaagagttgtggcagggaaacagcggaaagcaaaagcagcactaggcggatgaggcgtagagacacacagcacaagaagagtgggagaccactgctgtgcgcctactgttcgtgatcgtcaactgggatggacttgatccgctgaaactgttgctgtacctcctgacggcctttcagcttttttctttgtcaattttctttttttctggagtaaaagatcagcggagtattgccggccgagggacgcagaaagccgacggcgggccgcgattgctttccggggttgaaggacgctgcgggacagaacagaaagggtcgacactgtttttccccttgtgcctgaaaagcaggaaaggcacggaaacgtgttcactttctgagccatcaagcggttactagtctgtcgacccctttgctgtgtttctctcctccgtctcttgtctctcctgccgccgcgccgttcggactcccggcaacactcagtatgtgctgaccgagggaagaacgtttcttggggcgttttcgttctgtttcctggttcttcgtgtctgcatctgttttctttgggaacggaccaggcggcggtccgaaaaggaggtggagtcgagcactttgtctcgcaattcccctccccccctccaatccgtccgcgttttttgcagcccatttttgtcctcgtttccgttttctatttttcatcgcacgtgttgtttcctgttccacgttatcgctcttaggtggctctgtccgtctacgcctatcgcagacagtcaaga

SEQ ID NO: 1292 - DNA, 1807 bp, Toxoplasma gondii
  source 1..1807: mol_type = genomic DNA
cttttgtctctgtcgaagcagtggcattcttttctgtgtctgtctgttgcctgttctgtcagtgcatgcattttgcttcctccctatgtttgtcctttctcacctctgttcaaaagaatggggagcttccgaaacgtcgactagacagatgggagaaaatgtgggtgtggatgtctcttggggggcgccaccatcctgtgctaaatctcttccttttctgtctccttagtgtgtctgtctttcccccttcttgtccttttctctgcttttctttttcctgtctctcgtctttcttcatccccctccttgtcctctccaccctctccgtcatccgccggctgtctctgttggctattctccgcaggtacttcttctttccttcctcctgcgtctcccttttcgcgctcgtctcgattctctttctccccacttgctgattccctttcttctctcttcaacgttctctttcttctctcttctttctcccttctttttcgcgttcgtttctcccttctgtttcgtcgcttccgcgtagaagacctcagcagactgcgtgtctgcagaagcaccgtcgagaaacgtttccttttccgagagggaagcaagctgaaggcaggtttccgtgtgaagaggcgaagaacctggacagaactatcaaaagtttttgcgcagcaaaagctcttgaagaaactttctcccaagcgcatgacactctcctgcacaccgttgattcgcggcgatccttcagatggaggaacttcgcctccgttgcgatatcgaggggcgattcaaaaggcagcaaaccccgaaaagaagaaggagcaggtgggacgagaaagagacaatttgcgaaagaaacgccggagaaagggtgatacgttacacagcgatgtcttgcacggtgtgccgcgagcacacggggatctcaaacagagaaaaaaagtggaatgacgtgggcagaaagccgcgccttttagtttttgcaaacatgggagaagaagtgtcaaattttctcctggcttttcagaacaggaaagaaatgcggagcggcgtgtgctgccgagtttgcatgcaacgctcccggtcaagacacacaccgtggagagagcttgccgtgctcggaaaacgaaggaacgcgatccatttgcgaggcgaaaatggagacaacgacaagggagaattcatgtttttcgtggaacaaacaactgcctccggctatttgtttagccgtggcgagacttagaaaacggagtcaagagaaggaactgctttttcgtggaaaaccttttcttttgcttgtgcatgctctaaaaatggatgaagaacctctttcgtcatctagagaaagacagagagactttaagaggcgcgtttcgtccaagttgcggtttctcgctcagaacaccagcaatgtgaaatatcctcagtgcggcagcacagtgaactcctacacttttagcgctcgacagcgggctccacagccgagcacacgcaaggaaagcggaacagtggacgcttcctcgcaggcgctctcttcttttccttcttttctctgttcgcctcaaaggcaaagaaacgcccagcaggcctcaagagacgaggctctgaaaaggattgcaacgacatgagtcttgccggcaacagcggcgcggtggcgtcaacagagctcgagggaaagctgagaggtaaacgaacaagagaggtgagagagagcagacggggacctagttcttcagctgattctttttctgtgtcgcttccgaatgagtttttcttcgcatctgctcgttgtctgctgcgtgcaaga

SEQ ID NO: 1293 - DNA, 4026 bp, Toxoplasma gondii
  source 1..4026: mol_type = genomic DNA
agcagatatggatatgccctccagatatgtaacagtaatgtgatcccgcttgtgaagacccagtggtttgtggaatgcgcatcggttttgtcgcgcaggggcaatgacctgcttaactgcctttgactatttttcaattcattcttctgtcattctcccggggcaatcaaagtaggattgtattgtcgatgcgggtggggatagtgaacacctcgttttggataacaggaggggaacaatggtgattgtgtgtggtaccgggcgtttcaaggtccagtgactgaaaaagctgataccagagaattcaattcagcaggcgtatatggaaatacgacgtatttcctattctctcagcgcagttatacgctgatgcgggtagttattcgagaatagaaaagcaaacgaagtggccccaactccgcgatgttctagctggtgaaacacatttgcggcagtgaaacgacgtggaaagtggacaaccatttagaagaggggagtactaaccgcataggtcgtgtcagtagcattgcctttcggcgttgtatggtgttgatatttccagctgcgaagcgctgattccaaagtatgtgttctgagcgcgcacacctgctagagagtgcgctaatgtccctctggacgcccccggaggctccaccgctagttaggcagcacagtacaaagggtcaagtttgacggtgtccgttgacaaagaagcaccacaggtatacaggtgtgttagaattaggaaacgcttcgctcttttgcgctgttttatggcgggttcgagtatatcgttgaagaaacacgtgacgccgcgagcggggcgcgcagaccccggtacaattttgatctccatttcaatcgcaggaaacgcacgttgtcgccccggagctcgcttgccaatggtgaccgatcgaactttagcttttcacaaatcacgcctcgaaggttgcacggcatacctgagcgacggtctcacatttttgcctgttgccgcttccgactcctctttgctcgtatgcgcttcagtactctgtatgcaatcggcaatgcgggtaattggagacttcggcctgagttactatcacgtgaacttcaagggttgcgtctcacttgtccacatgccgattttcctgtttcctcgttgcttccatcgaggtttggcatccgtacagaatctccctgatagatctcagatttggattctgtgtgtctgcatatctgtgaccttctgagggccgtctggtcccattcaggagaggtggctttgtgccgcaagttcagacacattcgcgtctgtctcttctccggggatttttcttgaaggaatacattggcgctgctctaggttagtggaaatatgattcgaaatttgcgctgagaagtttggaaacttcgcagtcatcctaccaagcgaaatcccaggttcttcttcggcatacggccagcagcgttactcgacgttagttcagttgcatcactgtggagctgtgggttgaaagcgcaagccgaactagtgttgctcgctagacaagacagaactgaagtggacgtcataccgcaaaattttcgcgttgttctgcttcctcgattactctcgcggagatgagaatgcttatactatcaccgttagccttgttgtagccatagcgttatccatttgagtgagagaagcggtccgcctcacatgcacttgcgaaggctggcctcttccgccagaagcaacgttcttcacctgcactcgtagagttaaaaggtacatcaacagcgatcggttcaaaaagcacgtcaaccacgtactgatcgtagtctttcccgtaaaagagcttgcctgccgcacacaccatatgttagcccatacgcgttatgtgcgccacacacactgtatcactcttttaaccccaggttcaactgccgaaaagcacatttaacctggtgttccttctccaaagctttttcgtcaagttgtagagttttgagagagacgtctgctcttttctgctcgacctcagttatctcgtgttgcagcttcgacaggtctgcatagcgtgggtagcttcgcaggcaaaaaatcacgtagcaataaacgcctacgtgttcggactatttcccaccgttcctccatcgccttttctgcctgtatttcctggattcttttttccatctcttggagaagacactccaactcgaacataattttcaggttgccccatctgcccatacactcatgcaatgcgcattccatgtccgggcgcgttggcgcaaaagccgcatcatcatggagctcgatcgtttccgccatagcaaggaagaaatcagataagttgtgaaatgcttgtcgaactttgatctagctggttctccgcgaaatgtactgaggcgttgtactttgtgggtgagtaaatccgcaacacatcgaattcaaactcttgttcagcagccgcggcgccaacggtgccagctcctgtgtacagacggcgtaagcgttgagttgacatcatggcaacaaacgcttccagggggccatgctcaagtgcagcagaaacggtctctttttcgaggtgacgtttttgcctctatcgcttgtaccacactgatactcttgcgcgtcgccggtgctccgaaagaatgcctcgaccgactacccaacgatttttcatgttcctcgaccttatcgtgtactggtgcaagcatatacaacggctttgaggaaaaactcacattactctttccttacttcgaagtgactatatgagacatcactgctgtccactgtagtgcaaccccaaacggcgggttgccatcagctacacagatcgttcgttctttcgcttcagagctctgttgatacgttcccttcatctcattcctgtgtgcaccaccacctgacgtgccggaagcacgtagtcacgacattacaggcttccaccaaacggcatttgttgttcccgctgtgtaccacacgacaccggtctcaactccacgtcctggtgtccgaaacatcgcaaaagacggcaaatgcctccaacgggctttcgtcgtctggtgggaaccggaatctaccacacagaactctagaagttcatgccaaccccatccgtttccgcactaaccgaaatttctggttctctacacgttgcaataaaaagtacgtttcaaagtaactaaatgccagttgctgcaaagtgcccccctacatactcttcatacttcagtgatgcaatctatgtctgatgaacaccagtaattttacagcctgtaactctatgtggcggagtcttgggcgcatgtaccgcggcattcgtgctgactgccgcaacatcgcatatgaaaaaaacaatgcaaccccccctttcccacccccaccaggttttgggacgcactcaaacatgttacatgaaaaatcctggccttgcctccctgttcacggactggtgaaaaaactgtacaagttgctaacaaattccaagctgtgagaaactgatgctgctatatagaaggggaatttctgtctctcagccctgccaccaaacgacgttacatgtaacacgagacaaggtatccagccagtacttcaagatggaaccagtttccttaagccgccactacaactaagcaggatcaggctgccaccatccgcttgttccggcaagaaaggtgccgaaatgatgatacagtacgccatgcagcaatcatcgagacaggatttgggacgcatgactccctcaggtggttagcggagaaacctcagatccctcggcgcgcgacgcgtgccagagcgcgggacggggtggcaacgagacacgtttggataaaggtcctgccaggttgtggaatcagacgtgtgggctgttccgtgtcggtttggtttgtgcagagacgcactgacggttgacgtcgatcggcactcgatcctaccgtcagtcaattttattttggtttttgcagatatcatcgcgcgtgtgttcactctaactgtgtgtatggttcactgttttttattgcgattttcgtgaagtaacaaaa

SEQ ID NO: 1294 - DNA, 2994 bp, Toxoplasma gondii
  source 1..2994: mol_type = genomic DNA
gtggtagagaacccaaacagcttgaccaggagctgcgacagggatgtctgtcgaggccttccacgggcacagagaagaagacgcagaagcagactgcagcggagagagagcaggaaccgaagaatttttggagagacgcccggattccgctggagagaggcgcgctgaagaggagacgaaggcgggagggaagactggatacggcgaccgaggaggaggggcagggaaggaagcagctggaacgagtgtttgacctgagcgcagagcggagcggtcgacgcacacagtcaaaaggatttgcggatcagggagttgaaggcgcaaacatgcacttggttcttcttcgaggtctgaacgcgaaacgcgtccaccgctcgctcgacagaaaaagcgtcgcccacaaagcagaatgcaggtgcgcgccgagggaatcggcatcgcttttgcgcctgcgtagacacgcgtcattcaaaaggcgcagagtcaggaaaatgcccgaaggcagcgcaacctggactgcaagtgtcaatggagatgtgaagtgtctgtacagcgcctgcggagagagggtggagaagcgggggaggatccagacagaaggagaagacagacggcgactcctctgcctgtgcttgggtgaaagaggtcgtgagagctcgccagatgcatccttctatccgtacaccgtagagagggttggagtcattgcacagggacgctgtgtaagatctcctgagaaacagttgcaggcttttccctacaacacttggtcgaagagatgccgaaacaattctggtgggcaatgaagacacttacctgtgtgggggttgatcagaacgaggaggggctggagggcgtcgctgctcccttcgtcctccatggtgttatttgcgtctccttgtgccagccaaggcgagagttccacgacctgaaaaggtactggtcaccagttcaagagcaaataatgtgtgttcacggaagaaatgggcagagataaacgcaacgcgggtggaaaaagggaggagggcggagaagacggtgtgcgacagaccgcgcgacagacggtgaagaacggcgcgaaatacgcgtggagaggtgacgcaggagacaagaaggacacagggaaactgagagagggaaaggacagaataatcgagacgaaaaaagtgacagagaagcaaagagagacaaaaagagagacagtttgtcctgtgagaaaagacggagcaagctgccatccagttgcatgcgcagcgataatggagacacaaggatggcagactcgatgagcgagtctacggtgcttctctgaccatgtagaagtgaaaaccgagggagacacgcaaaaagaaagggtgaaaaagggcgtagccagagggaaacgccacacttcaggagaacggagaacatggaacctgctaatgtgcaatatgagcacgaacgaacacaggaaactggtcttggcgcccaccaaagtggctgggaggccgcgggcggccactgcgaagaatcacgagaagagcaagtgtgcaagaaactatacagtgctagcagcgatttaaatatatcagttttctccccctttctttccggacctcttaatcctcacttttctgacttttcgtccgatgtctcacccccctcccatttgccgcattcgctggctagcactctgccgttgatgtttgccgccgcgcacgcatccgggggatgggacgaagaagagacaaaagtaaatcaccaaaagagatgcagagtcgggtttcagtgagcaaaaagaccatctggggaaggaaactctatcgaaagggttctacggcacctcagtttgcggttttagaagtgcagagtaccgtggaatccacgggatcgacatacacactaactcgaagagctcttgggtcgcttggatgtctttcggccgcatgtaacacaggttatgtgaagtcggtggatccgatagtctctcgctctaggcaacgcctcgtctggcgtcgacaaagcaagagcaacgccccgaagctagttggagacacacaggtcgcaagtgctgcgtgagtggaaacggaaaatccagaaaactgtgggcgacagagagcgtgtgacccgaagaaagcactagttgcagcgagagtgagacgtctgggcaacaaatggtgggcgatgaatcgtggaacctccacgctctcgatagagctggttttgcctacagcccgggcaaagtccccaaggcgtggcatgtgtccggtggtaaattcacgaagatatctgatttcccttcctgattcacaaaacggctctggggtgaaatttccggttgagccgccatattgggatcggtgtcacatgcacttaccgccgtgtaccgcatactcttgtcggcaacgtccgctaaattgggtctgccgatctggccgtctcgctaggttggtgtgtggtaacaacctgcctttcgaggccgctgttcacgacaatcagtttcgtcacaagaacgatggaagctactgggcgctgcagaccaacgtaatgttcataggtcttctagtgtctagcttttcatcaacctgtgtgcacatttatagcccacgcttgcctgtgaaacagtagtgaggagaatttgcgcactcctttgatgtgtactttcgaacaccctttgcgctagctgtttgtgagctagctggtgtaccccaaaatcgtctgattgtgaccgcgtgtgctgaacaacaaaaaaaacagtttcacattcagcgaggtgcagacgctgcataacgatctagaaagttctactttatagctgtccatgcggtacagattcgtttgcaatgacacttttggtttataaggcgccgggaactatttccgcagatagaaagcatgcattttcggtcttcgtccgaccgactgcacactcgaaatcgtcagtgcgacgatgacactgctggcacacgcctcgactaccttttttttactacgttgattgcgacgcacccgtca

SEQ ID NO: 1295 - DNA, 3498 bp, Toxoplasma gondii
  source 1..3498: mol_type = genomic DNA
acagagatgcagaagcgaaggaagcgagagagaaacgcgtgaaaaaagtcggaaaatgaaggtcgaagcgcagacatggatctttcggggcggccgccacgtttgacgggtttctgtgtttcgtctttgaaagacacaaaagtgggttggggtgaaccgcgcgtttcggcttttcgtaatttggcttcttggacgttttttttttctagaggtcagaagctccgctgcgtcccctgatgaagccttttgttgatcccaatattgccttcccgtttgtgtggggaaattgtcaacctcttgcgattccatgtacaccccagcctaccgtttttcactgcgtttgtcaccacaatctcgtcgagaaaacgagacatttgaatcgaatatcatgcgagcagaaacgacgctgcaataggcaggaaagcgaaacgcttgcctgaaaagcaaagcgagagaagcaacaggctgccggtaaacgtgaaggcaaatccgcgcgctgcgtcgcgacgcttgtggcagtgacggcactcacaaaaagacagatatctgtgataagcagtcagacgcagccacagagagcttctgttttagaaaatttgaaaaatcacacattctgtacaaggttcgctcgttcttttctgctggacggcaacgatccacctagtttgtcgccgtaacgagggtggtctgttcagctctcggttactatcctatctatatgtatatatacattctttaatggagcagattctatcgtgactgtacagggagagatggtaagaaggcgtcgatagaagaagttaagggaggaaacatcactgtcgcttgctgtagacggaagggtccacgctagcgggaccgtgatagagcgttcctgtaaaaaagttttggtataagacactgaaactcctgatgggcctatccgcgggtcgcatcgctcgacagggtctcaagagattgatttccaattgtgagtggtttttcaaaaacaaaagtcaagtgtcgcggctcctctaatttgtacaacactcgggcgactcttgcaacaccttcagatagaagcaccgcgaggccttacgacgcctcttactttgaaccaagtggttttgacggcttttcaattgccagatcaggtggtaacacacaaaatcccgttttcttgtttcagtttaaccattcggtgcacggcgtcaagctgcggactcgttctgttacgtgccaacgacgcttccgctaggtgcaacagtgaaccaaaaactgcattccttcgtttctagagatgcagaatgaattctagcgttgccaactgctttgcagtgagagtagactcattctacttcctgcccactgcctcgcctcctgtgtcgacattcaccatatgacagcgggggcgtcgtgtacagcagtcatacagaacttggtgttctgtatcacatagatgggatcatccttagtatcctaggtgcgacggtgtgcgtctttcctcttttccttcgattagagttatccagtcctgaagcgcagatcagctgcacagaagcaacatctactgcaatgcgacaattacaatacagcatcccaggtcctccagtgtcctggtttattcgatttgagttctactcgatttaagttacaccgtcctggacagtagataatctgtacagaaacaatatgtagtaattacagtacagagtctataatgtggccattaccatttacggtcttgctgtcatgtttatgttctttgtgtcggctttgcccaggggatatcgctcacgtttcgacttctgcacacgtggggatgtgcgatcccctctgcagactgtagcgagaaatgcgcgacggcggcggggtggaacacgcaggccaaaactgtgcatcagtgaacttgcttttcctctttgctcttaagttctccccttcctgtgtgcgcaggtcccgttcatgctttgtagctctgcacccgaccgtgggcgaccgagacacgcgagagcgggtctccgccctctacgcgtgtttctcgatttcgttccgcttttctgcagcttcatttcacgagtttgagtgttcacgacaaacgctcaagtctattgccttcatgggaaccgggaaagggcaaagaatctacgcagtttcgccggttcagtactgagtgggccaagcaacggggagcttctttggcgccggctacgcgacacgcccgcgagcaaaaaacggagaaacgtgctacgtatcctcgcccacttaagcgaagaacatgccgctgtccggccaccatcgtttcgcgcgaaaaactccaactgaagagcgcgacaaaccttagctggaccgcggagaaccaccgaaccccctgattctcatctcggcgcggtgtacgtacaccgcagctgcgcctccccggttcgctgtccgggtttagaggccgagtcgtgtgcggcttaccgtatacggattttcttttcttccgtgcagacattcgtttttgtctttccgttgcgttgctgcattctccctcttcgctctggttattcgatccccgattttcgctgcgaaactcgttggtttatcgctcctgcgtccgctcccgttcgctggcgctagatggccacccctcgcgtttggcattgactctgcaagggaggttgagccagtttttgactctactcttctctgctttctgttttttcctccggaggaagccaactagcggagactttgcggggaattctctttgcggcgttgttggaagttcgtgcgcgctccagcactggcggtgagctggtttgtcgcttctgcgcgcatgcgccaggattcttctacagcggcgagaacccgcaacgactgctgtgcttttaccggagttaaacacgcagttgtcttacttcgcaccccctcccgatctcggttcttttcatttcgttccgtgaattcgcttccccccttgcagctcccgttccccgcctcctcgccggcgccgctgtgtagctccgctgcaccgcgcccgcttttctggtcattttctctcttcgtctattgcggcgtcttcactgttcgtctccgtcagggcgtttgtcctcgaggctgtcgacaacctgcgcttgtatcagggaaggggggcagagaaactcagaggaaagacccatttttcgacccgctgtcgtctcccgttggctgccacgctccttttctctacttcaagctcccaagttctactaagactcggttctcgtggcttgtcgtgaccttgcagtctctccgtcttgtttgtttctgtcttgcctgtgttccgtcaaagtcgtgtttttcccgaaccccctctcctctgccacttccgcgttcaagcatttacctctcgcctgcttctcaaactcgctgtaaccctgtgcgcttcgacctgggtgggtctcgttgcctccaacgagagtttcaggtctcattctttctttcaccctcgcctctcgtgtctcctaagcgacgtcccctactccccagtcacca

SEQ ID NO: 1296 - DNA, 2653 bp, Toxoplasma gondii
  source 1..2653: mol_type = genomic DNA
cagtatacggatacagacaagccgtttccctgtcgccaaacttacatttggggggttcttgctaaggataaaatttttgtagaagaaatgcccggaaaagactcctacgaatgcggagccgacgactgccatccacttcggtccgttcagggcgtacttgacaggcattaacctgctgtggaaaaccgcgcctgttcctgcaggctgcaggtacggacaccacatatgaaggacggcccgaaggtttcaatgaaaaagtgcccagatgaaaaaaattgaaggcagacacaggcgatgcgcgaaaggtgttcagtcgaaaacggagagcgacgttatcacgctgtattccacacacagtcgccccgtgttggaaggcgcaaacgagagcggggacaggtgagaccgagaccggaaagaacgaaaacaggttccagaggcacaaaggtcgggttgcctgttataatctcacgaaggaaaaatggacgtacttgttcgaagatgcgtcagaaggaaaaggtttcaactgtttgcgaaaaactcggaggcaacctgcacacgggggagacgacgacacgaagtgtagcttgccccagttgctgacagacaggtttttaaaaggactcaccgcagttggcaaaggagtggctgcatctagcagacgccttgaaatccgctacagacgaaagaaacacagaatcgcacggaaagaaagattcttttgtcccgcaagtgaaaccggctgtgcatcacccttcgccgaggaaccgcgcaggtgtcactgttcacgcgtgaagtcagccaccgcgcccgccgaggaaaagaagggccgagagacgaaaaactgtcacggaaagggacgacgcagacgagagaacagaagaaagaaaggcatgcagattcggaacacggccaacatcgatggccgtgtgttcaagagtctgaacctacgccgtgcgcaacggaacagagtaccacacatcacactcacggatgcggcagaaacacaggcgaataacagtatcgtgaagaaacagactcaaggaaatatcgaatgcaatcttcagtagaaaaagcacttgtgtgtgtattttctggagaactttgtgcaagtaggaccggccacagacggtgcctgttgtgaacctcaggcattagcaaatcaaaattttttacagaaacacctggaaattgattgcttccgcgtcattcagttctctgtactctaagcagctcgtgttcagacgaaagggattcctcatgcggaaaaacaatacatttctacaaatttgcgtcttgcggatctcttaccgcagccatgtttgccagacggtcatataacgtcgaggtttgttctccgtagcccaggtgtcggtcgaatgacgatgtaagcagcgacacttcgtcaacttccgcgccgaaagaaatctctcggaaagctctggagttttgcttcaagatgactgacggcgcatgcaaacggacaaccgcaagtctcctgctgggctgcttggcctcgcgctcgtttcgtccttccctcttgttcattccgttcaactcctgttccaaggtgcccgcctggtccccctcgcggtcgggttgtcgggttaccctttcgcttttccgggtgctcgcgcggctgcgtttgtctctcgcagaagccgttgcccggcggacccggtgccgaacacagtggttcgccttattttcggaatttcggattgtcgtgcttgtgcgcctcctgtctccgcagggcgacagtcgtcccttcctgtcgcttctgcgtccgcttctccaccttcgtccctcccacgtccgcgtcgtccccaagtaatgttcatggggtaaatgtcccgtcgagaatgcccaaggcgacgaatcatatttttctttcttcgctctcgccacagtcgcttggactacgacgcgccgtcgttccaagcaaactgcagtgtgcgctggtaccactctttcccagtcccgttttcgtttgaccccgtctgtggcaaagcaggacgcctgttctctcgacccaactccgtgcctctctgtcgattgcccttatcgcgggaggtaaagttccgcactccatggcccagtgattgtcgcgtgcatgtcaccgtccataagcattccattgcaccgaatcaagtctcgtcactatcccgatgtttccattttccccgctggaggggcactacacgcattcctcctgcctcattttttgtcccgactaggcactgcttggccacgcgcgtttgtactgaactcgatgtcattgtgtgccgaatgccttcgtaattccactggcggcgccgctatatctagttcgtccgtgtcgcaaatttccacacgcatagtaaacacatgcatgcatccgcttgcatggccttgtcgcggcacggaccatccgaggacactacagtatttgttacagcttctggctttacttctctctatatacataggtgtatacggactttggctcagagatacttcgtcctcgttcgtcggggagatataagtggccgtggttgtgtccaggtcgtgttgtccgttacccatgttgctgtaccagtggtgtttttgcgtggcttgttgtttccgtgcagaggttgcttaccgcctaccaacttttccctaacgtgaagcaaaa

SEQ ID NO: 1297 - DNA, 2776 bp, Toxoplasma gondii
  source 1..2776: mol_type = genomic DNA
cacactgttagtgggacttgatttgccactagatgcttgagcaaaccggggtcctcgaccgctgatgtgccgtggtcaattcgagctgcgtggttgtgcagcaaggcgtcgatgacgttctgggccggaccctcctctcctgggaaaagtgtgaaacacagagcaacaaatacatgtcgcgaactacgcagtttcgtgcaaggcgttagggcgagcgaatggacaaaaactttagcccggaacctcagaatcgcaagtttaatgtgtacaccgccgcggcatgtctccgtgaaacgttctcgtctccatgcagatatgaactggcccaccgacttcctgtttatgacagcgggaatgccagacacgttccctctggtcctgaggcggtgttccatgaaattgctaacctgcgtgtgcaacgcacggaaatcccttctgctttacgagatcgaacaccttgcggaatttgtagttttcatgcccaagttcagacgcggcgagaccgaaaccgtcgaacagcgacatgtacggcgtcacctatgcacgggacaagaaacacttgcatgcagggactgattacacagtcaccgaaacgcagaatacagcagaggggcagcaattgtctgaaggctgctaattggttctgagtgatgccaaaacctacacaccacgtgaccatctggaacttgagcaggagaaaagaaattcgacaggttacgagttaaagtacctctctgcagcttaccatctccacacattccaagtgtttcttcagagggaaactgcggataaaacaaaggatccgccgggatgttacaccccacctcttctccgcctcgagacaagcgtcatacataccctggcaagttaaggaacaatcacagcagcgcaaaatttccaagagcaaatagtcactttaatgtggggtgatgagaaagacactcaagaaagagttcgcaaagcaaactaaaaagccacaccagggagacaacctcgtgtaggagggccacgcgaggcacaccgacatggaggaatggacgcggagaactggtctagcacaggacgagaaaagtgtccgcaagcagatacgttgcagacaacggacagaagtcttctgttccacttacttgaagagcgtcccgtggcggggtttgcctgaatggagactggaagtcgaacagcagctcgatgtgccgcacattctgggctgcggacttctcgaaatagcgtagcacgacgttgtagatgtcttcccgatggcgtagcacggactcgcggtgaaagtacgcagcgaggaacgagttgagatctccgaatgcaatcccgttttcgtcgtcgttgaatgcctcctcgcctgcactgcccattggaacgccgttctttgtggcaatttccttcgcgagagtcgcctcgagggtgccctccatgtgaacatgcagctcaactttcgggatcttgtgcgcgtactcgagcaacaagtcgaccggcacaccgtgcccgcagcagcagcagcaatctgccctccaaagaaagtctacatttgttgtggaagaacggccgttttcgtataccggtgccgacaacctggcggcattcgcgaccccgttcggtgccacagccgcgttcttccaaggggacgactccagagctacgtgcgtcgtcatcgtcgctttcagcgtagtctcctactgagcatcttgcgctctgcgaatttcgcttgaattgacacggaaggtgttcatcgagggacgacgagtgcaggcgtcccggtgcgcgtccagtcaccaggtgaggaaaaacggatgtggaggagggccccagccgcctgaagcgaggctctaaaaagtggcgttgcaacagcaaaccgctacctgggtcacgcagcaggcccgagagcaacgtgaacgcggttgcacgggtgaccatctgcaagttcactcagccggcacatcgccccctggccccccccccccgcgtctgtggtcgggaaaaagctggtttccccaacttcataccttgccacgcggtcggtcctccccacggggggcgacctgctgttcccgcgggaggttagttccttctttgaaaatatgctccagcgtcatcgtttactgctttcagaattgcaaagcactttcgaacgattttacaaggtgtaaagacgggtattctcaaggtggcgcagccagagttcctagcagcttgcgaacgcaccaccacgtggaattgcttccgggagagctatcctgttgcctgcttccgctttgtggccatctttagatttttcatttcttctcagcgctccagtcttttcagtaaaggagagccaatctgtgtgcggccgcgtccgaaaaaatggtcgtcgaattgatttcgcagtaccctttcttgactggctgcactagggatgactacctcgatattgcggtctggaagtccgtagctctcatatgctaactttcctcaaaaagacatattttttgtttgtgctgtgttggcactattgtgtttcttaattatttaggtgtttgttttttcgttacccatcagtggacgcgccggctttgctcgctggcgtggccgtctcccagcttctgcgttgtccaataacaccggtgctgtctatttctgcgctcatttcgcaagaatcgcggagagtttcatctcttttgcccgtatcttgtcgttttcttaagaatcgaagaggctatcttcgctgcgactttagcctttctcggtccgcccttgctgttgaatctcattcgtgttggcatta

SEQ ID NO: 1298 - DNA, 1995 bp, Toxoplasma gondii
  source 1..1995: mol_type = genomic DNA
acaccacgaacgtgaccggacggcttcggagagtgttgtggtggaaggctgcagtcttatggaataataccgtatcgcggcgttgaatcgcgctcaagtgttctttccgtgttcttagagatacagcgctgtcgacatgtagcacgacgggtgtgttttgtgtagttgctttgctcgtgttaactgtctcttctttgcggtttgtgagccccttctccagatccggcactgcgtaccggactgctgcagctgtaacatcccgtgaagtggatgccactgagaactgtgatcgcgcaacacatttcctcctatgtgctcctgaagggctccgtgctgtttgttacctttttcagccgctgccagttcagcaccaacagaagaacataagtggcgtgaggcacgagcccaacacgattgtggaccagacatgtatgctaactaaacatatgttttctctgaagcacatgacattcggtgactctgtcttcaacagagaatgaggcagccactaggagtcaggcaaccccggaccattcgctgtggtgaagcggcagttccatgtgcatatgcgtggagcccagactgaggccgcccctcgaaatatgacagcacggagtcatttgcccagatattttacggacaacaagcgtcactcgaagtagatgcactcctttcacgaacgatatgctatagagcgtgtacctgtgtggactgaaatgtgcacaataacaccgccaggctcctcttcgcagtggtgtatgcatcccttcatgttaaaaaatgtactcgtttcggacgcctgaagcttagagttgctgacaccctgacattgccgcatctttcagtcccctgtacaccaaccaaacaaccaaacctggtgacagtcgctacgcacgacctaatacaggcgcgcaggcctgttcggatgctgcccgaatggaaagtccatcactttattgattcataggcggtcctgagtgattttatcactgaatctgtctcgattgtgacgttctctctctgagttgatgtaaatttaatcactaacaacgagaagtcgtacgtttcgagtgttccgcggttgttcagcacgctttcagggtccacggctccacactgcgtactgggctcctgtcagtcatagttatgtggcatcacttcggtgattcatcggttgtgcttgtacttgccatccgcgcaaaaatcacactcaactatcatccctgatacggagaatcaacagtgggaactcgctctgtcacagcgttgagatctcacgcttcgatgccgtttcgcgtggtcgccagatagggacgaaagaaaaaaaataggcgaaaactgtaggggaaatttaaggtgtcatcgaaacctttaccgtcgattgcgaaacggacaagagatctcctctactttccacacaggacacagtgcatggcttggagccatgagaacctcaagtctgaatttggggttgccagtgcggttcgcccctctgtggagacgggaggagtaagacccgtgccccgcatgcggtttgccaacgcgccacttcactggtgagtgaggcggcgccagaagccacgggttttcgcttcagcgacgactgcaattgaagtggcaccataaagagcttgcgaggatgagcaacctattgtagcaagattatttcgaggcttcaccgttttgggcggaatcagttccacttttctggaagcaggtgttttctcgctagtaagtaccccgccaccgtcacaggctagccgggctggttcccgggaatcgaagaaggaaagccggcgcttctttgccgtggaaccggttcttcgctttatacatgttatagagcaactgtaggaaaacgcacgagttctccggttgtcaaacgtggccatatgacgggctattaaagacatttcgaaacaacgatatcgacacgttcgtcggccagttaggcggttttcaattgagtttgtccgtctctgttgggcgtcatca

SEQ ID NO: 1299 - DNA, 4535 bp, Toxoplasma gondii
  source 1..4535: mol_type = genomic DNA
attcgtttctcatattctcggtctacaccaaagttacgcctgcttcacggcgccgaagattcaccgccacggacatttgattgcaaaatggccaactactatgtttcaattttcatctttttgggttagatgtgccgacattactgtttgtcgaacgcccgaggatgaattacatgtagattaaagatccgatgactttagctggtatctcctatacaggtggtggtccgtcacgtcccccaaaacaagttcgatgacatagacatgcccatggatagaacgagagtgactggctctcaacaaggactcgaggtccactcagcgttgacgagcgccaggtatttctcagcgtttcacgacgccacccaccgcaggggtgtaggaggtgtcttgcaagaagacacagaatgtaaatgtaccggtaaatataaaaagcaatacggactacaccctgttcgcctcactgcaagtgacgaactcaaaagtcactgctggagccccccagtcgacctcttaccgaaggagttcgcggaaggaagcacggacgcattggcgcacagacagttacctcatgagacaaatgagaggacggcaatctgaagggagtgggagtggctgtaggcaaaaacttgtcgcttcgttgtgggaggcgcacccagtcgtatttctctcaggacccaatcaagcgacattatccacagtttattccaaacttgcaacagaccgcgggagcagaggtaatctgagaggtaactccgttcttggaaatcgtcagactttcgcaccctctgtaatgcctgttgagtccttgcaggaaggtgatgccaagagttcctcgccctgcattctgctgtatgcaagggacgccgttgcgcgcgtatctttgcgacaacatgcatgcagatatggatcattcctccaccagttgaaagaacggatgctcccgtatcaatgttctgctgtctaccgcgttagctcgtgcagatcgaggagaagcgtcacaacatccagaagaccttgaaactcttgtataaggaacagacacccctctgaagcgaatcgactccccttcagacttttgagcaacttttttctgtaaactttgtcgtaggcatctcgtgcttcctctggttcctttctgactggtcttttgaatttgaattgacgctcccgatcgcgtaagatatcagacagtgtctcccaaagactaactttccatccacttggaggctgaaacctgttggtcaccgttgaggactcctgtgctctgatgggatcactataatagagacaggggcagagtgcaaggcatttctgtgcctttggggactatggtgaccatatcaatcacgaacgtctgccatgtggactagactacgaagtttcacgtctctgggcacaagttcgatgccatacacgtggtagcccacaagtctttttgaccaggctgcatatcaagaatttcacaccgtcgtcagtgaggggttttgcccaggatttcgacagactgggacccagaagcggcattagtatcacctggaatcctaccagcagttgctcctgtgatctatctctgagcctgccgagttgtggcgtagggagtttgacgctttacggatgcgttgaatcgagcgtgtagtctctgtaggtgagggcaattccatgcgctagaggttggtcttccggtgttctatttaataacatctgagtacacgcctcctgtctctgcaggagacgcagtacgaaacggtcttgtttttccacgtttggggtgctagactccacatttgatacgaaaagcttgcctacgtactccttggcgcagtcaagtttcttatatcttgcacaaggcaaacaacaggggttcctcctgaaccgaggatttgacctacgcggagttgcgctctgttgcctccctcatccatcgcatggcacatggaattaatcggagtcaagtcctgaaaagcttctaaaacgtttcggcttgtgtggctgtccgcctccagtcgcaggggcggacacaaaaacgacatacaaccgctccatcttctcccataagtagctttcctgttccagccctcccgaagcaacttttgtctctcaatccgcgcacaacttcctaccctgctgtgaggtccgaccgttttactgataccgccagatcagtcacctatggaggccgcagccggggagtctcccgcgtacgaacccgttggccacggtttaagtcaacccgcgagcgacgccatagaggagaaaacgttctttctagacgagagcctcccgcatgtggtgtgtgtttgatgctgggtcgggctttgaatctgttttgtccggctttgcatgagtctgggcgaacgataaactctcgactacaactgtttcccgagcggagagtgtaagaactcgccggagcgagagggagatgcacaaaaaattctcctgtccttgtttctgggaccgcctgcaggctagaccgctccagaagtgcgatttgttttggtgcacgcgatctgaaagccctagcgacggcgaccaccaaaactggtgccatccctgggcgcatgacgcacatcgcatccattgttgttgagcactgcacggaaagaccgctgcatggtttcctggggatgctgtgttcctatcgtgaccgtcaccattcaattttctgcggaggcaagactttgggatgcacagcgggacaaaatccacactgtaacctgacagtggccaaggctgatcgatccacagaagctagtcgataacaaaaagagacatcgccgcgttccggttttttcagatgacatcagatccgaggttgaacgcgctacggctgtttacacgttagcctttcggaccctgcgacgaacaacgtgtcatcgctgaaaaggctccgctaactggcaagcgaatacagtacaagacatggtaccgatccagcctgtgaggcgtttgcatggcctggcacggtgtcggtcagtgacgaagaacgtacgcgactctctaatcattgtctgccctgttacctcgcccaaaatatgcaactggctgcttctgcggcatcggcgaacaggatgtcctcgtgcaaattggtgtcaaacgggcggagtgaaactgccaagctagttatgtggtctgcgtgaaacctaggtagatcggtaatctaaagacggcacagcacgcccccccatcagaaaggcccaacacttcaccctggccgtttctgatgcgtggctgtggcgcgttatattcatgacttcgttccttgcaaccgcctgccaaaaacaccaccctgactaacgcagacctccaaaagggtccgacaatgcgtagatcggggcgacgaatctattccccggtgccgtatcgaaagcggaagtaccctttgtaacgaatagccgcgtctcttactccctgcccaaatagttttaggcggtcgtttctttgaacgagatatgccacgtaaagacaacgaaacggtgtgtgcggggtcgcagctcaattttgtcgggatacccacaactgcagagaacagtgggtttcggcagatttggaggacgtggatggtgactcggatgaggtgttcagccatgacgaacgagaccaattcacacaagtctgaaacccgcggattttcggcagacaagaacaatcgcgcggacccagggaagggcactccgcgaccacagtgcccactttcgagccagggatttaaaaatcttcggaacctctgggttgctgtcttagaactgacgtaagaaactacagtttgggcaatcagcagatccagaccggtctctttgtggaagcgaaagcgattcgctcgccggtagttgcagcgtatgtgtccttatctcttcctgttgtggcgacgaccgaggcaacacagtggtgcagcatattaatgtcttcgagaaatactctttgtgatgaaaagacgagcctcgactccagtggtacacgactcctgcgatatgtcactttctatgctcgagtttgccggctgctgaggtgcggaacgcacccaggaactaactccccattacacatgccccgagaggccccagtcactactttcgagatgttgcttaggccgagctggcgaagcagcgctggtgcctaagctgtatttctatcgaacattggcttttcattttctctacgctgtttcacgtggattgcggcaccgcgtagcgccgcagttccccgatcttctcgaccttctcatgatgaccatgcgcgggcaaaaagctaacgtgaccagcaccgccccgaccagagaccgccggggcccgaccttctgcgaaccgtcaccactatccatgtcgccttctttgcgcggtggtcgcttcattttgaatgcatgtgcttttcagacttcttcgccttctgatggacctgaaatggttagaaagacggcaacaacgaatcccaatgaggtgtgatttgctgcctcgaccgggcaaccgcgcggcagccactgaggaaggcctgaagaggccgagcaactactttctgttgcgaatgttttaaca

SEQ ID NO: 1300 - DNA, 4787 bp, Toxoplasma gondii
  source 1..4787: mol_type = genomic DNA
gataggcaaatctcagcagctttcctaacggagtaacattgggaaggagactagcaaagtcagaacctcgagatttgtgcggactgcctacaaacgttggttttccaaaactacgtgtgttgccactgcacttaatacacttgtccttcacacagaggagaaggcgaacaaaggaaccactgcaaggagttccaagaagacattacagaatgaccctttcgacttactcaaaagtcacagaggccttgcagaacagtgtggtgcgggtctgtgagacgattatgtatcttaccagtctaggtgtgcagcattttcctacgttccttatcaccgcagctatccatctaaattgttcttggattttgccgtgttctaggtgatttgttgcttaccaataacgaaagcagcgatgcaagaatgattgcgagttacaaagtactttccgcccaggcgaagatcccatttatctctgatgcagagagaagaacacagaaggcaagcctgcatgagtggccgcgacaagcagccaaacaacgccgtcacgaatgcgcattcacaacagcatcggacttctctctgcatctcgttcttcctttcgccgttcgttttcacccatgggtttcttggagcagaaccgtgtcagcaagcaagtgcgacgagagagtaattcagcatgattgctgagttcttttcgctctgtttctgatgccttcgcctctgtctttcgtggctcttgtcttgcgtctgttctgctcagccgacttctctcacctttcgtccagctgggaaaagccgcaggcgatcagcctctgttgaactgcgagaactgagtggtagggcgaacctgtctcattcacaaaagagaggaagttcgccccgtaccttctgccgccctctaggagtgcagcggcgactgcactgctcgtgcctagcatgttggtgagctgccggagaacagagaaaaaggagaaacactgaagaacccgaatacagcgaaacaggaggagtaaccgaagagggaagaaaaatggcggcgtacactggagagaaaaacacacgacagaagacacctcagaaaaagatagcacggagaaacggggctcgcgtgcacgcagtaatgcgttatgtgcgtgtgtagaaaaggtatccgcggttgaaaagcgaggatcgggttagtgtccaagtaaatgcttcacaaccacgctatcgcctggggacttgccgtgtcacagagatggcagctgcgaggtcttccgcacagcactaaacaggatttgcatgcgcacacgactacacagtcaaaatgaaccgaccggagacagcgatgtctgttgcaaaaacctcgttttgtttcattcgcgtgcagctgaacacagttgcctttgccgactcaccagatcgagttctgtgccagtctgcatttgcatgcggaaaccaaagccaagcacgcagtgaggttcgcgtcagtgaactgttgaacgccattccataactgcgcagaaatgcgcacttcgtccgaaagataaagccttcagtcctacaaatccaatctctgatacccctcctggaacagatggacgaataagcgtttccgtcactaccatttcggatcacaacgagtatgttgctacagcccgaaaaacgacggacagcatgccgagggatgcacttgtttgtgcaagcgaagaccttctcaagttttgttttcggtgtcgcttgtccttgcacacacaaggtattctcttccccgtatgtgacactcggaactggaaaattcgctagccctcggtggaacacactacacagcctcacaagcgtaggtcgggagcggttaagtcccgttggctaggagaggagccttttcctgtttctgagaagagatgcaccctattacgtggtgaatttcatgtaatgtaacatcgatagtggactgtagtcagttgtctgtcgcgctacattggaaagtgcaccgctttatgacaggcacgctggaacgagaccttaggcggcggtaccacttctgttgttttgaggaccggttgtacagacttcttttctttttccaagttgacggaagaaatgaagacgaagcttgcagcgcacccggttctttcgctgcgacgccccgaaacgctgcaataaatgcccggtgctatcctttgcagaagcaagtacgggtactgtggactgactgaacacaagctgcacggggaaccatttgtaaaggttgattgaaatccatgagctcagtgttcttcgtattctgataacaaaacgacctgccgtcttttctggggggacatttggcggagaaaaacacaaccaaggcttaactcttgttcaagagtcagagggagtgtcgactgcccccgaaaaagtggggtttggtcctgccccgtagaagccactttgctgttggtagagaattcggcaaaactgttcaagaaaaaaactctgcttagttctggatcagaaaatctgtcgttttctaaattcccacgctggatcagccgtctcttcggactttgggaaccatgcaaagtcacgttgtcatggaaatcatcgtggaaacggagaactcgttgcccacaagttgccagtgcgaatgtttttcaacagacacctaaggtgccgggaatatacttggaagctttccacgcttagtcgtcgaatccctctgacactgttcagggttttgagctggcaaggcaagggccagccccgtagattcggtgctggtatttagtcagtcataagtgagaaggaaggctgacagtccagtgcttggtccgagatcagaagagacccggaagcagtatttctggcaggtttgcggccactgacggaccgactggcgtaaaatccctccgtccacttcggtcgctaagcagcaacttaaaacaacaggaggcaacctcgcgaatcaggaactctggtccacctacatatctagagaaaattcgacaattcaagaaccagccgtaggccaagaaatagagctctgtggacacatctccttgtcttcccgggaaaaaacaggatatatggcatctaagcaagttggcaaaaatgccttttctgtcgcgggcccgcggagcgacggggctgaccagaaacgttattcaatgaaggcgccctacggtgtctgttcttccttggtagatcgcttgagaaatccttcgtttcaaatgttcatattatcatgtctattgacgggaaaaacagttggaaggtgattgcggtcttcctgtgaggacacgacggcgagctgcaatcacgcaagatgatctggttcgcggtgtctttcgagcaatgtgaccccgtgactcttgtggctcgcgatcagtatccaatacgcaaactcccctgagaatttcagcgaaaaactggtttggattactgaaaagtttcggcgatgctggcgtcgccaagtcttgaatgctggagcgtaaggaaacgtacaactagctttcgggatgcggtaagacgcggcgtatagctgctaggggagttgccacgcggcttcttcgttttcgactcgacgacggcgctgattccgtatctttttagggttctgaaaaacaaccgctttcttctcacaatcgatcttcctttttccactctctttcgctcgaagcgcttctttttttggtctgctgcttgccccgcccacgtttctcgacagctcgccaggccggttgccgctgtttgcggcgcttcgctactcaaccaagactgtggtcgaaacgagcggaggccggctctaagatcttgaaaagagaacgctcaacagaaagggatggtgttttgtcttccggctgacactgtgcggctactcttggctcagaaactttttctctggtgggatgaagaacgcacgtttctcccgcagtcttcagtccgtcgctatgtctttcctcagctttccctgagcaaacacttgcctcctgactaggttggcgtagcgtttgacggtttatgagtctcgcgggagagttaggaaaagacgtgttctaactagaccttcgcatccccttaaagcgctggaaaagatcggggaaaaccaaaacgtttttccgttaactcgcggcctttgctgtggccctcgcggtcgcaagacacggcgagctgtgacagcctgtggcggccgaacggcgtgttctttcttcctgccagaggaaacaaacgcgcattcgtcttttccttttttatgaaaaactgtttatttagaatgatctctttctctccgaacgaaagctgattagccacgcgaaaagcacgtgccaggcggttctgccagccaagtcgagcgtctagaaagctaggcgtacgcccgtggtactgttgtgtgagtactttcttatgcatagcagaggaagcgcgtctttgcatacggaaggcccagtgcttccaaacttgtttggtctgccgtgtcagagtcccttctgcgtcttaccacaggtgccgcacgctttcctccgatcgtttttgtcttgtttctcgaccttcccacgccgagagactcaaggagcggcgggtgccctctcccttgcctttgttaggtcctgtccccaacttcacttcttcggttatcaggatcgtcgcttttcctcctctattttgtgtcgactttgggtcgccacttgcagaccgcatcggttccgctactgtctctagaggtttgtccgtcctatcaagtttatcccgtcttctttttcggcgatggcatcgagccagaacctgggtgtgaggctcttgcgcacttgtcgatagaaagaggaagaaaa

SEQ ID NO: 1301 - DNA, 2233 bp, Toxoplasma gondii
  source 1..2233: mol_type = genomic DNA
ttattggatccaacgtctactgggttcgcgtggtttccacgtcaccctgccaggtttcaaaactgagcatgatctccagcagtgttcccacacgttcatctgcaggataacagatatatatatatatatatatatatgtatgtagtaagagagacgtagaattgtaaatatacatttctctacgcatatacaatatagatgtatatataaacatacatttttgaatataaatatattaatgcgttaatatgttgtgttattttgaatgattcagattcatttgcttgaacactacgaaaccttagcttttttgtgggtgaacattttcatcggtgagtagcagtgtagtcggaagaaccccgttgtttgcgtgtcaagttcaatcttactaaagacagagatggggacgcgtcttcttttattccaagaggtcctcatttctcggcgttctttgttcgctcgtcatgaagaggaggcactctggtttccagagaacgaaggccccttgctctctcgcactgcgcgtttcctcaagtgtacactgttcccttctcacgcgattgccatctctcagatcgagcgcaagacattggcctttccgcgaagcactggagtggatgttccacgctttcgatttctctgcacagctttcgggtcttttcgtgtttcgaagtggtgcatgggagagagtcccgtcgagggcgggtgcacagcagaaccgtaaagaacttggttgtctcttatatctcattgcgggtcccctgccgtctcggctcactgggcagaatgtgcgttttgatgtaagttggtcgttgtgaattcctcatgtatcagtcaatctgtcaacaagagggaggtgcagagggagacagaacagcacaaatctaggagagctgcgggtttagggtggacgaaaaactgcctctctaacggtatagagactctagggctgcgcttctctggaaaaaagattcttttccggctttctcttgcgttgacactcacgagtacgtccttggaaatcctctgtttcttcgagactggtacgtgaagggataccacaagaacagtgaagaacgtgaagaccggctagctgttggccggcgaaccctccttcagagaaactgagacaccacttcgtcttatccgttaacatcagtctaatgcccgtcttttccgttgatttgcactgcgaacatcgggctaaagtgtgggggaaaaagcttcattcttggaaggaacgcccgaaaaactgctctgacgtctctcagccgccagagcctcccctctttttccagcgcagctaccggccgctcgagaagcgttttctcgcgctgaagagagggcttgcgttatttcgtcaagtaaagggatttctggattaatctctcttctcgtgcgtgtttccttgtggtttttctctttcgttcgcgaccgctgatgccaactttgtcgtgaatctcctcgaacacctggcagacacagcctgtgcgttgcgagggaaagcagccctcggcttttcccgtgctttggagttggggaaagcgccagaaaagcgcagcgactgtcgttttccactaacccttttgtttctttttctcgcggcaaggactgggagaaagaagccgcgccctctccgacgtttcttcgttttttccgttcctgctggagagaattccgcagaagcaggccccgtcgccttctctcgtttctcgcttgtccttttgtctgttcctgaggaaacacatcgccgaggcgcaattcgcagttctcctacacgcttgcagaacctgcaacttagtatgttccttggcgcaggtacctttcacggcacagccccaagaagtcaaacgccgcgtcttcccgagtcgtacgcgacttcagcgaagccttcctcatcagttttttcctcgcgctgctaatcgcatgtggcaacagcagttgacagacgacccctctccagttcctttcctcgaacttggtgtgtatacttcaatcgacttacatttctagacgctggaccgcaaaactgtgtgaaggtcggggacagccgtcgcagcccgagacattgaggccttgcctttctcccgtttctcacttattttccacccgtttgaacgctggctttgccggctccttgtctctctctctccgccttcctgttccctccacgtctcctctcaggtgcagaagtcccttcgtctcctgcaaggccgtttcctctcctccacaa

SEQ ID NO: 1302 - DNA, 2928 bp, Toxoplasma gondii
  source 1..2928: mol_type = genomic DNA
tcaattatcgacactcaagaacactcaacacgattgttgtggtcatcctgtttctgttgatgcctttatacgaatagtccgctgccatcatgcacactacagaatggtggccggatagattagcacgccgatgtaacttagtgtacacgagttgtcagacgcggttacctttttcaggatttccgtgtctatgtttgtattcatgtttttcgtccttttcggagaggaacttctacgcatatgcattcgcatgaaacccaggagtgagtttgccaagaaacataaagaactcgaatagctaccacagccaatcactaaggcagtgtctgttcgaagccctggttcgatggaaagctgtgggcctttgcggatgtgctgtgaattacgggaagtagttcctacgttgtcggaacggcggattcccagttgccacagaagttgacggaaacagtagctccacaaaacaatcgttgcagccccgagtccggtgtccacgtaggaaatgaactgcggacgcaccagataatatttaagaatagcggagcgcctctgcgttctgatagtcccgggtacgtacgacagcggaataggaccgaagacgtaaagtgagacgctgtatggatgcttctgccgacgctcatgcttgtgcaacgacagttcaagggagaagagcagagggcgtcgcatgaaacgcgtctaacgcccacctctgtgactctcagcgcagttcacatagtcaggatggtccatatagttcggtcgccgtgtccgatgctggttcagccaacccaacaaggtgggacgttgcgtccattacgcatgaccattttcggcttcctcagctagtcacaagaagtacaatcgatcgatagactgagtggcggcagaaacgggcgttttgcggccggtaattcgagtgggaagggcggcgaataactctgtctcatgtcgactaccattttcatagtccaacttgaaaattcggtagaaccgtctggcactgtgtcagtctctctagtaatctcaggttccgctagattgtcgatgtttgacaggagtttccttgaggtgcacactctcatgaaacgcttttcgaactccgaacacgaagaaaactgtcgataccgacgcattgtttgattcatccgttcgaccaaccatgactctgctaacctctaatcgactagacttgcctactctctgatgctgatcccctgcaagtgcccgaacctgattccagcgaagtgtacggaaggcgacccaggatgacacttccaggaaattctatgtagcgttaagagaacacgtcgctcgaggcatacagaaaatcgctttcgtgacagttcctcgaaagtcaacgactcctacatacctccgccaaccatcagctctgttcatatctaccggtacggtgcctctatctgtataccgttacgatggaattgtgtttcagtacacaactggctgtttgtttgacacgttatcttcttttcggttgtcattcgacttgcaccagcaactggctaccctgtttattgtcgcccgacttttttgcggatgccgggctaccgaactttgccgtgatctctgttgcgtctgctctgtacagcagccacaattgaatgttagccccatgctgccgcaacagttttcaggacttctgtacggtgctgctttctcaaacgcgttggattcgtgcacttgtaggatgacctcttaacgaaaacacagatcttgtctctcactgagtcttcagtggaggccttattagtttttccataccttcttccacttgtccttattatctggccagtgtaccgccactcttgtgtattgttgcgtacgttttcatttttcttgtgaccctatgtagtgctgtcgtctgtcccatccggactgaagtcagcgtaaccaacaaaaagatttgttctgccactggttcttcatcaaccaccgtgcttcaactttgtaccgactattgctgtcgcccgtgcggtgcttgtctgtcttgttgtcttcacataaacggaccatcctactgcgagacaagcaggcaacggtgttgcgcgcaagccatagctgacgaggctgctgtttctattcgaatctctctctacagtaacggcaagggcggctatcaaaacaacagaggatggaagtcacgtagacttccgcttttcatcgatcgcactcgttctgtacttctccattcttctcccagttcaacaaccctaagtgggcatgcccccgcgaggcgtttttcgtgtgtcgtcggaactcggtgtcgcataccatttcactgttttgtccttgtctttggtgaatcggtcgctcacttcagtcagaatgtacttctattctcagcatcttgagttgatttgcatcttcaatctgctgaggccgtcatcgttcgtcttttcttgttcttttctacgcagaaatcgatagattttcccggttccctgcgactttaccgagtggtagcgtcactgtctctcgtggccacgttttctgtgcgttgtgtgctgcggtataatccacagaagcaacaattgtatcgacatttctcaagactagattgcgtgtcatcccaggggagattttgtttcctggattctgttcgaaagtgactctgtgcaacttccctgtccggcgtggtgtgcggtatccattcccgcttgtccccaaccggggacaaagctggaagactgtgaaggaaggtgccccaccattgtttcttttgagtgacaaaagcccaaatatcggagtcgtcggtttcagggtggggtcgggttatcaggcggagggaatacaattcctcacgacggtttgcgtcaattgcaagctaagtgagaatgtttttttcttcgcatttggagcacatctcctccgatacgaatcgaatgccggcaaactgaagggccacaa

SEQ ID NO: 1303 - DNA, 3216 bp, Toxoplasma gondii
  source 1..3216: mol_type = genomic DNA
aggttccagaacagggagacacgaatcttccgtatcgtctgtactggctcactggggttgcggcaatcgaggcactgtctcaagaagaggaggggtagagctgtttacacctgtgtgttttgttcaggagagaagaaccagcttgacacggtacgtagattcctctttttaagatcattcttccccgagagaaaccacctaaaaacccgagggtgctgtttggctgtccagacgggtacacggcggcccccgtaactccgagggttcgaaagtcagcacacgcgtgtagaaaagtttaactgcgctggagagacaaacaagagcagaaagagaagaacaccctccgtgaaacagcgtacaccagacgttaagaaacagcgaagaaacaaaagcactacggaggcagtttcaacgaacagctcgtgtggcgcccattcgaaagtgacacggccaagcaatcggcttcgcccacttctcagcggtttccgtgatgggtctggaattacaccagtggcgttgctctattattaggctcaatgttgacgtcagaaaaaggctttgatattgccgcctcattccgatattagctccctgtttctatcggcactaataatactatggcatgctatacccccggaagctactatcttacaccataccgacggattgattccatgcgtatactacaccagcactgttaatgaccaatgcttccaagaaaacaaatccaacaatttccgctgttctgagcagtccagtggggtggcgttgagtgtaatgtgggattctcgttggcataacgctatgccagtagatgcgacgaacgttccttaagaactgaaacagcagattatgattatgtcgtggaacaaaaaaagagtcaattgtacgtcaacactcgataacgtttttgccccatatcggtgacccagtcctcaattcgcctgctcccggctacctagtcgagtactcagacaaaggctctgtcgtcctatcacgcttcgtcagtctgctgaactacaaactcctacatgtctgctcttcgtatcctgtcctaaatagaatgaatatgacaaaccagtgcacaacagcacatctaattaagcatgttaaagaggaaaacaacatgaagtggctgccgttcgtgctccgcgtaactggactgagcaggctctgtcaagttggttcttgccgttgcacatgtgatcaaacaaggatcagatccgaagcgcagcacactcacttattgtgtcgaaatcgagagaggtggcaacgtagggatcctgtcacgatcacagacacagtcatcgtcttgcgcaggtcgaagtataggccattcagcttctgttcccctcacgcctttggcaacgaaacgatagatccaccttgacacacactttcaaagtgcagaatacaaagccacctgtaggcgtggggaagacgtttgcgacagttcgtgtacgaaaagtgtgataacgatgagtgcccaatgacgcttcggtgatctgtcgtgaacggaatttgtttgtgtctcgtattcgaagacagacgtgaacgaggtatgcgtcactaacacctcgcgaagcggtcggctgtgcctggcgcgtgcaccctgaaatgtgcgccgaagtgccgtgtgaaaaagtggctgccaaactctggccccggagccctttgagacgcgagttacggctggcttggctgcagcgtcactcaccctagaacaccgaacaactggagagactgagacagcgacaagcatgtttgtcctgaactgctcatccaccgaccgtttcatgtgctcaaataagtgaagtggcatggtcagtgtgatatccgagcagattacgggcgagggccatcgcgacaacgttgccaagttacataattgaaacagaccagacggacgcagttacttggtgtgggaacagacacatgcgtattccaaacttgtagaaccgataaaaatgttcccggttcaatgcagtggactctagagcggaggacaggtcaactgattcgtgatccaaaacccagatttccgcggtcgcgggggtgacgtcgtagggcgggttgaggaatacaggcgagctcactgttgcagctcggcggtagatgcttatggttcttgaggaaaattaggagtgagcctgcttacttcgagatttgtgaagtcaggaggctgcggtctagacccgttgtgtgcgcttgcccggatggtacgaaagccaactgagcggaaccggtttgtggacgatctagtggcggcttgcagcgacatgtgatactagtttctctgcatatttcttcatttacagcaaaacgtctacatactatttttcatagtattttcatcgtgaattaaaaatagttcagaatcgtcaacagcggctgctcaccctgctgactttattgtcgcacgcacacggtgtagcacatcaaaatagacttctcaatgttagaaacaatgtcctgtggcgtattttgtggttcagtgatgtggtataaaaatgaattttccacagttgctgccgctgcgaaagattgacctggatgtgtcctgccttcggtacagaggtaaacgactggtgtcctggggaaggccgtcggccagagagcggcgcgaatctcccgtagcctacgaaacgactatatggcacgcaacttttttgcgctctctctttctgcatctaacttgcgtatcgtcagactgactctttgctttgctcgtgtcattttttccctctgattcatggactaaaaccgtcggcgacgaacgccagtaggcgtttggtgccagtgtgcgcatgcaaagaacagacacgcaaaatctgcatctgcagcgactcaagaaggaacgcgttttcagccgctttggtgttgcaacctcgccttctttgttcgctttttctccgtcgcagaccactccccgtccagtttgcgtcaatttgcagcagcccatttttcgcgctaaggccgtgcaccagagtctctttcgaagccccgaagagacgacatcgaggctttctctgtctctctgcagctcaatgtccagaactcctgaagagaaacaggagggaaatgatgttgttgtcattgactcatcccttaacagagggctgtcatgtgttatgcgtggaaggttcttcctcttgaaaacgacatgaaagtgaaggataagctggagaggaagctgaagaggaaaccagcttacga

SEQ ID NO: 1304 - DNA, 4246 bp, Toxoplasma gondii
  source 1..4246: mol_type = genomic DNA
agaagatggaccttaaccttcgtatctcagtgttagtatcgacccagtaagatgctttcgccgttgatcttcttttttgtaccttagctaacgcgtaaagtattccgcctgagtagtacgctcgcaagggtgaaactgttttttaaaataatcaatttccgtggcgtaacgggcgatgtgtacaaggctcgaagaggttttgggtacataaggctattgcatcaagcaaatccaatgcaaaccagcccatactttgaggagcccctccgccaaaggtaattcggtgttcatatgatttttgtgcgcttttctgatctacagcaactcaaaaatatagtcttgcgcatcttgcaccggcagcaggatgccggtggaccgaacggtttggtcgagaaccggcacccttcatctcctgacgctatttccctaataccgctggctacggggggatgtgccttggttgcggcggcttcagcagcttggttgacagttcctctggacaaagtaaagctcaggtatattagatgatcgagcccgacccaataggcgtgtctagacatcgccgttgaaatggccacctgaagccatttgtggaaataattacactgtatgtggcggttggtagcaaacctattactgcagacaactcgtttgtcctcccgttcagggcgggccaaaacaataaacgtggtagggaattaacatgcgtgatatccgaagtcgcaaggctacacctgtggattacccctgattccggcagtcaatagcgattcaatacacgttttggccttttcaggctgcaggtccagcgtggacagatgggcaccgcgagtcgagggacaccgtttctgtatcgcaatacgtttcacgtaagtgcgtcactctgttgcctcttccctgaatcatctgtttgtgaacgggatatagccagaaccgataacgaccccagaaggcttcacagcaaagcgatgttgctccccttgtaactacctcccgatgtacggcctgaactcgtcatttccttttcgagagctaatctactgttgatggtattttaacgagcagccatgacttctcggaagcacctttcagaccatgcgcgcgcgaagcctgacacggtgcgcaaacagcgtttctcgatttattggtacggtgtaaaacctgggctatatccatggcccactttatgctcgttcccagatttcagcgtaatggctacaccgaggagtaagtgaactggtcagtgatgccgctgcgtgtgcgttaccgtctgtgtcctgactatgatatcgtggttggtttgtcccagatggtagtgaaaacctgccggttttgttaggcttttctctctgtgcacatgcgtgcaggggttagcaacagtctacaaggaggagggcaccagaggtcttttcaggggaagcggagctcgtgtcctgtttcacagcgcgaacttcgcactgttgaaggttttgattgaacacttcaagtctgcttacctggaatatgctgaaccggcttctccataaaagtttcggttccgtttgttcttgcctgagaaaaatattgcgacgagcatgtaatacaccagtactgtcgataaaactagcagagagagattaatgaatgacggaaattccaccactgtgactgagttaaagtttttgtgcattcgtcatcttgaactgagttgggctatgtgaactagtaacagctccagttcctcggatggatgcattggctcccgcgggcttagggcatgctggagcatcgatctacgacaacagtaaattctcttattgggttcgtcttttttttccttaacgctgcttccgtcacaacgcaacgcgggacaaatctgcgaaaatgtggggcactccgcagccactgcggcaagcatgttgcattgtaacaaagtacgatcctaatcgttcgcactcagtttcgaagcttccatacaaaaaatcaaggcctcttctttcagagcagcgagtcagaatcttgcatgagaagtgctagctttcagagcttccgctctgccgcacattgctcacccagacgatttctagttcccattccgttctcggagtgacattcgactacgttttgggtcgtgcgacagaggaaaacgaccccatgtggcaaggagcgcggctatgaggcacctgtgaggggatgcggaagctcatggaagccggcccaggcagacagatctctttcggatgctggttcagtggcatagaaatgaccgaagcacattgtaatagcacatgcgccaacggaaacgagatacacagaggaaacggttcctcggacggtgatgtatggcgctgccgggagcatacagacggcattttgtagtcgccgaggctagcaagcatgtaatatgaaaatacactagtcagcaaaaagctatcatctcagggcacgaagtggccaaaaaatgctcacagctccgatcacccactatgtccatagacatgggctctaacactaacaacaatcgattcgttataaaccttcaaaaggggaatggcttgctgacagtcgtctggatgcgtctgtggcatgcgtgtctgttcacgtcagatgttgtaacgtatacaatacacacgcggtgaaatgccactcaccccagctgggtgcagttttgaaaaaggatgactcttcgttagtgatccgcattacgttacacgtcgctcaggagacgcgcccttgaggtggcccttcgtagctgttcgcacttcgtgcctgctgattgattcgatataccaatacatcggcatacctgcgttgctcttcattgcgtacccattcagcctaatgccgttgtggacgagcaagcatatatcatatttgctctgattccgcaattgctacgtcgttcccgcgtaggacgtgccagtactgttcggatgtactagctattgctgcgaattcaatcgctgaacgctggtgttgctgcgtgcaggtcagacccatgcgtgctgcagcgacgccgttttatgtacacaaactgcggcgctggacgagtggtggagcgcaccgaaggatcgtcctgccttttttccgtgttgccgggcaccgctagcgaaagggtatcacacgtaatctggtatttgaaatgagaagaggcaacagaaaaaggcaatactacgagtggcagtgctttcggaggcgctctgtcgtaacccgcctcagccgcgctgcaagcaacagaccccaatgcttcatcgcttgcagacactcccctacccccgccccccatacgtcgctccttgcggcagggtaatctgcattttggcgaaaatcagtaagatgggaccaataaggcgacatacaagttgtttcaactattcttctatcgtttcgtgtcagaagtccacaggacagctgtagagcgacgctggaagattcaattcacactagagtacctgtagcgaggacctcaaaacgtagtcgatttgtgactggcgggagaggctgtcaacggcaccttggaaatcctcatggaatacagatgggccgggttacatgggcgccatcaaaaactatcccgtcgcaaccagttctcattttttgcatctgctgctctcggaatgccatgacggaggtggtgaaggcatcgtgtcactcactttggcactcaaggcggttaatgcctctctttcgcagtgacttgcattcgaagcgtgtgtcgagcttcgcgcctgaactgagaggcaagaatgagtgcagctggtcgaccaacagtacagtttcgtcccccagctttgtataatttcagcaattctgttcactttcgtgcgcgaagagtacctgatcgcttttgtctgggttagactggggcagcgcggcgtatcccctgtctctggactctggactcagggaccacgcgacaaatatgcgacgcggtcaccactgtcctccagcctgtcattcctgggcagtagccgttgctgtcgccccatcagcgtcccagttttgtgcgtagtccttgagttccacctttttcatggtttccgttttgtctggtatgtggaaggcgagtttgttcttagaccgtttcgttcgctgaagtatcgaagcagcagctgacgcagcccacacggatcgctcgctcatggggcgctcgtcgccccccgtcatgcaagtcgatcgagcggagttgcccacgcgtgtttatccatggttgcattttttgtaaatgctgcttaatcgagaggcggtaacacattcagaatagtga

SEQ ID NO: 1305 - DNA, 1839 bp, Toxoplasma gondii
  source 1..1839: mol_type = genomic DNA
catttaatgttaatgtctgccaagacaagttgtcccgcactttcactggctgtttgcgtccacaccaacgaggtctcgttcgcagcagagaacaacgagaaagtatttcgagatgtgtgcgtgaagcgctgcagagatgtagtctcccctgctgagtctttcacgctgctgcgtgatgtgagggaaattgtagacaggcgcacttacgcgcgcaggagaacaggcatgccctacgagtttggacgaaaacacaatttgcatcacatcatttttccaggcgtaagacacactgcttcatcttttactaacaccgcatgtggccttgatgacatccgagagccattcgcacattagatgttgtacacattctgggcttcctctgtgcttttagaccggctgtgtatgtcaccgaatcttcttgattgtactgattttgaagcccatcgggagtagtgtgaactagggcgagtcatccttatcgttcctctttcgcattctatatagccgacttacacttaagcttctgcttgttttttctctggtgtaccgtcggcggattcgactaacttggattcagatgctatccgaaatatcaggtctacaaaacatgacgctgttctggggatgctacttttttcgggtgccaactgctaactaggtactagttttacatccgagctttcgataacacggcagaaatgggtgagcgtgttactgcagggtattcctgtctcaggacacctttttcaggcgaacagatcctggttttctactcaatcttgcagttttcaatttggcgcagtcgagcagtatgaatgtggaatcctgtgacagcccgtccccttaacagaaccccttatttttcactatccccacggaacacccctttttgaggaaatagcagctgtctgatccgcgcggaaaacattacgctggacctggataacggtggcacgggtgtgaactcgatgtgacctacggaactccactttttctactgcagaagctacaatacacggtgttcgtctccaggcggttcccagccacacaacatgcctgagacgtccatgcacaggcatactgcttcttgtggtgaaaagaccgtgatcagctagtgtcactaacacttggggctttggggctcttccgcatcacaacgccggccctgctgccattccttcctcattatctactggcccgttatatcgtgaagttagaagcgcccaacccgtccccgccccccccccaaagcgtcacttgacaatcaaatataccaaacatgtgctacccgtttcctttctgacgcaaacctgctgcgatatctacactcgtatgttcacgtccttcgtcgagcatgctcattttgtggcgcggagccttgttttttctcttcgtctctccaatagtttcgtaccagaactccttctcgaggcatcaatccgactccgtacggcttctctaatcgaaaagtacttaaaaaattacctcggaatccaaattaaaaggaagaattcacgttctgctaatggaacagacagtatcgacacgcgtgtccagttcaatttaaaccgagaagcaagcaagcattttacggaaagcgcttctgcactcgtcctggggatttccttcgtcccgccgcccgtcctgaacgacgaccgtcgacccgcctccacctctcgttcccagccgctcagacggaaaagccttccgctgggtcattgctgacagcagaagtcttttaaaagtacttcctcaccgactgtgtaatgtacacatatccgttcgctttcttctcggtttttaggcgtttttcttgacttgtctcgagagtttacatca

SEQ ID NO: 1306 - DNA, 2469 bp, Toxoplasma gondii
  source 1..2469: mol_type = genomic DNA
cagatattgggtgctcacaagaactgtctggaggcttgtacggtgcgtgagtggaagcgcggctcgaaaggttcggagcagggcgaggcatgcagaccgcgctgttagttttcaacatcttaagtataatcaacttaatttgaaggaatgaacacactttacgtcgtctcgtgtaaagatccagatggacagaaacggcaaggcaaaagtcgagaggggcttcggttgagacggcgcctactttctcgggagacgccttctcgacgagagctttgtagaggggtctgttctcagtaaaatgctggtgggctatcgaaaagcagccgacggtcttcatcatccgatcggtgtctgacaagcgatcgtcgacgctgaagagaggaacgcacacagtcggatgcagaggaagcgccctgaggccggtgcctgcgaaggcgagagggagagacagcctagggacgcagaaggcgtcggcggaagacaccgagagaagaacgaagggagcacgaagggagggagaatgggaaaagacggcgaagcagcgagaaggcgagacggcaggaggcgcaaacaagaagaggaagcgtaggaaaggaaagagaaagacgagagcaaaaaacggagagcgccaacaagagagagccgccttgcagttttttttctgaaggcaccgtcacacaagatcccttctaagcacagagtcgttcttcattcttcttttggccgcatttctctctcgcattctctctctttctctctctcgctgtcaggcttgtcacacacgagtacaggcatgcagggtgttttctcctggcctttgcagagaggatccgcggcagtttgccttctgaacgttcgatgcattcgcgcgaaaggccttaccggtccaggcttctctccagttccgcgtcgaactctgcagtgagagggctatgcctcaggtccgccgtaatccggtcgagcatctcaagctccgcctgcaccacatcggagacagtgacgctcctgtctccagcgtctccgtcgtcgccagtctgtgaggttggttcgggttcctcgacgctggcttccccgaaacgaacaggcgagggcgacgaggcggcggcaggactctcaggtgggtgcgcatacgccgcagccgggaggggagaagaagcagaggggatggggagcagcggcccgatgagaagaagcgcaaccaggcagccgaggagcgaagaaccaagcgagcgcgtttgccggagagaaagagaaaaaaagggagagctgaagagaggagagcacctctgaaagtctcgagaggagggaggatctcggagggagcacggagagatcgagaagaacgaacggcagtggtgtcgagaagaccagctcccgatgctgagaggcgagaaacgcgcaaggagagaagaggagaaacatccaatgtcctttgctttgcctctctcggctcgccggcaccagccgcgagagggagtcggcctgtctcgtctcacggacacaggagacatccttctgacagagacagggagaaaggcagagagaagaagatagagagaagaaggtagagagaagaaggtagagagaagaaggtagagagaagaaggtagagagaagaaggtagagagaagaaggtggagagtagggaacgcggtggaggacagacagacggacaggggaggcaagccacggaggaaaggggagagcactcgagagacagagagacaggtggaagcagggaaggcaggaagccgaagcgaaaagagaagagagaaagaaaccgagggaaacagaagcgacaaaaggtgcacagagatgtcactcatcggtcgcgtcctcgactgaggcgcaagccgccatggcgccggctccttggcaaaaggtccccggagaggacgcagttccgtcgaggcaaaaaacgggcaggccggaaggaaaaaggaaaagaagaaatctccacgaagagaaactggagaggcatggacggccagaacgactgcgagaaaaagctgacgcgagagcaacgccttcggctccttccgtcctgcgaaaaatcggccgaaggtgaccctcagctgcggaggcattcggcgttctttttctccgacacaccacgagttgttttctttgactgcctgtactggaagagcagagaaagcgacgaattgacaagcgtcgcgagagaaggattgaaactgatttccccccgacttctccagagacctggaggtctcagtggtgcacaccaccgcagtctcaaaagaactctcaacattcgcgcgcgagagagaccccccgcagcaacaggcgagaggtcgttttcctcttaaatttgaagctctctgtcatggtgagaatcgccttttccacaacctcgtcagctgacgtctgtgaaccttccctgcactcccccttcttaccctggccggatgatatgatcgactgatcaccgattcttcttattctaga

SEQ ID NO: 1307 - DNA, 4574 bp, Toxoplasma gondii
  source 1..4574: mol_type = genomic DNA
taaagtgtcaacagcagaggtttcgaaacctgccattcacccgatcattatggccccgtgtgctaccagtacgaaactgcgggctgatgcattccgtgtgacagctaacgcagagacgagcgagaagaaaagtactaagaggggaagagactgggtgatcagtggaagcgccaccgtcgatgatctacttggaaacatcaaggtcccacgcaaaggggaaacaatatcgggacgggcgccttcggcagttgtgtagtgctgatgagaaatctttaagccttttgaggcaaactgataaaggcttcttcttcgctgtgaacgcattatgagcttgcttgagttgaccaacaatctgcatgttactactctgacggtgatgaatcagtcaaagacctgtggaagtaccgcagttgcttttggggaagtttcaaggatgtgctcactccgaacagtccgcgccagcaatcataagacatgtattgcgtagcgcagaagggaaaaccgaggttcaaggtaacctgcgttgatgcaaagaaagtcgaccgcaggtgatagcttctatagtttgccttggacggaattaagaagccacagccgcttgcctcagtattgcggttgtcgcctgccctgtctccgaaattctgacactccgcgatcaacgcttgcttgatagggcctgctcaacatgtcagagccggcacgacactcgctcatgttacacgggtttctcccactggacccccgatttccagagccctcttggggaatgcgagaaaagcattttaacttgcacaactgcaattcagggttcattcttggcacagatatcgaaacgtcccctggtgtgcaggtagagtagctgttcgacagattgtactgtttgagtggcgagctgtcgtccacggaaggactgtgggcaaacgtcattgtacagatttcactgttcactattcgccgtgctttgtgtcttgcacggatgtgcaggctcttctcaggttgcgggatatgtcgtgtttccgtaaataacacgatctatggcacatgtggtaaatcttttcacaatgtggcaagattcttgaccgctcagaacatcgaagtggccgttcgttgtgaaatacggttcccggctcacgctcattgactgtacgtacacagaactgaatcgcatcttgcatgcggctccggagcagggtatctctgaagaaaccaactacgggcgccgttgtagtttgttcgtagccttttctcgaaattcattaagatgcaacttcaggcgtacattgctttgggcgttgctttgtgcttcgcctgttactgtcgtgcggagaaacttgggcaaccacaggctgtcgaccagtcagctgtgccccttctccggtccccgttatacgagccgctttctggtgggttcgccgcaacaataaacacatacctacccaaatggacttgaacaatgatcgcttgtttgtaggccttgctgttcaaataaaagtgcttcaagcgaaagttccgcagcttggacagtttatcgatgaaggtacttctgctacaatccagtatggttacgtttccacacttatgtaagtcccgcggacgaagcgttgaataaaagttcttgtgtttacactggtcgatgtcccagtcactggctgtcctcgcacatgaagcacgtgatggcactcatgtctgcccctcccctgggaacaaaggcagccggtaattagatcattagcaacggaagttggaacccctcacagtgcatttctagacctcgcgggcatttttgttgtgatgcgccgtaaactggaacaggtgatgtcgtgatcagcaactgatgacagaaaatagatagttgaatctcgattcggtaagcaggtcattgcaggccttcatgtcctcataaatgtcgaaggagggtcgcgcttgggagaacggccggctcagttacgaactacagccgaaaaagccctacaagctgtgctgcccctccgaacagctctccttgagaatgaaacaggttggacgctattgttcgcgatcatgcaaaagccacaattccgctctgttgcagacataatcaagcataatgcccaggaacttttgccatccaaagcactgtaccagattctggggcaactcgaggaggctcacactcagcctataacaacttctatgagtttcgtagaaactgtcaactccaagcttcaggaggcacgaactgaagtcaagaggaaacttcgcaaggctgtcgagtttctgaaaaccctgaagcactgcgtcgctgctgacgctgttgggtgggagagggcagccgcccttcgttcgtttatgcagacaatgcacttgcataaggtgaccctggagtgtcgttgtttatataaccattgaggcacccgtcttgtttataggttcctgactctcacaccgttgagaactccgcagcgatcactgcgacgaccctggagaagctttcgccggagcccgtttgtaagatgaacccatcgatgtgacccggtggcgtacaagtgaaaaatgcatatcccgcgtgttcacagacgggcaaagcgctccgaccgccacaatgtcatggccgacagtaagacagacttctccgttttctcctcagagatcactatctcactagttacaggctgtggcaaacctaaactttctccatactgctatcgtgccagagttcaccggggtggtaaagagaatcgaggctgcagagaagatgttggcgtaagtgatgtgcgcctcatcttctggacgacatacacacttcatgtcatacagcggtctccggaggaagctgcgtcgagtatccttcctccatcaaactcagggacgtgaagtaagggtaaatacccacaacaaattctgtcacttgctctacctatttctgtctgactgcaggccccgatggtacagtacttgcatcagcgagaaaggtaacttgaatgaatgttaccacgattaggcagtggaaaccaagttagaaggcacccaagaggaggtatgcgatgaccggcttccagaggcatctacagatcataagcagtgccatcaggacacggatgacgacggcatattcgcagtcatcggaggcattccctttttcgatttttaatacgtgacccatcaatggctgtagcagtgcctcagagttggtgtgggttagttcacgcgtggcgtctatttctctgcggctgtaactataagagacagacactcttgcggttctaagttcataaactctacagtggcatcgttgaccaacgatcgttaatagacaaaagctggggtagtgcgtgagatgaagcaacactacaggataaccgtgtcgcgacgctgcgattaagagcgaaaccattgggtgcctgtgccttccaatgcaatgagacggtagcattgcaataggcacacatggtctcgaaaaccaccacaagtaggccgacacgctgtaccaagacagacagatgcggagccacctggaaatttgacatcagctggagaagctctccattagttgaaggtagtcatgcgtaccttctctggtgatgccgaaacggactgtattaaaaacagctttgaattcggtaccgattaagaatgcctctgggtggaactagtgttcaacttcgcaatgcacaaacgcctgatccgtcttttcacaggcgaaactgtaaccaccccccactcacctacccgccagcgtagagccaccaacccaggagccctggtcgctcagacgtaacgtcgaatttccgacagtgaacggcggctttcaacacatcgaaatatgcatttttatggaggaataatctttttgcggcagactgatgtttcatatggaacggaccagcattctctgctctgtcggtatttgcgattcagttgtttcgcaactgccagaggtcaccccaatccgtcctgtcggcagccccccttgtcaattttgccggcgtgtattaactcgtagtagttcattctacctctcgactaccactcagccaacttgccatgctcctgaccttgttcgtcatactgtgattgctttcttcctctcctctggacaatgggtcgccgtctcctgtaaggactgtggatacaagaccgccatataattaaccctcaactcgccgtcggtaaagtcttctgcctctactgaagggtagctaacatgcgtccattttcatctggaagtaccgaggaggattcttactttcgagggaacaacccagcctggcggaggaggtgcatgtgcacccccttcaccgagggtttctcgtacacgggcgtgtctcgcggacggacagcgagttgatttctccgctctgccgaactttctcagttctttgtcctcctgtttggtcagttgctggccactttctaaaacttcaacgtttcagttgggtctcctagaagttgagaagctcctcatttcccctgcaaacctgatctcgtcttccactcttgcgtttttcttcccgggtatttcttcctggagagagtctcggcaaaggcaaagtctgtttaggcctcccatctaggctacgtgctgctccaggaaa

SEQ ID NO: 1308 - DNA, 2871 bp, Toxoplasma gondii
  source 1..2871: mol_type = genomic DNA
gcgactcgctatcgttctcttcactgacacttttggactttgcgatgacagtggcagcgtcatattctcttagctcaaggcctgctttacaaccgaacacgagcccggatgcacgcagtcctaatgcttcactacgatatgttgtgtttccctatttgccattggggtagtgctgtacggtgccgcgacagggtgggaagagctgtagttgttcgcgaggaattccacactgatgcatcgatcgctgattggttgcctcaaggagtttatgttactggtatgttgtctgtggtggtgagaggtgttgtgcgcgagcgataacgaggtggagcattgatcgccggatacctcacagagtttgtgttgctggtgtgttgtctttctttccagaggccgtacctgccggactggttacttccgcgcaagctctaacatccggcccgcctcccccaggtgctttaggtggagtggacgaatctgtggcgtcgcagctgctgtttaagcctgaagtcgatttgcgggagcagcgacggagatccagtggctttaccggtggtcagcaagggtttgtgcgttttgccgacgcgacgtttcgcgatccgaactcccagcttcagatgaaggacctgctcacccagcaggggaggaggcgggggtcgacagactcgtccgactacaacatttcgggttccggagtatcgagggaccgtggggatgagccagcagactgaagcggcacgtgggtgtctcgttcgtatctcagttatgttttgtcgtagtttctcgactttttttgaaatagctatttgcctatcttggcgtcatctttgttataccttgcagagatatgcaccttcggcgacaaaacaatgacttatgatccgccgcggctgtagacgagatagagaagggaaaccgtgccgttcccacctctaaacttcgcttctttggagagtcgatgtgcacgactctgtggggttcactgctgttttatttgttgtggcgaacgcttgaggaaatgcagtctgcagagcagatccacacaggtattttcctaattgttcgtagttggtactttttcatagtgtatcgttaatatgactaacgcggtcacacagcaacgtgctcgtgacaactggtcgtgttccactcttcgggtgcggtgaacatcaccggcacttaatttgcgaaggggggccctctttcgtccaaccgtttaccgaaacgtctgagtggcatacgccggcaaactgccaaattcatgatctgccatggcttgcgcggtggaaactaccttgtgatcgtgcgagtcacctgtagactcttcgcgggtagccacgcacgcgaaagtcgccattgatgtgtgggagaatccgcttgcgatagtcgcatatagtgagtcctttactagtacagtcttctggaaggccactactgactcacggatagttactcgtaaaaatcctgaagtggttatcgcgctgccctctaaaacttcgcagggtcagcgagataaattttcgtgtacagcctgtcctatctccaaaaggttgagggacgaagcaaataggcggttcacatttggcagctgagagtgacatgccacgtattcccacggaaaaataggagcactgctgcctagcccgcccccccacccctctcaaatcgccgccgacgtgtgtgtacatgagcggacagaaataggcgggtatgtgtcacgtgatcacagtcggcatatgagtatgcgcaggttagtgttttgtctgttgtaaactccgcacgcggtccagaaggattgcctcacgcggaccatctgtgcacaggcaaagtggtacgcgcctgaaccagttcaaacggagacttcagctctgtcttctgtaggggcgcagaaggctgctgtttcgttgcagcccgagtggcacggtgaatgtgcgccgagtactagagcggtgctatagcacgtctcacgattgcgggtgttcagaatcgtttgttgccatgggactcgcagggaatctcaaaattcctaccagctcaaagtggtaacggatctgggaaagagtcgaggccatcgtggagtgtgcatggggtcgcgaggctttgcggagaagcctgaggcggccgcgcaggggcgcgcgatggaggtgtacgagcccccctttcaggtcggaagctggggtcgatggttgagaacacaaggaagtgtcattcgtaagtggcttttttgccttttcctccacatgcgctaaccctcgggagcatccgttctgtcaaatctgagaggcagctgcttagtgtatgtggattattggacgggatatacgcgctgtaacaacacagggcagctagcctgattgcgagtggaagctgtttcgcagatggcctctcacacgctgcatggagacttttcatttccttttcgtttcaaagttcgagtggtgtggaccaacgcggggttcaagagtgaggttcgatgtggaatgagttcctgcgtgccgcattttgcctcggatttccggcaattgaggtatgcgggctcagtcaatccgcgttcaccatgacatcgcatgttttctgcgacaaaaaaagggctcccagggcgggtgcctttgcgttgctttgagcccacattaaatcttttttccctgtcatgcctctgaagacctagtttcgttgacattcgtggcaaacttgacattttccgccttgtcagatcgacaccggctgggctccggcgcatgccacgccgccgcgtttttctcatgtaaaactctgaaagagagagtcttttccctcctcggctttctaagtcttcttccttttccacacctcgccgtctagattcgcgactgattctcgttgccagcgtga

SEQ ID NO: 1309 - DNA, 573 bp, Toxoplasma gondii
  source 1..573: mol_type = genomic DNA
actaacggtactgggaaataggagatcgcgttagttcttgggaaaacgacttccgaaccaccaatgtacagattggtacaaagaagttaccatatcctctccgtacaaagccggcattaagaacataaagatcatagctagaccatgtattgtaattatcacgttataagtagatattgtctctgtacaaatgatcagcgaaccagaactgtataactcaaatcgaaaagtctgacttcagcgttcacgtctcggtctcaggagcgcgagactggacgggaacgacaaaaatggtaagaaacgacaggtcttgaccaacgttcttctcctccaaaaactcgagacccagagagccggactgcccacctgttctgtgatctctgttcgactcagaccatgttttcagttcaactcgcgaggctcacactgggagagggggggggggcgcgcgtgcgcctgaggcttgcgcattcactggtctgcgtttttcgttctttttctcgcgtttcgcaggaaaaagcgaagcgtcccttcgcgtgacaaacggagtcgtcgctccggaaaaacagagca

SEQ ID NO: 1310 - DNA, 2000 bp, Toxoplasma gondii
  source 1..2000: mol_type = genomic DNA
aagagagcacaggccgtctgtgctggatctcctgtctgccgtagaagatcccgtcgtgctctcgataccggacctggactccctgcctgcactccttagcgggcgtctcggaccgatctgcgacctcgccagacgcgccgtccttcttctcgcaggctcgagagtccagaacgtcctgctcgttgatgaagtggaagacgcgctcgctcgcgcgtcgcgctcgctctctctccaaggagtcgaggcctggaggagaagacgacgtggaccgcgctggggagtcgccacgaagcgccgcagccagcgccgagggagacgccagaccctcgccgccccaggcgagaccggagaggaagctgcctgcatgcgaagcggaacgcagcgcgaaaaacgcagatggtcggtacaccccccactgcgtcgctcgctcaaaggcctccggaaagggagaagaagagggaggagaagagggagaagaagagggaggagaagagggagaagaagaggaaggaggagaagatggcgaagggtgtggagaggccgcacagaaggggagaaggaatgaagaggagttgtgagtcagagggcgccaggaagacccgagcgcgagacagagcgcgagagagcaggcgagagagacggcgagagagaaggcgagacgggagaggagagcagagcgcgtctcgagcacacctgagcagcgcgcagagaagcgcagcgagagacgacgcatcgcggccgcgagggagaagatctctttgaaagagtaactggaaagctttcgaggaacggagcaaggcggtgaagaactggttgtctctctcgctgtgttccgctctcctggcctcgcagcgcgctgggctcggacagactgtcaggcgacgcgatccttccaaggttcgctcgtctgcacctcggctgcctcggtcaactgtgtgcgatgccgcattcatgcctcagcggacgagagtcaagagtcaacaaaccgacggccggaagcgagaggagcggacaggaaacagcagacagagagcggagagggcgccactaggatggtgcatgcgccgctgacaagtccacatgcgtcgacttgtgccagacaggagagaagagaaagaggagaggaaacagcaacaagtggacggtggaaggaaggaaagctcgtggagagatgcagaggacggcaagacggcgccgctcgcctgccggtcgactagccacaagctccgcaagaggtttcttcgcgggggagggtccagaggggaaacaagaaggtgcccatttgctggaaaagagaaaattttagaggagagacgacggaggagacggtgtgtgcagcgcgcaagaagacactgtcgagatgcctggcacaacaatcgtaggtgtgcatgacagaatctttttctgcatgcagcctcgactccccaagtcccgtctcctctcagagggcgttcgagaagatcgacctggagaaagaggcgacagaggtccgcgcggcttttcgcgcgcctgttcttcacttctgcaggattcgcgtcgaagaacggagaaaacatattgcgagaggctcagagacatggagaggtgtctcccggggcagatgaggagcggccggggccgcgttgagcgccaagagaaaaccacgaagacctgtgaacggagaaagacgggtcatgtttccttcttctcattctccttttggtcgctttttctgcggaagacgtaggagaaaacgacggtttttcgtatccgctttagctgtctcttcccaccgacgactccctctctcagcccgctccgtgcggtgtgtacgtacaccggactgcgggaggctgactctggggcagagaaggcggtggagttcggccttcgtccatcacgcgtcagaaccggagatgcccgcctggagaggcagaattcgcgaaggaaaagaggcaagacgcggaagctgcgcttcaatgtcgacgttgacagcggcctctcaactttgccctcaacca

SEQ ID NO: 1311 - DNA, 2181 bp, Toxoplasma gondii
  source 1..2181: mol_type = genomic DNA
tactgcctggcgtgatctaaccttggttgaccataaagtgttctgtctctcctgattcgagtgcatctttgcccgccgtgtacgggcaatgtatgatagttgtgcaccgcgaacaggagtagctctcgtaggatgaagacaaaaccgtgccgtgattttttttcaagcacgtcgacgctgtgcgcttcatcgatgttctggtagaatccggggtgagattgttcttactgcagaaagcattggcattgtaggggtcgatggctacggttcgtgacatggatgttgtttcatgtgacatgcagtgaaaaagcttgtcaacatacgccatctgaaaacgggtggtccgcatccttagttgttgcggaagacaacgcgaggagctgtgcgatacctatacgaaagaaatggttcctgtcaggaagcttcacagcagcttgctgggacaccaccgaggcacggaagagttgtcttatcgatgcgttcactgagatgctcattccagttctaagtgtctcgatgacgaatccgcaatgccacttagctggaagaagagttaggcctggcagccgtgatctcgtggacgggtttcggccaatttgcttcttctcacaagtgactgcctgcactgcgtgctcttccttgttagcaagctggagtggcacatcgaccattaccaaatccattaccgtcacagtaacttcatacatactacgaatacctgagtactgcttacatactaatattagtaaggacgcctgcggaacctacttacggatactccatgaaaccagtacgcagagttatactcttactggcagaagcatctggaccagattttgttgcctctttgtccgcctcaaaaggctttcggcaccgccgcacttgtgcctgctgctcgcagatagagggcattttgcatctgtcacttggcgcgcgtctgcgacggtcttgtgagctggaacaggcccaggcaccgtaggggtgaaatacgctttctacaatgcaacacgctcatgcaagatcaacaaagggtggggattcgcactcactgcgaaggctgctagcatgtaccatgcgtgctgcacacttcctttaatagaagtcggaacctgtcgctggcagctgtcgagttactggaacactcactaggtgtcagcaccgtaattcacgaaatcattcgccgttgccataggtaaccatcgaacggcttcagccggtttctctagacttctaaagcgtcaaaaccatcagcacaaagaaacgtatgcgcaattccgaacgcgttgtccgacgaaatagttgcaaagggatgccgcacggaaaacactcccgagtggagttacgaaaaccgctgccaccccccatgctgccctcctcgctgccttcttttcttacgggacatgcagtacatcgggcaacaaaggtggctgattcatcgacagaataggtcgacagcttaaaaacattgtgtcacacacagtgattgttgattttgttgtggccagaaaggacgttggaaatgttgttccgccgctccggagcgttcgctggtagatgcctcgcgtgcggaattcctggttgatgagtgacatgatgtgttgcagtttgtgaaatacatgtcctcctgacttcctgctgaaaatccccacattcgcaggttttcatctgagattccttgtcacacctcccttccaagaagttcaaccgcggccgggtcctcgattttctgggtacatgcgtcatcgcgaatccaccggaaaaaggctggaggtacgatacgtctgagtcgtgttgcagttcgagagttccctccctgaaagtgcagtttttcgccttctctctcatccttgctcatccacacacaccaaccacttctggcgaaaacgcggctgcttcattgcgaccgacctcgcttcttccccgtttcgtcacgccagacgcaggaccgttctttgctcgaggttctactgaaccctttccttcacttgcgtgattttctccctggttcggccccactttattcgtccggacatccaggaacggcgcttcggccgccagctgccctgcagtcctgcctgcccaacccccggtgtctgcacaccgcagttccggcgggttctttccacacacacacacgccgctcctcggtctcccctgttgcgtagaaagcgtttctcataa

SEQ ID NO: 1312 - DNA, 812 bp, Toxoplasma gondii
  source 1..812: mol_type = genomic DNA
gtatcatggagaaaagttttcgaactccgcggcttcgggccaattccactgatgcagctagcggggggtgatgccgctccctggaaagaagaagagaaacttctcctgacgcgtgccctcttacataagacggtagaaagtgatgggtcgacccgaactcctgaagagggaatcctgtcggcgggaactggcggctttctctgcggttcacgcagttctggaccagaagaagacttacgagtctggctgtcacagttgagttccatatatcagtaccacgccatgcggacgcttatgcaacgcctgcggcgtgcggaagacgagtttcccgaattccaggagttcaacctgcgaaactatagtccacgcctagctaaactcaaaggcctgctcaaagactgagtataaagacttggacgcgcatcagggggcaggaagtggtaataacacagttgtgaggcctggcattacaccgctttaaaaggtgccggtaaatcacgataggatggcgtgctcttccattcccagtcgtttcatcttttggtaaggtgaatcggcagtttaggccgtaaatgatcgtcagaccctgaatagtggagatgccagtgacaaagaagattacaaacaccggcaaacggcccgtgctatcaacttttgtggcaaccggaattacctgctcctgttgtttcgtggcataacataaatatttcaaccgttcaccgtcgcatgctcgccaaaacaaattttccagcacagaccttcgttttttctcgtcagatgcaaagctgcctctccccacaagcgagaatgaa

SEQ ID NO: 1313 - DNA, 2240 bp, Toxoplasma gondii
  source 1..2240: mol_type = genomic DNA
agagagagatatgctagaggatagacggaaatgcgatacaagagaagagagagaggcaaacagagggaggaagaggataaaaaaaaagagacaagagaaaagaggaaggcgaaagaggtggggaaggatacggagacgagagaggagacgagagaggagaggagaagagagagaatgagagcagcgaagagagagtagattagaggggaaaaacagagaagcaagcgaagaaacagaagagatcgaacatattttcataagcggggaaacggagacgatggcagcagtctctatatgtttatattgatgtacacattttcaaatcttttcccttgcatatacatatatatacatatatatatatacatacataatatctgcatgtccagctcttcacataggtttttactttaagtatttttgaggcggaagccagttggtttccaggaaccgggagcggctgctgcatgcgtctgaggcgctgcggtagccaccgggactgtctggctcacctgcgcccaagcaggaggaagccagcgtgaggaccgatcctctgagagagccgcgcgcgatcggcgagaaagctctcgtctgccaaggcacaaaggccggcgacgcttcttctcccgcagcgacaggccggaggatcggctcttgcctgctgtctgtctgagcgcggtccattttctctgcactcgcctcgcaggttggaaaccagggagaggaagcggagggaaacggacgcggagggtgagacggagaagaagaagaagcagacgaagaagacgaagaagaagacggtggagaagaagaagatggtggacgcgagtcactgggcggctgggcagtggacaaagaagaaggcctctgcgttcctcccttttttcgggaggcgtcgaacgcaccctcacgcatcctgcgcgagctcttttagagcctgggccgaggcgagaaaaggagacaggtctacatcagaggacgaggcagtaggaagccgccttcttcgcctccttgcgtctcttttcttctttagaggaaaccgaaaggccggagacgcacactctcagaccggctggagagacggcgggaggggaagactgccttcgtcgacgaagagcgcggaagacatgcgcgagggaaaccaaggaaacgctcgagaaatctggaacggacaacctggagcaggagcaggacaagccgcgccgcaaggaagcaggcgccgctcgactccctgtttcttggccgccagactctcgagcggagagagtcttcgaccgcggacaggccttcagacacacgctggagaaaagggagaagacaaaggctcaggagagaagacggtgaggaagcagaagacagaagcagttgaagaaaaaggcaattaaggccgtagacatgtctgcggagggcgcgcgccgcggggacggaacggagctgctgtcgcaacagccgacgacggcttctctgctgtgccgcgcacaatcaccaaagagactctgagcattcgcgagccgcgacgcggccgctttggagtattggccggaaattcgcctcgaaaaacggggaaaggtctgtagagaaaacgagagaactcgagggagagactcgcttccgcgccgagctcgctgtcggactcgggcaggaaagagagtgtagcgacaaagcgcatgcacagaagacaacgcgcagctgccgctgaactttttttcggacgttttctctggaaaaacggtgctcttgctgctggcctccttctcggacgccttggaacgccgccaaacctctgacgcctctctcctttctcaatccgccggcgtccacttccctcgtgcccacaccgttttttctcgcgttcgtccttcgctgtcttcctcctttctggcgcggtcgaaaaaactatcccccgccttctgtcctcttcggaagcgttccatccccctcaccttgccgatttgccttcttcttctcgtcgcgcgccgttctccgcgcttctgtcgcctgcagctcgttcgccgccttcgcagagcgaaggcgtcacaacgtcctctgtctctggactgcagacgccgcggcggcgaggaggctggcgctgctcgaaaagacatgtctcgttactagagtcgttcaggaaggtcgcgacctgtgcgtctgcgggggaactttggccttcccgcgcctccgcctcggacgtctgtgctgagaaccagcttccccaactctggaaagaatcgcgaaaaaaa

SEQ ID NO: 1314 - DNA, 1644 bp, Toxoplasma gondii
  source 1..1644: mol_type = genomic DNA
tccgacggccatgagcctctttttgaatgtgaagcatgttctgttgcgtgtttctcgagagaaaaagcgacgtacaaaacgctctttcctcgacagattctgacctgcggtcacgacgaagatcgctccgacagttcctccgactttcaggcctttctgcaatctcatccatctctctcggagtttcctttcttcgcggcgcttcgccgcagctgccgcggccctaccagcagccgcggccgttgctgtctgccgcagcggcgaggaggccgaagaggcaaagcgcgcggaagcagaagagcacgagagagaggaagaacagacggagacagccgacggacgtgaagaagaaagggagcttgcactcagaggcagggggaagagacgacaacgcgaggagaagcgacgggcgcaaccggctggagagagaagcgaatgcgacgagacgcaggaggacgatggagcgacagagaaggaaaaaggatgaacagaagagagagaggtgacgagctggggagacggagaggccgagaaggtcgagagacagccggaagaaggaaaggccgaagcggagcgccaggccattcttctcgcttctgtagctgtgaagactcgcccctggagagaagcacgggtgtttaacgccgtcatcttgaatagagaagaagaaacagacaatgagatgaagcaggcggtggcagagacggagaagacgagggataaggagatcaaggagacggaattgaggagcggcaactgtttgtaaaggtggggaaacgatcagtagcgaggacgaatacgcgcagagacaaagaagagagaggcaagtgaacaagaaagttgaatacgaaagccgggaatttttaagagaactgaagacgaagggctgcagcgggactgtggctggagagactcagacgcgaggtaattcgttgggcatctctgggaggaaaagaaactgaaaatggacaaaaatgcacacacaataaaggcaaggagctccacaagcccggaagaagcgaatcacaagtcgacgaaaaacgtctcgacccaggtcaaagcgcgacgccagcttgcgaagtatatccaccccagtgtatcgcatgctgttcagaagcgggagacaagagaagccagatcaggagagaaagtggagagtcaacagcgacacatctgaaaggaaacaagtcttccggtgagttgccatcccgcctgcaaaagaaaatcgaagaaacgtgatcgtgaatcgcagccggtgtttcgagccggcgcctcgtccccgcaaacttggaagacacaaactgcatgcaagaaaaggtcaggctttcctcctcgtctcctctcaaaagcgtggccgcttctgctgagttcttggcagaaagacgacgttcttcttcgatttgttcttccgtccgtctgtccgctttcgcgtggggtgtatgtacacccgaaattccgggcgcacctttacccagattgggcgttggtcgaggggcgcgtgtggatctggtcatctgactcttttccttccactttcttgtttgatttgtgttttcttgtcgttggcttcctcccgtttccagcttccccgattcgtctctttctctcgtcgtcggagaacagctccttcgtagtgtgtcaaaa

SEQ ID NO: 1315 - DNA, 2460 bp, Toxoplasma gondii
  source 1..2460: mol_type = genomic DNA
tgtgcacgtgtttctagtacgactatcatatacacatattctaataagctaagctgtacgtaccccgtcttgccatggacgatagtgtcacataagagttgccagcagacccgcctgtgtagtgcacgatgccacaccagtcgccggggcattttctagcaaccaagaggtcgtagacccgctttttcggcgatgagttttctgtggcattggcattcgccaattcccctgtggtgatgggtgaagcaagcgaatggataaagcactcgaaatgaagcgtttctcgaaacacacactctatgcagttccgggcatcctaaataccctcactgctttgtgtcctccggagctgcgtttcaccacgaggattcgcatgcatgcacgagctatgcaacaatattgctggatgtaagcgaagaggcagtctccgaaagagcatgtcaaggcttgaactgcgcgtctacttcacgagtgaagccacacagacaggtgcgagtgtacacactgttgcatatacgcctatatctgcatacccaagcgaataaacgcatctggtcccgcctcgcaaacgtccgtattctcaggctcacacgacattgtatttcgacttaattggcctgtcccttttgaggcgccgcctttgcctgcgtctctggatcctgggtctctggcggcacgcgcatgaacacagtcggtgtgaggccagcgttgatttccgggtccaggaggcgggggtttttcgcaacctgagagagcatgcattctctcaacagcaagtgtgtctgcaaatagtcgtacttctcccaaatgtgctgcagagagaagttcgtgtaccgccccttgagggtcaccttggtcgggtcttcggggttaaccaccgcagttcccgccgcgcacgatcccgctgtcggcttccccttcacggcagcaaacgcctgcatccaccggaaggaccgtgcgatatcttttgagagaacggcggcagcgccgctcgcagcaggggcaggcattttcttcaaatgaagagaagagaggaagggacgcgacggacggaaagcgttagtcgagcaacgggacttcgtccgcgagcgacgggggtacgacgctggagggggaacttgaaagatggagtcggcgaaaaggagaactgtgtcagagacgatggcaaacgtggtggaggcaagtagtcgaaaaaaaagcagaaggcaacggctgtgcagagcggcgctgaaccctctggaaaacgacactttcgccacaacgacaaagaactacggggcaggggcaaagctcgtttcttcttaggaaaaagaactccagtggggagaggggcacgaacacggaccaacaacgtgcagaagagaaacgcgtcaggccaaagacgaaagtcggtcctgggagaggagacacacgagagcactacctgagcgccggcggccgtgtagggcaagtttcttcggacctcctaaaagaccttcccaaaaaggcgtgtcatatacgcgaaaggtcaggacgtctttcaaacgaacaaaaacggtttccattttagccgtctgtggacaggaaaagccccccaattccagtcgctcaaacgcatgcaagaggaaaacaacacggccgcttttcagcaagggactgcggcgtgacccccaacacatgccagcatttttgcacccacttcgttggtgtcgccgggcatctttaaagacgttttttttaagaaggagaatgaccgtcccagacggaaaggggatcccctatcgctgcacttggtaactcatctgcattaaaagaaaagtgtacggtctgcagacaagatgctgcgtatatgcacgtgtacgtatttccatgtgcagtagccgctcttgcagcggtagcacgacgctctgtttgcatctgacttgttattctttggggctcggcagaacagcgaaaaagagttctggtagtacgtgtcggtcttgcaatgaaattcgtcattcctgactcccctctctggcttctacattgaccgacgctagtaactggcacagctgaaaaccctaagaagcccttgtgtgacctgttgggtatgtctcgcgatattctcccgaaaaactcgcgtgtatgagaagagatatgtatgtggagatccaaggcgtatgccttttccctatttcagaggtacgggcctttcctgaaccagcaactacatcaagttcatcgcgaacactagaaactttcgttgcattcttgtgtcggtgtggttttttcagaaagtgtctcccccttccttatggtacggtagcggatatagtaactaggcagaaggggcctgccgatcagactgggtgcttcggagccgttgcgtctccttttcgtctgagcagagggggccgcttaccaccagaccccttcttgcgacgtgttcccttgtaactgttgtcaagtaccctatattcctttcgctgtccaattaga

SEQ ID NO: 1316 - DNA, 1689 bp, Toxoplasma gondii
  source 1..1689: mol_type = genomic DNA
gacttgaaaggagtcgttggatgagatcctgtgtcacagagtctcaccagcggcagctcccgacgctgtgggtagagcagctgtaaagcaaataatgagtcgggtgatccaccgcgaatatacgcattaacagccagttacattaccttggagtgcagcagcgcccgaaggcttctcaagaagacctgagaacgtttcagctagttacgtgcatcctacggtacagccgtgcaactcaacaaacctttgtccttcatgtactggacatctgccaagagtttatgcctcaattcatcagcgtgctgcagcttcctctcaagcattttctgcatagtgtcgattttacgtgcctgagctgtagcaaggaacgcttcattctccatacagtgttagcaccacaaacatgcggatactaccttcgtccagctccggcagattcaatgagggttgagctggagtcggcatttcggcttcaggaggaaccacttcgacgcccaatgcctgtgcaactgtctcatgaacgccttgaagtgcacctcctgctgcttgaagtgcagtttgagctaaaacatcaaagaaacccttttcctgcgaccttagtaccgccgccgaacacgacggtacagccaccaacagcagacaagcggaggcagtctgtactttcattttgaacctaagcggctggtgactaaggcttttaatttcagaaaagaccaagcggatgcggataagctctgatgtttaagccatactaccaagacagaactgccattccgcttactgtatgtacaccagtcgacaatacttgtgcctgggcaagactgaccagcctttgttacgagctgcatagagtggcaatattgactggtcttccacgcttgatagactcccaacgccaaaaagatacgaatctaacgtgttacatggcaaaggtattgacagccaatgtacatactgtgtaagattcaagcgcttctgaattctgcggcgtcggtggcgcccctaccggcccatccagccaggcggacttaatttccacatacctccgggaatgtgaccaagggaattcgaattacggatggttctttgtcaaaagagaaagtctgccctttcccgctttcggataacgatagaagatttccccgctcaaccagagaacgcagagggtcctgcatgcaatatgcgatttccaaatgtcccatgccacggcatcgtacgctggtggttgttttctggacgatggcatattgattcggtgcgctggttcacactggctgcagtttgactcacgaggttttggagggtttcaatagcgatatgaactttcgttgtttcttgccttgcgtaactgtgttgacgtgtgcaggacgacgtactgtgcttctccttgcagcggtatcctggccgcgccgcgtacgtgtggcatgcaccgtgacgaaacgaaccgactgaccacgtccttaattttgctgtctttccaacagttgtgccaaaggttccatttaaggaaaaagtcttgtttcggttgttcgatttctttcttggggtgagcagggtatattcgttcttccgtcaccccccacgacttgcaccctcatctagattctcaacaaggactcggttcttttcggaaggacgatttgtgtatagtgcttagttctgcctttgcctcttcgtcccacgtcgcca

SEQ ID NO: 1317 - DNA, 1608 bp, Toxoplasma gondii
  source 1..1608: mol_type = genomic DNA
cgtcgatcgagagcacagaaacccaaatcgacggactctgggtgtccccattcgcagcaaaagctagctgctccggtgatatcgtctacaacttctctacaacttcccttccattacactggatgttgatacgtgagttgtcctctaccgagtcaaaagctcagacaagagcagagttggagagcacccacaggacagggctacttatagacgcggcaggtcttgcgctattggtccagaaagaatgacggaacacgtcaacggagaagtaagaagtcccgaagctcggttgctgcagcttggcaaagcgagccacagcaaatacccgggcgcgatgtcgtccggaattccctattggacaactggggtacaagtggttcaacgagacgtgccacagccaaaaccagcagtagcctgagctggtctcgcaaccgaagatgaagcaaatagaagacgagtgtgtctcagcactcaaatgaaccgcgtgtgaccgatgaggggaagtggagaaacgctgcacaatgcttccgtgggccgagtaccagggagtgttgtccggacccagaagctcccaacacacgatgtgctgaagaagtcagtccctgtatcaccacatacaaagcagtacttccggaaagagctccgttctagaacgctccggacgagataaaatgcaccgggggtaacccgagagacggccaccctctaccgatgcttgaacagttcctcacacaggacgcaatcacggcctggtcgacccccccccagcagaacaaagcaaaagtccacgcaaggacttcttctcaggaaaacgcgtagggctgaagagagacctctcccgtctcgaagagatccaaaacgacaaaacaaggccacttagtccctgctcgcgcctcaacggagcctgcaacacagtccacgtcccggcgaaacaggttgtctcaggggaaacagaggtttaaaatcaaaggtggttttatctgtcaagctgatttttcaaaccatttcgaacttccttccagttgatgcgtttttgtgggagaaccgaggagccagttgggataaattggctgcctgggagacaaagctcccgtcggttgtgcaacagcagagcgagtaacctggatgttccagttggaaaaaaacatagaacttggctccttctcaggaattgaaaatatcaaagcacttagaggagcaaagtggaagaaaatagttcattatcacaaaggagtagcgaacgtaaatagagctcttggtgacccaggcaactctgtaagcgtgaactggtgactaccggcaatgcggcttggcatggtagcggcttataaccgaaaaatgcaggcatgcggcgactgttttcccgaccagccgcgctgccaggaaaaactggaacaaactctgtttgggacggtgttcgctattccataataatgttcgacaactttccataagtgcacgaagctcgggttcgagtaaactgcttcgtttgtgtgcagctgtcgtatgaaattgcccagtctcttctggacagtatcggtcacagggctgtggtcgtcggtgggcgttctgcgtttttctgattacgtccttttctgcttctaacga

SEQ ID NO: 1318 - DNA, 1875 bp, Toxoplasma gondii
  source 1..1875: mol_type = genomic DNA
acatagggaaatgtgtcctgcgcattagacgtggcagtcgaggaacccaacgaagtctccagatccagagacttcggagccaattggctttctcgggaccagaatttcatctttgcgaggaatagagtaacttgcttttgactcactgctattttggtagtgaagagacgaaatggaaaaaacgaaatggatcagagcggcgtaaaagggactggtgcgggatggcgtgtcagcatgattcactggtacccgtatgcttgacagaatacgaaaacattcagcaagaaatactaaagctgattagggattgctctgaagctccaatttccaaaatagagacacttggaagatcggaaaagacctttctgtgcctgggttttcacagcctgctgtcgagcttcggaaactcccggacgggtacggaaccgccacgcttgggcacaaaaaagagccacatagtggattgctgggcaacgtagcagttcctggaaaactctagctcgggattactatgatttcatattcgttttcaaaagcaacagcacactgggcgaacgaagcttactgttcttgcaaaaacgagtgaaatgccgttagctcctgctgaaacaaaaacagctgctgtacttgccatgcgttagctgttctatcaaggcagtgcagaagactctgcagtgcaatttccaagcgagggggcagcggcagaggcttttcaggacgctcacacggacacacaccgccggcagctaccgaagaagcaggagaggacaccgcctctccctcggtggagatcgagtgcgaagcctccatgacgaaaccagaaaaacgttaggcttttgagaagaatgaaagagaggagtcctgccgttatgagcgcccggtaccccccgtcgcatgccgaagagctaccatcagggacaaggcgtttctatcctcgtagtgtggaactgatctccgtagatacgtgtagaatgttaagaaggaaggcgcacatacagttcaccaagccatgccttcctccgtaccccactcgccaagaagttgcttgacagcgtcacaaacaatgaatcaccaacaattttcaacaattttcaaaccatgtctagtcttcggaggccccgtgaagcgtgcaatcgcagtcgcatgcagcgtgcgcatgcgattcttgtccagaaaccgcagttagaaccacaaaagtaggccgcagctgctttggacacctacaaggaaattactacgtgctattcaatatgtaattaccctgcatatagcatggatacacggctgaagcagctctggaaggatttttccgctgcagacacgatggagcaatcaccagacgacactcagtgataatggtgcgagcggaggcattcttggacggtagcgaggctcgcagtgaaagaacctgaatgcagaatagagtaactggttggagtctcgggtgacagccagtgcttggcgtgatgtaccaaaggtgtggaatcagtgggtcaccgctgcagaaaaacttagagcgcgactggtacactcgagaaaaacacagcgcggagggggcaccggtacagagttctggcagaggaatctgacgctagaactgccgtcaactgaatagcaaagaccgactgtttactactcaagtctgtggagtattcacagatggctaaccttccaccattaaccacaaagagttcgaacaggatctttagatgatcagaggtaagcgcagaaacccaccttagaggcagcacggggtgtatgtccacctcaaattacccgaacaaatgggcgatcaccttcagtggatatttcaatcgaaagtgccactccctcgcctggcacaccctgcacgttgctgcttgttttctttcaaga

SEQ ID NO: 1319 - DNA, 2925 bp, Toxoplasma gondii
  source 1..2925: mol_type = genomic DNA
tggttgcctgggctgtcgtgtcaggacggatgtctcgcacttgtttccgaggttcgtcaccttccccgtctgcttctctccgcttttattcagctgtcatggacgtcccacccgccacatcggcgagcgagtgtccagcggcgtttccgtacccgtacagtccgactcgcgccttgacgttctgctgcgcgagcgaccgagactgttcgggggaaccgctgcaaccggagtctaagtgttgctacaaccacgcgtacgcggagtgcttggatgcgccgtgcgctcctcacaggtaagccgagcaaccgacgagggcgccggggaaacgcgttccgcagcaggggactcgcagcaccaagtcgtccaggagcggcgggcggtatcgcagttttctcatgtgcatgcgcgcgcatgcgggtgctttatgcagaaacgtgttggtggctctcggggcggcgcaccgatacagcttgactcctgagcgtgcaccgcgactcgtggagatgatggggaaactgaacgcgagccgcaaccaaagcgtgcgaatggctgtggaggcactgcagcatctgcacttggtggagaatttcatcaacgaagctttccgggacaggtcagaacacgaagtacaccgtcgctagtcaggtgaatggcgccgtctggctgctcggcggatcaaaaagcgctcggggccgcggtgtacgcgtgccttcgccacgtggaccgggacctccgcgcagcagactgacgtggatttccacgagaggaatgccaggacattagtgcataggaatgtgcgtctgaggaacggaacagtacattggatcaaagaggtcttcctaatggatgtgtgtaggcgacacagagacgaaacaactggccgcatcgctggaagatgagtctggaaaatgtttttgggttagcacaggaaaaacgcgtgacttgctggaacactgcgacgtgtgtagcccacggaaacacaggatatatgtatatgtaaatggtgaaggcggaaacgttttctcgattctattggcttggctttgggtaggagtgcctgcagagattctctggaagcaggcaagttgttcggcttgcactgaaacgtagattcgcggctgtaggatgcactactgaaattctgacgcgaaagagcatcttcgcggacagttcgtgcggaactgggctccagacacgctagtgggcagaacgttttggcagacgtatttggcattgttcgctagcatttttcttttcgtgacatcgatcgcgtttttgagctgaactcagatatttcgaacaagcaaatgtctataattctggtctcgtacctcgattctcgatccaaaacacacttttggacgaaggagctgcagctgtgtctagctttcgtttcactgctgaactgccgtcgtcacatacattcaccgcctgtcttcgtcgccgggccacagacgctttttagcggttccaggagcacttttgtcgcgctacctgtgtctcagaattgtttagcacgtctctccttttactaacacccgtttctacgaagttacgagcgctaaccaacggaaagcacccgccaaggaggtgccgcctgagaatccggtcatgctctagtgtctggttgacgatccctcggcttcgtgaaagcaactgtcgccgcacttgttgcggcgtttcttggagtacaaatgacgttgcaattaaaatgccaaaattatgtgatgacactagaattagagcacaccggtaaaaggcgatgtgtctcatggttcctcctctgtcatcagtgccgaaaccaggaaggattcagtcaacggcagccacgcactgcgggtcctcacttgtaaaatcgcacagcgacgtctacagtcgctcgagttcccaagaatcatcgtttttgaatgcaagtatctgacaggccccttgtgaaatgactcactgctggaaaagataataggaatagccgtcgtggaacaataggaaaccccacaacggtttcctgtcagtgtttaactgtgaacaaagccacgaacgacagtcacgcaatgacttttagcgtggtggccgtaggctatgtccagacgttcagtgtcgctttctgtctggccgcggtcgcccttcagatcctagtgcatcatgcctttttacatccgtttccttttagaaagaaggaactggcattttagctccaaagtatcgtgtgtcgcagaaccacctaggactgtcatctaccgaatcattgcgtcaaatcgaaacggacacttcacggtcccgagcacatcgcatcttcttgggcagatactcaaacggaccgattctgtagggattagactaggcggcagaataatgatctgccttcatagggaacgaaggacaccgtcaggtcatttctcaggcaaagcgcaagacgcggatctgaagcgaacgcacgattctctgttgtttgagacacaacacagtttctcccgtccattcatgagactcacgggcgccccttcaccaaagcaatctgaacactgcgcacagaggcgccggttttttgccttgcggctgccgctgggatcgctagtcagccagcctgggatcgtgagacgggcggcaccttcgttggtgttgcgcctcctggggcgtagaaggactcttgtgcgacacgtggaccgccgtctgttcagttgacttgatcttctgttttatctgcaccagaaaaaccttttttgtttgatgtatttgtagacgggaatgacagaacacgaatacactccaccgcggacatcccaaccctgacggacacaatgccacaaggacgtgtctaggggctctgctaggatctttgaagctcagaaacaacttgtgacctcgcctttcctcgttttggcgtggtgtatggcactggaatccgttcattgtcagtcaagacga

SEQ ID NO: 1320 - DNA, 3297 bp, Toxoplasma gondii
  source 1..3297: mol_type = genomic DNA
tttgcgtggacttcttgaatcacgtctgcgtctgtcgagagcgcctcgacgagctcccgctcttctctcgcgagcagctgcaggtccactgacgcggccgctccacattccccctctgtgtctagcagcactcctgtcacgtctttctcctcaccatttcttcctttcctttgagctctccagccgtctgctctcagcgcggtcatttcgacctcccgcgcctgtgtctcagacgcctcgcctcgctctccagtttctcgagcctcgttcgtgtttccgccgctgcgtctcccctcctccaaaagacctgcagagcctgggaggcgagacgcgcgcgcctctcgcggggcgttttcttcgtcgtgtgtcccctgcgcgccgttctggacagaccctggaaatgcaccccgcgaggacctgtgcatctggggaaacagaagcctctcggctgtcttggcagcttctgctgccgcgagcgtcgcacgcatgcagtgactggcgaggcgggaggccttctgtgggccagccgccggccgccgagaaggatctcccgacgcctgggagacggccgcagtcgcgaaagcagaaaagtatctgcgactgtccagtcgtccctgcagcgccgccagctcccgctgcttcaacgtgcttgccaggtcctgcatttgagtgtacagacacccaaggatggcgtggcggtgcgcggtggccgccgaggaagccccggggggctggtcgctcgtgcggcgtgcgggcgtgagaaggcgtttcaggtccggatgggcgcgaagtttcttgcgccgcgactcctcccactccgtctgcctcctcgccaaattcgtcacgtcctcccacgactccgctgacttctccagagcctgcaactgcagctgctggcgctgcaccttcttcagcaggagagaaacatctgcgcctggacccgcagagtccccacacgctgcagagacagtggaggccttgaaggcggttgaagggccgagagagtttgcgagcgtgtggcctgcgcgcagttggcgctcgacggcgctctgctctgctgcgcactgcgcagctcgctcaaggaagacaaatttgcatgcaggcggggaagcgcccggactcgagtcggcctcggcggccagagaaaagaaggggaaaggcggcgcagggaaaggcgtgtcacacagagcgcggagcgacggagagacctgctgcagggccctgcagcaggactggaagtcgggtgttctgtcacacatgttccagaggcgcagtctgctcgcgagagtttccggaagaggccgcagaaccccgagcacagacgcatgcacgcgttggcgcctcagagcagacgacatcaaggcgctgacgcggcgctcacgaaccaggcatccgagtcgacagggggggacgtgcgcgtcgacagacagagcacgagcgaaacgggaagtccactcgagatgtggagaggcacaaaaacagaaacgggagaggcgtgacccagaacgacaaaacgagaaagaggctacaggctcctcagagaagaacagaagctccagaaatttacgttactgtgtcagcgtcttgccagcgatgtgagcggccgactgcagtccggcccgccgcggtgtctagacacgcggtgtggccggaagcgcgctgctcttttgtgcaagtttccacgaagtcttctcgcaattcgtctgactgggcttggctccgtttcaacagagacctctcacgcggtgggtttggaatgacctgcaggagctgagaagtgcaggcctgggagtctgtccaaaagaagctcggcgcacaagaactgcgagaatctctggtcgtccgcgagacacacagacaaggtaaaagtgcacacacgatagcgccgccctggcgggtcctcgcgccctctttaggaactttgactgttttcgtggaaacaaggcagcgagacgcagctttctgagaaccgcggacagatgcggcgcagctggccgggggatggtcaggaaacaagagcggcgagacaagacacaagcagagatgccggaaagcgggttactgacagactcaaccgcacagcggagagaaacagaagtttgtgctcagagaggaagaaagaggtcccggaacaaggcagagtcgcctggcccgttttctcgcgcatgcgtgcgaaaaacagcacacggcggacgcggctagcagagagtggaactggaatctgtagctacggtcgaagaagcgaagaaagagaggaaatagaaagaacaaaagaagtcaccctttccctgtaaaaggaataacagagaagcgatgaaaagggagaagaggggaaacagaagaacgatgtgtgcgtgtgtctcacgcatgctctcgagtttgctgaatttcactgcccgggttccctttgtcatctttcctccactctgacgcgacaaaagctttccagagacgcacgattttcttcacaccaatccgtttctcgcttccgacaagactcgagaagagacaatgtctccataatgtattctacagaagtgtgtgaaagagaagtgtgtgtatcgcgtgtgccctctcgcatacatgaaggtatatatctatatctatatatatataaatatatatatatatatatatgcatgcatgtttgcgttcatatccatgtagatgtgtgtatatcgcttggggagtcggctatcaagatcaacggcctctgtatcgtgctcggctttcctgactcttgtgctgagtgttttccccggagaaagcgaaaattcatttttctggagtcattttttcgttccttttttccggatagatattataagccaccactccatagggagaagttcttttttctcaatcttctccacaactctctctcttctcggcgccggcctctcttgccgttttctcctcgttcagatgcttccaccactctcatcttgtctcctccagaccgccactttcccaaagtccctacggactctacaatcgtctttctattcttgctctactctcctcttcctctactcgcttctacctcgcctctgttcctcctctacgctcttcccttctcttcgtcttcttcccctctgttatgttttcttttctctctccccggatcttctctctcgcgttctctccccggatcttctctctcgcgttccgtcccctgttcttctcgctcgggtttcttcccctgttcttctcgctcgcgtcgcgcgctgaagcgattcggctgacgagcgaggaaaggaaggcctcgaggaagcgaggcaacgtcgcctctcagga

SEQ ID NO: 1321 - DNA, 3902 bp, Toxoplasma gondii
  source 1..3902: mol_type = genomic DNA
tttctcaccgcttcgatgtgaaactcactcagtccgccatgagaaacgaatactacaagtcgcgaaacgccatggcttactatggccccgctgtggtaaacgctgacggagaggtcgatatcgctgctgctgcggagcaggctcaggcttgcctgtcctgcagatcctaaaggctaattagcaagcactgggaaatgtggtgaacaggagaagcgacagtaactggaggccgtgctaattgtaaacggcgcaagcgagagacatggacagccaggcataacgtgaactgtgggtgaaagaatagtccaggacaagggaatgacagggaaaagaaatgtttttgtatatctttgtgttcttccagcccaagcgatccagtgcgtggtttgtctttatctctgcgctccgtgaagttggccgacaatcaaactcaccctgtttcaccaacatgttcgcgttttatagtttttttcggggaaaggtggaaagtgtggctgtgaaggaaactagcctgttagtcgtgcagacgagcaatggcttgtcttggggatgtggaccgttacctgcactttacaatacgaggttttttgggtcagctccgtgctatcgcctccatgagttaatcgctgtctcttttaacgcggaacagcaccgacaccatccggtgggctagtgccacaacggttcttaaaccttccgcccgcggtctgaccgcgagaaaatacccgtaaaaatagtttagctgtatgtaatagtagaaaaattgttgacaggttaagtcagacgactcgcagcacgtcgcgttgtgtggctttgccgacgaaaaccaacgtatggatgaactaggcagcttgagggcagacagggaattctctgtttcgatcgaaatgacgagaggtggtccgttcaaaaaggtgatcgccaccgaatcgcattgcgcaaaagctgggatgaaaggagacaatggaagcagtagctagcaatcagagtcacttgcaatcctgcccaccttttaaaaaccatgttcagtcagtccggcgtagccaccacgccctctgaactaggcatccatggctcaccacatgaacagcaggaactatgtgcactggacgcaaatgcggaataccagatcagaaggcgaagtaataaagtggctagcacaatcaacactagagatagcatatttctgttgctgcgtcggtgtcggctgtgagatttccgcaggaacggtgcatatgagtactacgttaaaacatcgacagttctcgagacactgcgctgcaattccggagacaaatgaaacatgcctgtgagcgaaatgcgtgcacacatgttggtgttgagacaaaaacaaaagcagtaggcggttcggccatgtaaaacttcgaaaagaagtcggtaaatgcaggcggacgtcctcatggttatgtagttagcccacctcatttcacaaatgatccaaacacgggtgtacgaagaaaaagcagcgcaccacaactgcggggaagctagggacggaatgacctttcagacagtttggaagacgcattggcagtagccacaggagtaaacgtaaaactgcaccgtttcaaacgcgaattacagaccaacaactttttcctgtcttcgctgcgtctaaggtgacaaacccattctcaattccaactaggtttcaaaagctgcaggacggcactggcttttgagcacaaataagctggaaacagtagtacaactttcaattatgccccctccagccgtcacgcagactatgttctcagcaagctactgcaccgccagacaccggggtatatccgcgagaatttgcaaacaaacaaccatgtgtcacatgcgacaggaactgcggcagcataactcattgcgatatcgacgacatgattttgcctcaagcagttgctctgcgactatcgacatcacaaaactcacgaaatgctcccatttacggcctcgtgtagctgatcaaacaaaggcacacttgtagatgagggaaaacttgcggattaatatgagtcacgaatccgatcggaagatgccaccaacacaaccggcaaagcatccgagaaggacacattatggatggtgtgtctcattcttgataaacaactacgttgcctgggacgtaaggggtgctggcctgcacatcggatcgactttgcatatgcttcttcgtatttgtcgtagctactcattgtatcgagatgcattactgggtagagagcgcgtgtgagcgccagcggcgtcatgatcctctctgagatctctgtgcaacattgctgcttagagacaacaagctgttgtcaccaataaaaaccaaggtgacagcagaggatagtgccactcagtttggggctggaggcgcatgtggactgggtatctttttatggcgaggcaaaatgcactgcttcttgcacatacgaggaaggtagtaagggtaacactatcgaaaaaaggagcgctcgagcgtatacgcggtaccagtcgctagtgagtagggtccaacgcgacggacgacaatggtgattgctgttttgttaatgggcatctctgcacatctgccgcagtccgaagaaagatggcaataagaatcttgcatgtttcttcgggaccttctgcacggcttgctgttgtggaaggactgttcaagggtaaaaaatgtctgccaattccatcaacgctgtctgaaccacgtcgcaggacggaaacgtacttgcgaggcacccgacgatttgcaccagatttgagagtgtggtacttccttccctatgggcgagtaacagaaacctccctaaacagtaaatctttttctggccaaactgatgagataatgttcatctctcttctgccaccttgctgaacgattgcttgtactggtatctcctacacatctgtgtgagactgtatggcgacagccctggtgcgaacccagaaggttcgcagtagatgcgttactctcgtatgcaagccagacaacgctctgactgcactcaagattctcttcctctcagacctcccccctgctatggacataagtctaggtaggagaggtgtccgcagaggctatattgaaaacgcccactgctgctagtaggcactgctgcataagataccgtctttattcggctaccacgattttacccgtgcaagagtttcacgccagagcgcattccaccgaagatattgaaggccgaaacgcagctgcttgaatgtcggtctgtgtaaacgcctgccgtcgaaggtgacgtcgcgcacacgctgtacatactacatactgtgcacttgcgactcccgggacactgttgctttttcccctttaggcatccctacttttgaagttactccgtcatctacgagggaaatgccgcgctatcctactcgtttctgtggtgttcgatagagaaagtctccattcagcattgaccctggtgcagttctgttgttggccgactgaaacggggcggctttttttctgctgcatgtggtacgctgccgcgcacatggccagaataccggaaatcgacgactgcgacaagacatgaccgtttcgtccacttttcctgggccctaagcatcgctgcgctgttcttctcccggtttcttcctattgttgctgctgtgggttgcagttatgcgttgagtttttgttgtttatctgcgaggatctgctcacaagaactcggtaaaagacgtgtgggtaagccggcatcgcgcgtgtgccgctcgtttccacgctgagaggactgtgcattgtgcgcggtttccgtccgcgatttccgctttcctgtctatctgtttgattccacaagacactttggcttgcaggccgtctgcatagatcgttgatcctgtcatcgtccacagaagaatctgttttcccgtcgacaaaa

SEQ ID NO: 1322 - DNA, 4631 bp, Toxoplasma gondii
  source 1..4631: mol_type = genomic DNA
tggatggcttcctgtctcgctcgcgtgtctgtatttcttaggtacggcccccacttcgttctccagttgaatgccgcagggctcgacgacttcctcccggtccttcagccggtcatcgaagacgttttcgaagccgagctgtcgactttgcttctgcggaatgattcgccgttgagacgactggaaaaactccccttgacgaagtccttcctctcaggtacacggcttttttgtcgtgctgtttcggttgctaacagctggtgcgtgcaaatatccgtgctcctcgtcactcattccagggctgagcgacggtgtcgtctggagtattgggcatcctccgctagcttcggtttgcgtatgcaactctcccggctgcatgtagactgttgtctgtgaaacatatagttgtcgtctcgtagaagaccggggatgtgtctggtaatgtacgaaatgtggttcgtgccggctaccagcttctgtacgcatctgacggcatcgtagatattcacccggagttcccttttcctggtgcggcgcgctggttcagggtatcgcgacacccccgtcgaacttcttgaaaatggaagcaccttcctggtcgatctccttgaaggcgaaagaaccgggtggaatttcgagcagcgacccactcgcgaaatgctcgctcctctctgccgccgccgaaccgttctcggtcagcagtggaggcatcatgcggctgaaactccttgaaaaaaacgttggcggcgccgagcacagccagcgctacaggaaaacacaggcgacacacaaactggacacagcaatccgtgaacgtagttgaggacatgtgtaggaaccagggccgccgcggttgcatcagttgagagcgaacgctagagcatttctttcgaagaagactcgccggctttgtctccgaaatcacgcaactcaatcacggcacactgtcgcacgaatgcagaaatgtgtgcaagtgcatttgcacatgccgtttgcgtacaccgtatgattacgacatgcggccgggataacggctgatttcgtgcttacttttagacgaagtctcgcacttgttctgcctaatggagaaacaatttcccgagtactgtcagaaatttggtgacgcctgctgaggtgcggtcaccggcggcgtggcccaatggatagggcgtctgacttcggatcagaaggttgtgggttcgagtcccatcgtcgtcagctgaactgtaatgaagtttgcccatgaaaacgtggcgttttagagttgccaaagagtccctcactgtagctttgtctcattattattcgacgacattttctttttacgcgttttttgccggagcgtggtcacgtcttctgttcctggtcataccgcggtggtgcggacgttccacagtatcaggggcaacgtcatactctcatttcttgtcgtatgtccttttgctctgcttttttccagatctgttttctcacggaggcgcgttcggcattcaggcagccacacacggggcttccgttgtggtgtgcgttcacccgtctagtgcgtctgtagagctgggccggcggaacatcgaagccaacagcttttcagattgcgcagttcacgttcaggcagacatccttccttttctgcttcagctcgccacagacataaacgcccatgattcacagtcaggaggttctgcacgtaattctatcggaacgctcccgtcgtccgcggggaaggacgcttctccgagcgactcccggccactgttaccttggttgcatgattccgtttcacgcgaaagaactgcagaagcggttgcagtcgcgagagcctccggcatagaaaaattcgacgttgtcgtgttggagatgccgtcagtgttctctttgtcagcgtcgaaagcggccgaccacgttggacaaattctgcgggcggcagtcaatatcacggcacagggggggcttcttctcataagagtagagagtacggcaatagggcgctttgaactcctttccctcattagaaggcaagtctcaacatgaacatgggactgaaaaaggatccaacaacacgacgaccgtttttgtagatacaatgagccggctggtgtgccccaagatgagaacaaatgaagtatatgccgcgacagcgaaatacgaggagaggcatacgagttaatagcgcattttttctagtggagtagtagcccaagtgaagccaaagaatcttatccattagtccaactcgcgctatggagtaaagaggtatttggggattcagggatcgaatctcacacagtaattcaatatcggcgggggacggcgtcaacactaacaaaccgtactggtcgcgtggcgataatgtcactgaagcacattcccgtgatgtacgccaagtaagtcgacgtaaaccacagtcctaacaattctagcggtccggtggacggcaactgtgtgactgcctgtgtttccggcaatgaagagtgctaggctttatttcttatttccaatgctcttttgtgtgctccttcagaacactgcatgtgtgcggcgaacaaggaagaggccgtggaggaaaaattgtcggcgagggaagcctggcaatagaccatccgattaacgttgcgctccctgaatcgcgacattctcactctttcctcattgccttggactgaccggggcagagttgttatttattgtttgtccaagtccaggctaatgacaaagaaggaaggaatcacgggatgtgactctcgctttcccgcataataggatacggggaagacgcagaacgccctatttgcgtttgtgtctatcatgttattacagcgagactagaagacggaaaccggaacctgatttctcaaaataccagcgagctggtgcggaacttgagtcaggttgctcttcggagtgtgcactgaaggaagggggtagcaagcaggccacgtaccaatgcagaggatttcttctctttctttggctgcaccctttatcttatgggcggtcgtgcctcctacatctctgtatatctctgtataaatgcctgtgttcacccacttcattgggtgaatttgaaggtagcagtgtcgtctccaccttacagcacaaacgcaaatcctacgactctttagctttccacactaaataaaataactcagccacacattggcacagccatcaggttcctcaaaatcccttgtagatgctggaagtcccaggaacccgctatcgctgggtgacatctgaaagcttgcactttcccctctcgatgatgtaacaggaagagcacggggttggttcgggggattcaagtgctagcagttttgtcgccttttaggtaatgcttaccatttggcccaggagctgtttgcgccgcgtccgctttcccagagacattaaggcggggcgtgctgctgcgcctctattggtggtagaaatgatactcaaacaagtgctacttgtgatctgcacttcttccaagcgtcatcgagtagcaagctcgggggagacgtgtcaacctccaaagagattcttgtattgttcaaatcgtttgttgttgcagagtaagccttgtgacggtcgtgagacgcagctgtaccacgctaacgatcgactctctgactggtctgcctcacgctcaattttcctttcattcagccgtactctgcgcaggaataacgcatcttaggcccctcacatctattacggtgtcagggcaaaaaatacctcctgggcatttcctgattatacccaggatctggtttttcatggtagtgccccccctcgatcgtggcgattcctcttgctgctggaaagttcagaggccgcaccctggcaaacgcttcgctatcctcattatagtcgctgttcctctctaacaagttttccacttcttctcttaagactgtggctaggactcaacaaccactggcttcggatggaataactttttgcgccgcacacactggcgctagctgtcattcaaggacgacacaaatagatggttgtggtgctaaggaggcgactcttatatcgattagccaccaattcaggtgtgtagcgaaacccgtgcttcttttcgtcaatgctatctatttgtgtcgccacatgtatctccacctacacgactttccctggagcatttgttccgttcttattcgctatggctcacagatcggacactccggaaggaaccccgaggaatcatcagaacaccgaaaactgagaggcactgctggctaactgagattcagacgaatctttctgaaagcgttatctgcagacgcgttttccccgtgagtgtcttgtggtaacgttgaccaagttactgcatgcgatatcgaggaactccgaaaggagtttcgacagggaaacgctacatctgcgcatccttagcagaggcaactcgtttagatgacacggggtgacacgttgagctacaaaggcggctgaaggatttataaaactggaggaaagcctcgatgtctttcacctcgcgttcttcaacgcatgcagcgattcgccaggccctccattttctgaacgcctctggcgaagtttgcattctttcgactttttcttttctcctattccacagtctaacttcttctgtaagggttttgttctccctttcctctgca

SEQ ID NO: 1323 - DNA, 1829 bp, Toxoplasma gondii
  source 1..1829: mol_type = genomic DNA
atcataatgcatgcatgctgtgcttcctcttttgtggaggtgaaccccgccagcagtgggactcaaatgggggaaagcttctctccgtttcttctcgtttcgccgaccacagggtagaaatacgaacgtgacgtacgcgattagcaagcatatctgcgataatgcaccagcacacatacaacgtcaaaatgtcgtgtttacagccgccacagcaatatacaacggacagaataagatccggaagccgagctatctaccactcaaattacggcccggcacggtcaccagaaagttttgcgaagagagtagacagctcgctaggacctacggctgcgccttcgcggcagcgtttttcactcgacaatcaccacttgaagttgccgggtttccacttcatccgcggacaagggcccgagaaaagatggaaacattgcactagcgaagacactcattcaactaccaatgaaaaaatccatgtctcagactctccttcgagttcccatccgccgcacagtctcgcacacacggaaggagacatgtcacgcgtgagtcatcaacttcataccgccagagaacatgctaacgcgaggagagtggcatggacgggcatctgaagcggggcattcattttgtttgctgatcgcggccgcggcagtcgtcgacaatattaagtctaacgcgtcagtctcggacgctgggtgtggcagggaaaacgacattcagcaagtgatgaagagctttagtcagtagggctccagcgaaaacagggacggttcgaggaagaagttcggtctgctactcctcacagccgcggggctacgatacagagtaaacctaaggaaaagctcggaagtctagtctgctttgcatccccgccctcgctttagacgatgccgtaggactgtaacaactcctactcgtcaagcatattcgcttgctagcctggcaggatggactgccgcttcacacgaactgaccggtaacatgcacaccgttcggcgagcgtgccggatggcaaacaccgaagcaaagatatctgctctttcaagcagcgtcacagttgccctgtgacgtacaaggtctaagtccaaatcagttatcttctactggcttaacaagcgtcacaacaaatccaattctgaaggcaacttgttaacgaaagtggagtgtcacacgcgaccttgccggaaacaatcattagagtgatatggaacgaactgattaagaaaaaattccgacccgcctgaaacagtttcacccacttttttgggcgtattcccagtcagattggcctttagtccgttttctgccaacggtctatgccgatgtagtgtccggtgcagtgtaccgtgtccaccgttagctgttcagcttctgtcctgcgtgactgttctcaatacccttccgcttcgcgcgcccccgactcgaggagatcctctatagttcactacgaaaaaaaacactcctgagctactgggctgtcgatgtcaatgatcattttcccagcggcaccaccacatcgacgaaaaatgcaaccaactgtcatggtggaactctggtactatgtttctgaaaagttgtaacagtggtcagaatggttagacttgcatcttgcaactggctgtgctgcacagcagtcgggcggaaaaggtggggtaattgcttctgcatgcggttctgccaacggctgttggtggcttgatgtaggtccttgttactgtgcagcggaacgaataccaacagctctgcacaccaactccgcacgctttcgcttcagatcacttaaccgtcggcatgcggcatactctgtcatgttttcacaagacaaa

SEQ ID NO: 1324 - DNA, 3094 bp, Toxoplasma gondii
  source 1..3094: mol_type = genomic DNA
ctttctctctcctgtttgcttccctcttgtctccgtgtctccggtctccttgcctcctcaaagagtcggctggaaacgctgtggagtgcgtcggggacgaacgcgaagggcgccaaggccgaggtgaggtgctcgcgcctgcgctggcgcctcctgcgaagtttctcctgcaagttgtctccttgaagaagacccgatactcgcaaaaactccacagatgcgggagcttcttccgcgtctctcgctcgcgccgccgccgcaacgactggggagtcttgacgcttgcttgccctgtcgccaggcgacgaagaagaagacagggaggaagaaggacagggtgagggagaagacggtgagggagaagacggtgagggagaagacggtgagggagaggacggtgaaggaggcggagaaggcggctcctgtctcaggaaggagaagatcgaacgactggagacagagtggaggcaggagaaaacattcaactgcctctcctttctacaataccatatttggaagctcgcagacggacgagtgaacgaaaaagaagacaaaggagaggaggagaagggggcaaagcgattgttggaggtcggagaaggccccgtaggtacgcgaagagcagttgcagcagaagagaacgacgaaactgaggaggcaacgcatttgaggtcaggaccacgagcataagtgcgaggagcaaagaagtcgagacgcagaaaacgaaagacttgacgggtggcgcagagaggagaagacgaactcgagatagacgttccgtcatcggtcggtttcttcagctgctcagcttcgacgttcgcgaaaggagaggacgatccagatgacgcagcaagtggagaggacaacgaacgagcaacagatgcgctcgacagaggacaggagtgccagagaggagaggatggcgagaaacagcaaagcggcgtcgtgaggtctctgttcccttgcgtcggagagagcaagaagtctcgaaataccgcccgtctcgtcactctcggaggaagcgaggcgaacgacgagaacgaagcagtttttccacgagacagagaaggcgacagaggagaataaggaaacaaataggagttgagagaaggacgcagctgaggagcgaagcagcggttgtgagggagacggaccggctgcgttctctgcgtctgaggaaagaagaggcgcaagcaaacgcgcttatttctcacttcgcgcgaatcccttagtccggagttacttctcagaggcgctgcgatcgccgcctctccccgtggcggctgtggccgagatcgccagagagcacactgtgagagcgtcatcgcggcctttccctggaaatgcaaacgacaccctggaagaaaaaggtctgaaaacagtttccacgcggcatcacgagcaggcttttctctcgagagggacaggacgtccaagaaagaggaggaaacgcgagtcgttcgatgttcttggtcgtttcaggtattctgcagaactggagagagacgccgtcggaagatccaaactggagccgcggcgagaagacgccggacagctcggtcgctgcttttgtcttcgctcctcgtcgttcttgcgcaggaaattcgaagaggtcaccggttcggaatccccgtcgacgcctttctcctcacccgttcacgacgcgagagtctctgtggtggctggacagaggttctgctctctgcatgtgagcgcgaagcactgcgagttttgacaacaacctggcgatacgaaaagagtggggagatagcggttggaaaggaaaaaggcagcgagaggcgaaaacgttacaggagacgaactgatgaatttcgcctcttcgctcgacaaagcgcgaacccgcagtgccgcgtgtgttgccgccacatcgtcgctctacgccaatggggaggcgagagaaaggaaaaacaagttttttgaaaactcgagggtctctctggagtgtgtcgcatctcttccgcccttgaaaaattccgatttgccttccggaagctcaggaagcatgcaaacagacgcgaggtgtgcagatgcagcgcagagtcaaggcgcctcacgccctgtctccgtggctgcgggtgcctttcttttttcgagtttttaccagttttctgctcgcagagacagcggctttcgaaatctgcagtttttccgcagttttggccgcgtttttttttgcgggacagaccctcgggacgccttctgctgtcgcgctgggtgtcgagagacaaacggtaggccagcatcgaaaactggaccacacgcaaacttggtgccgctcgatttgtccgcgtttacggtttttagggtctacgctcttttttcgagatgcaagaggaacactccgatttttctgcgaaaaaaggaaacccagttttcttcctcagctttcgtcttgctttattctcccctctccctgggactctgttgttggcttcgcgtttttcgctgctctctgttgtttcgtttgtctcctgctctctcccttttttctacgcgtcgtttcgtcgccgcctgcggagagagatctctctcccttgtgtcgcgtcttgtcgtcctcgtttcctctctgtcccgtgagttgcggcgtttactgaacaaaaaggacctctcccttcatcccgttgcctccaagtcgtcttcgctttccactgcaggattttctcgagttcgtttcgcattcgtgtctgctttttctcgtccagttagacgcttgcgagactgtttatctagtaactaggtctccaaatactatgtgtgcatatgtctgtttttgcctgatgttatccgtgcaagtaaacatgaaaattgcgccatgtgtctctctgtccacgcaacgccctaggagcctcgacagccagccgtaatacccgctcacccattaaggatctgtatggatatatgcggccaacgaagaaagaatttctctttacgcgttgcctcacagtgcgtaacgacgcaaccccgttgagcgagagaatttccttgtccgcgccgagaggcaaggcgcacggtccctcctgtgtctgttgtgtccgcgggatcgaaaacgaagactagcgacggagagcgagaa

SEQ ID NO: 1325 - DNA, 4428 bp, Toxoplasma gondii
  source 1..4428: mol_type = genomic DNA
cgcaatcgacggcttaactgaacacaaaaggcagaattcagcatgaattagaagttagcaggtcacaggacccggtcgcgaagtcgtgcatcacaatggccacggaccggcaccagaatcgaagacgaagtttatttccttgttacctcgagatcttggaaatattccagggtgtgaagacgaggaattctgagtggcgacactgtggtaccgatctatggaatgggacggagccagaagaaaaggcatctgtcgcgcagcttcccatgggatcgctgcgaaacgataaaaactgctgtatttctccagttcagcttccacacacagaacacggcaaaacatccagcactgtagaaagaagcagaataccgtgtgaacccaaacatcgtgacaagcccacttctgcggcttgtatctctggcggaatttacaatttgatgaaatagaggaacgcagcgcaagcgaatagcgcaggacggaaacccagtaagagagttgacattccctaccgaaccaaccttgtggaaagcgctcgcaggaggcccaagaaacgacagcagaataaatacgatctcgtcctggagttcgtgaatataacaaaagtccgaaggatcttgcgtggcaacaaccatctgccgttcttgctctgatgcagccgaagaccgcccagcgaaattcgtatctggaaacgtggtaatcgcttttgatctggcgtctgacagagactcgccctttacaacagaaaacgtgcttgtgtcctcggtagaatgaagtctgagaatcgctttcgcagctcttcctctgggacatgtgtccatgttttcaacaacttgcgacgtcagccacgcggaaggaatttagggctgcagcaaatcgtgaggtgtccagggggttgtcacgcgtttgtgatctacgccggcggaaaaactcgagactacggaaagagacagaaacacagacgcgcctttcctctccgccagcgttggcattggctgctcagatgcaacggcctcgttgagggcgtcgaacgccgacgatcgctaatacggtacagatgataggatacatgttttgtgccatctgataaaaaaaatgagttaagttgaatgttcaaactgcaggagaaaatcgacatccagtgatcactcaaaaacgccttttgagtcaagtgagcgccaaacaacccggcgccgacatgatgatacaataccgaccggtttgtagagcacgctcacaaccgtacggttttttcattcgtgcatgccattggattagcgcagatatcaagcttttgacgttgacaagtcacaattgacggaaaagactactttttagtctctctagcttttgcagacataagtaacgggggaagcctctactctgcctagcatctctaaaagagcatgcatgcattgttagacgagctgtagaacaggtccgagcgctcgcaacaggcttccgagaagatgtgaagagaaaaacttaccggcggaagacgcagacgtctaagcggtgcaccgggtcttccattcttagtcaatatgcttcatcagcgaaatgttttaccatctcctttgcacaatacccccgcgaatactggtggaaaatgcgcggaactaagtcactgtggtgagggcgagacacaaacaagttcacacggctggtgttctctcaaacgcagaaacctccaacagaagtcttccgtatgacggtcgatccgcaagttccgaagtgttgtggaacccactacggaccataggctgacgtctctggaatccgcccgaaatgacagcaatgcagaatcgcgtcagcttttgcccaagcgcccaacccacggaatactgcttgaaacggaagaaggcgcatttgctgtgcaagcaccaagtctgtctgcagcaggccctctctggtttctttttcaagggtagtattcaacgacaggttgtgacagatcggccttcgttggtttgtggcttgttggcaagcattcttgtccaaatacctaagttccagaaggtatcgtacaatccttgtccgtgcgcggtaatatggtaggtgacgttgttgccgaactgcgcggaggtaagtacgagatcggaccgctcacgattgtggcagaagcgattttagatttagcacacaacagcattggtatcgaaaaaccattccatcttcaaataggttttccgatattagcaagagtcgtcagctgcagtctgccgcctcctgtgccgttggttggcagccgacaatcccagtgacgcagctacactgacgaacagagaaaaaatgcgttgctacggcctgtgttgggttgagtgaaaggttagggcgctcctcatggtacggtgttccagttggggtgatcttggtagcgcgcagcggtaaagcgacacacgttctcgcaccacagcagtgagtggttctgctcttctgaaacttaaatcttagaagcaccgtttcgagtcagaagctgaagctgcgccaaacgcggaattttgaacacaacatcggaggtgcttcccaaaagttgtatttctcggctaccactgatgacgtgtgcggcagatctcacattactgaaattcatttgtcacgttcctgagtgagcagcacctcttgatttcccggagtggttccgtttcgactccagtatgggggagagctctggttgccacacggttgtatagtagtgttcgactagaaacaatgatcctcattcgcatctagccgacctgtcttggacggtttgtgtcaccagaaccaaagagaaggacgtcgaagcaagcatcggtccttcacctaggagcttatcgcctccaatgcaatacctctcacatgtcatcggctgcatcctcaaaatagaaggtactcagacaggaacatttaaggaaaaactaacatgtgagttaggcctgacgaggcagtttcttttctgtcctgcccgcttcctttgatgaacatgttctctggcacctgcctgggagctctatgactgttttctgcgcttcatcaccattgttgctgaaatcgctgtaaatatcccgtgtacagcgcggacagtaaggggcgttttcaagcgtacaaccccctcaaagccgtcgattcggccaaccgtccactgagacgcctgcccacattgtttcccggcttgagtcctctgttactacaagttgtcaccatcaattactggatatgtaaagtgcacaatagctcccacatccagccaggcagctagtggtgcatcttctctcggaatctgtcgaggtcatttgacagctaatatacgagcttattcgcaaagcttcgatgccatccgtcctctaggaggtggcgcaatcttatcgctttacaaatgctctctttctcgacatcaataatgcacttcttcggttttttctttgtgatccccgacaggatgtgcttggtcatcgagtacgcgatggagcgggcgtgattctgccggaaacacggaatccagcgcgaggtactacttcaagaacacggcggttatccttaactactctctttaagtgtagtttttatccgattttttcatatattgccaaaaaaagcctatatctgaaaactgcgccgactggatgatactggcagcggtgtgtaactggtatgcgaggccgacattctgttgcggctcactgggaagaagcacttgtgtcagacggcaggagtgtgtttccttcggcattgtgtcatgccacaaatatattgcactcatgccaaacaggctgcacacacgtcaaaaagctgcggttgcctctggtcatgaagcatgcagtcagtggatttctctgggctccatctccatcgtgcagtggcattgactagcccttggccgctgaaatccaactctccggcatgaacacgatgcatttcacctttctctatttgcgaaaactttcatgaagtcacaagcaacgactgttggaaaggccgtgctcatcagtacccgctgcggacagcaccccccaacatgacagtaaccaaggactcctgctgcagatgattgtgccattgtcaaaacacttttccctttcccgctcaccgacggcaagaaaacgagtcatcaaaactcaactaaaagtcatactggctttcgcaaagacacgtttcgttttcacccagtaattgcgcttgttgcacgtctctcaaccgaaactactgagaaagcggatctacatacagggccatcgcagcgccctcgcccacagatgaccgctacggtttcatctgcaatgcagcacattgactgctcaccagagctatgcgcgagataaagttctatcatatgggtgagtgtgcgttttcgactgtagttgagatctcttgcaaactggaggtgcttgtaatttcagcgagaagctacaaatggcacccagacgaagtgctcgtgccgcgcgagcagca

SEQ ID NO: 1326 - DNA, 2424 bp, Toxoplasma gondii
  source 1..2424: mol_type = genomic DNA
agtcatactctgcttcgcaacggtgcatgctgcaagcaacacaggagcagccgggaagctgacgatgaacgggactagagcgcctgatgaaccgaacagatgtttttccaatccgtctggtccaggagacgcgcactgattgatacctctattttgtccttcctagcacgttctgggactggtgtcgtcatagcgaggaccatgccataacttccttgcaaacggaagcttttggcaaaagagcccacactttgtaacaccggaagaatgtgaaaatcaacgcatataaaacgaaagcgcctggcacagcactgctgccactcctcaaaatgtggcattcacttagtgaatgtttcagcacaagcgtcggtgatgctagttttcgcggactacctcgatgcatccacaaatcatccagaaatgtaatatgtctctcgggcttactgttggcatttggatcagcgggaactgtcaccgtgacgacgcattttgttttgcctctgtttccatcagagttctgagacggatcccccgttggcgcccggtttgcccccgatgccggtgtggtgctgcaagcgaagtagatggtatctgtcatctcagggagctttcccactgtcagcgagacttctgcactcgtgcccgatgttgtgcttgccgttttgacattggctttcgatccttcgccgaaatgctcggcgaggggcgtctcgccctggagatttactctcgagtaacactttgtgatggtgttattgtctcccggcaacggcaacacgttgcccatatcggtaccacaactaaatgagaccttcttggttgctgggtcaacttcaacggatataccccctttagctgccgcgtctgcgttgcagatcttcgtagaaggggctccattcgtcccctcagcccgtaacgccgtagtggacatgagcactacgacgacgaaaaacaaagagcccatcgttatcaaacggatcgggacaacgctaatccttgccataatgtctacctgtgtgaaatacagaggcacacacagacaaaaaattactctccctcagttcgactcagtctagcttctgtagtcacactcagacttaacgctcaggggctggaatacaacgcaacgctttctttcaagcatgtgcactggattctaacaagtgagtggctcacaagtacacgattccaacccagaactttttgatagagagtgaccggagaagcgtgtactagactgtttgaggagacgccgaaatacctgttgtccacctgaggatggtgccgtcaccctagagagcctttgacttgacagcaacgccagaattttaggcagcgtttatgcagcagatggcttaactgcagaaaacaagtagcgcattcacatatctttcctaagttggagtgggtgtcgcattcaaatctcttaattgctgttcaccgtgacttgccggcagagtgaacagctgcggaagcgatagcgtcggtagcgacgcgcctctgtcgaggcgtgttccgttagtggggggtgccggagcaggcgttcttagtctttccgttagaatgccacaaaatatcgatggcgagaggtggtagaaaatctccacccaaactttgaatcagatggtcaaggtgcgcctagctcacgtcaaaaggctagcgtgtgtctaccggttcgagtaccgtttttcggccgcagtgcgttgttgccttggagttgggtgtcgattttgcatgcgcgtggccggttattccttgttttacttcaggagtaaaccttgtcttgcagggcaagagtctcattctcacgcatcgtaagggctattgttagtagcagacctttcgtttcctctgagaccatctcctgatagagcaaacatgatcgggagaggctctttgtctcgttcgtaggttccgcaaaaattgtctgttatccagttgttctgacccgccgctacatgcatgtacttccgcggtgtacagcccaaatgttgtcaggttcctgctttgtttctcaatcgttgcaacactgtgtttcaccgcggaaagagtaaagacgtttcaccaccgagactccaaagtcagccatgaacacactatcgacgcctgcaagagtactttctgcaaccaagactcctttccttccaaatccattcccgtcacatccgatccactatacgcactgatcgcctggtgtcgcttcgcccctcctttcaaccaagcttcgggtccgatttaccttgtgtggcggccctctcctgcttttccttttgatttgttgtgagggggttgacacgtgggcgacccgacacttcgacgagcttcgtcttttccaaaatggggtttctttcatgcgcccaacttagcctctgttccagccggagagttgcctcccaggagtgagacactatggacggacgacga

SEQ ID NO: 1327 - DNA, 2072 bp, Toxoplasma gondii
  source 1..2072: mol_type = genomic DNA
ggctaaactctacaaggctttgaaacgcacaggaccaaaacagagcagaaaggctggagttatctcgcttcacggtatgccgtatcccatcccagcggacctggatgatcacgttcacagcctgggcgttcgacgagttggaaatgttgatgtatgcgctgaaggtctcgccgctaaaaattctcctgagcatgaccacagtttacaaagaaggagagcagatgttcagagttacccaatttgcacaagtgaccccgcagctgccaaccgggcctggtgctttcttacccctgcgatgcaggcaacagcagcgcgtgcgtgctttcgagggctcgctcaacgcacaccctctctcgttccagtttcttctttaccgattgatcttcagatgtcacctcatcaatcctgagcagtggccatggctcggcgtagatggaaggctgcgacagcctcatgactttctgcgttaacacagaaagcgcaagccagacgaaaagagattcgacatccggatttcgtcgtctcaagcgtccttgccgttatcacctggacaatctggacaatcaaatatttaccagaaccgtaatgggtggtttccaatggggcgaagcaaccgaacctaccagagttagaacgtcacgactgtccgacgccatttggttcagcggctggaagacgacggcataagtgccccttgaaacgaaacaaatgagatggtatgtccagagaagttcctaaaaatctacattacccacgggagagcatagttggagcaggcacgccctttatcagaagcgttacacatgaggtaaagttccatccagtccgggtgtgtccaggtgtccatagctctccgcatacggtggcggattcagaaaagccacatggcttggttttattcacgcttcttgtaagatatacatggtcctttacaatattctgtgattggttgcggaggacactctcacaaatccacagaacacggaaactgggggtcgatcttcgttgttcccagttttatcaagacatcattaccgatgcttcttggactctccatccatttctgcgtacgctctccgttgctcactgagcggagtgaaacgtccacaacttacacactttgttcgacgagaacgcgtgagcaagactaatattttttcaaaaacgcctcagcatgcatgtgctggcttggtggcgggtccaccgcatgcaccgggtactcaagtaaagaacttgaaggagagcgtgaggcatcatgtaactcgcataccagtatattatggcagtgaaaaaattggtgaagtcgcctgtgggatttgactcataggaattccaaccggctagttcttggacgctaactgccgacctgcgggaccgtcagtttccatacttgcagggaaacagacgaggacgcggaactggtagacaccctagaaagtccaagaaataaggcttgttcgggacagctgcaatctagtgaggagcttccgtttggtgtgagagcagcacccagagtggagtaattgtagagtagttgtaacccgcccaggctgctgtggcttcgcggcggtccggggccgcatttgggaccggcaatcgccacttaacggctgaatgccaagcaagcaagcgatttttagattcatcatgaaatctgtttggaagaagaaggctgggtctcaagtccagcactacgccaaagagtaacagtactggatcgttttgctccctatggcagtaaataacgtgcaacattgaccgccgtcggtgatgcttcgaacctctcgcagtgcttgattactgcctgtcacggtgtagagggagactgcgacgatttcccactgaatttccaacatcctggcattacagtgtagctagctcaggatccgccaagcattgtcacgctattcttctggtcaggctggtgctgccataccatctttaaaatgttctgtacgtacaccagagagtcctggttggattggacaactgtgtaacttgttttcccctcccgatcaatttgtgaggcagagaaacctgtcgtcattgctgcctccttttcccctcaatca

SEQ ID NO: 1328 - DNA, 2203 bp, Toxoplasma gondii
  source 1..2203: mol_type = genomic DNA
gaagttcacggatcagaccaagcgacttcactgcaagggtgtcggaaacaggagactgcgttgattctcgggagcccgacttccgacccccagcgcagattggtctaaagaagttgccgtatcctccagtgcccccccccgccattcggaacatgtagatcatacaccgtgtcttggacgaagtcgcattgaaaatggatacttattatccgctccacagcagagctgacgttgagactccgcggtttctcctcatcgagtatatgttctaggctccgcattgcatgagaacgcctcttcagatgcaccgagcctcaactttttgatgcaaagatggactccagacacgacgtccagcccgcagtttcgaggagttttgtgtgtcctcgaactatggaatacttttgttcactgagagttctgtcgacgcattaacgagcgcagaagaagaaagtttgcggcccctcccaccacgcacactgcgcgagtgcctaccttgttggttgtgtgtgtgaatgtagacgaggttgtttttgaagatggcgtatcgcctctgtttttcttcctcagtcgcgtagctcttggcgtacatggcttggaagctgctgaaggcgtcctgaaagtgcgcctctttccattcccagatgttggcggggggttggtggtcctcaactggcgacggcgggaagaccgcgcggtcgtcttcgccctgccactgaatgaggaacgaggcaaagacaaggagagacaccgccgcagccacgagtgcgatccacgcccgcgctgtgaagttgcgttgacggagaaatttcttccagaagtacgtgcgggtcgtaacaacgaacggaggactcggccggccagcgcggacgcctcgtcgctggtgaagctcgccgttctccagcccgtcgtcctcgccgttgaggaaggagacgtagtgcgtctcgctgctgtccatggtgttcgagagcgaggccgcggggtaagagggacaaacggtcaaaactctgcgaaataagaaaagtacgggggaaacccgcgaaccgacgcgccgctggggggcaggctctttttcgggagccggggagggccaaaaagaacgtccaggttccggggtaaggatgaaaaaagccaatgttcagcggttgacaacggaatgctgtcgctttcttctcagttccgacggaaaacagacagctcagcgggctttgcggcgaatgacgcttgccgacaacggccgagaagccacaaaaaagtcccgcgagcggtcacggcgtgttgcttccttcgagcctcgacgacctcgcgtctcctgtcgcgttccgccgaaacaggcaaagtcagggccacacgaccgcctcgctcggtccgagaaagttcgctttcggtgccaaaactatagcagagaaggactgccggccgcgtcggcctggtcgcaagcgacacgcgagcctgaaactcgttagctcaggcgcccggctcggatcttcttttcgcgaaaagcggacctttccttccactcgtcgtcctagcacatgcgcggcttctgcgccgcgcccagcctcgtcgcgcgcctcctccaaacatgccgtctagcacgagtgaaaaaccacttttgcggaagcggacgagaaccgcgagcgcgtttctttcgggtgtcatgacacctgagaagccgggcttcccaggcagtggcaaagccggttttctgccctgcagaaggcgagagcgaagcgcgcgatcaggtctctttcaaagacgcgtggaaaacgtgagacgattttcgtataagccgcccggcttttctgtctggcgggtgtggacgagcggccggcacaaagttgcagaagggggtggtgcccgcgcgcgcaccttgtttagtttgcgcgcacgagttagagaggctgttgagggttcgtttttgaggggcagagcagacttcttcgctcaagtcgagaccagctgaggtgcgccttgcgcgaacaccgcgttttccgcgaaaaactgagacggaggctgcttctgcgtgtctgtgcacagtgcgaacacacccgagagagctgaggcagcggtggccgaaagtggggagtgtgtcgggaagtgcacgcgaggagacttttgctctgctttttctcttttccgtcgcgactttttttgcgattcgacgccttttgtcaactaagcggaatctctggaaaaacca

SEQ ID NO: 1329 - DNA, 1612 bp, Toxoplasma gondii
  source 1..1612: mol_type = genomic DNA
tccaagaatggagaacgtatacagagtcaccattttacgcttgattctaggttggtgacgaaggacgggaaggaaccggtaagtgcccagcataatggaaaggctgctcggaggcgctgcgattcaatttctttgtttgtagtcatcgcgcttaccggcttcccaaaattcatttctcgtcttcttgctggtggatcatcaggttatctattgcagcgatactgtaagtcacgtatgcatgggggatcggcctacattgtaatttacccttaattaggccctcaacaagggatttgccaaagcggagggatggtctggtcccttataggattgttagcaggtgccgcccagaaaaagtgaaaaacaacgaacttgaatggatactcatctcttttttccagtcaccactccggttgcattattaacactgagaaaatccctcgacacaagtaaaaaatatgatacgaggactagtacgaacccacacttgtaccataaacgtttcagacagcagaacaccatgcgacacagaaacggcccaagttttgctaaaaagacaagctgctccttctggccaagatgatttacccagccgcaatgtgaagctttcctctgatagcacttgagcaggcagttcgttaacggcgaacgagaagggggagacaatcgctcacttaggggtatcgggcacatttgtctggagctctttgccgacgatggtgtgaacgtctgtgtactgcgaaaaaaaacaggttcacgggcaacaattctgtcaatcgttcagcagtgacgaacaagactatctgcagaaaggccaggtccgtgcaggcagcctacatctagtctcgggccgcgtatcacacgttaatctcaccttattcacgcagcgatccaaacagctgctttcgcctgcgtccaacgttgattccttcacgtcagctacacacttagtccagcatgtgtcctgaatcctaaaaaaagagcaagcaatacaaagcagcgccacgggtcgaaccacaatcttacctattttgattacacagacgtatgctgtatcaccaagcaacaacaggacgactccaaccttacctcctgtacaagtctgccattcccacaatctccaccacagccgcctgcacagaatccatcctttcagtcatcagcctttcccgcctgtttcagtgttgatgtcagaggagaaaaaaggagattttaaggagttgcaccaaagtctcctgcgcagttgactgcgacttcacgcgaaaaagtctgcatgcagggcggccgaccacttagcatgcggcgtagccgacaaaacacgacgctagtacggactatcttgactccactgaagagctatcacaccgagtgtggctgtttcatcttcacattttcatctccgctacgtctctttatcagttcatgccattcaatcgcgttccatcatcctggtgttttgaggacttgcagccccacagaagcggctgtcgcttgacttaaattaccgaaattactgtatcttgcatctttttatccacggaaacattttaatttgcgatatctctgcagtcctcgacgttttctcccatttatattgttcagtgttgcacca

SEQ ID NO: 1330 - DNA, 4819 bp, Toxoplasma gondii
  source 1..4819: mol_type = genomic DNA
ggcatactgaagacggcaatgactggaaagaaagtgaaaccaattgaatacgtatacacagataactgcatgcaaagacatgcgtagacgcatacatatatatatatatatatagatagatagatagatcgatagatcgacaccgccacatatgcatgcatacatatgaacgaaaacacacaaatagacgcctatacacgtgtgcagtcatacatacatacatccacgcatagacatctgggcatggacatctccttatatacgtatacataaggttccaaatttgcagttgtcctctggtgaagacgcgagtctcacgtatcgggatccttggagagtcgcgggagattcaccgccttcacgtagccaagattgcggctgctggcagttccagatttcggcatgttcgctcgtgaagcggccccccaggtccatggcaagaccaccatgttcggttttctcttttatcttgcttccctcgttcttccggtagctcctgaagaaaaatacggaaaccaaagagcgccgttgccgtcagtttgaggggtacggaggtgctgtgctcgctggtcgtctaccgaccgcacccatctaatggggagaggagggagcgaaaacgcgatccttgcaaacgacactttgcaacgcactggagaagggcagcgacggaaaaaacgaagtggttcaattgtgagagtgacgtggaggtgagactgtcagtaacagcacccgtacggtacaggttgcgaaacatgaataacacaggactgggatctcgaaaagaaaacgacagaaagaacgggctgcagttttcgacctgttccagttggttgagccagcgtggagagcagtgtcatccttcgcaaacgcagtgtgtcggatgtgcaagtcttcaccgcacaggagcacctgagaaagaagccacgacagtgtttgtcactggcagaacgctagacggcgctcacaccgggaactcgtaccagacaagaaaagggaaccctcttctgtggccgaaaggcgtgaagtggcaacggctagcaaagaggtgacttgcagaggaaaagaacgaaagagtcactggcagggaacgaccgccggagagaacctcgctgcggaaacgaagaaacgcttggatatcgcggagaaacagctctccgcgaaaacgcaaacgatacaccgcaatccccctcgaaaaattcaacacgcgactaaggtgataaaatcccagtcccatcgtccagcagatatcgacggtcctcagagaaccacggaaccaccaacgccatgctcggcctagcccccttgcgacagcggcgcccctacgagactccggcttttacgagagctggtacatcacctgttggcgtgtgttgggtagcgtcgacttccgtgtccagcaaatatgcattagggaaagaaaaaacgcaaacagccaagccgcaaaaagaggaaagccgcagaccgacgcgcgcaaaaccggctgggtgcgctggctgcacgatttttcccccgtcttgacgagcacactgcttgagacctctgaaagacctcccgcgaaaagatatttcttcacaaatagagacaggctcttggcgcggcagcagttttccggaaaacaattcagcgaacctcggaaagacttccgacagaatggcgacgacgtcgagcgcccgccacctgctagcagggcgcacaagcaagtcacatggaagttcagcaacggactgtgagcgagctagtaggaccctcctcaaaaagaagcaacgtgcaaccgagcatgcatgggcaagacgcgaagcatatgtcacgtacaggcagcaaatgtcctgttgtttttcggatttgagttgatgtgtataccacgagcgcaggcaggccagggaagcagcagccctgccggattgttacgacgaacgagaagcgcgaaaaacagcgacgttacggagagtgtttgctctaaaaagcgtcttgcggtcacgccttcgtattcttgatcgatttctcggatgctaaggccctctcgctgaagcgttaaggcacattactcttttctcatctttgtacaacttgcaaggagaataagggaaccccgtggcacggtcacgatggacactagtgacccccaacagctggtgtctagagtgtctgtggtcgccccttgccgcagactcaggtatttttggtttgcagttgttttctcacaaaaaacaactacatctgttggatcattgttcctcagaaggtaaaaacactcggaagccgcgtctacagtcaaacacttcgcgtgaagcaaagctcttcggacggaaaacggaactgtgaattgattgtctatgtaaaagagcccattgtaaccgattgctagtgctagatcgatatacgcagaagcagcgtctcaacatcaaatcgcgagcaagatgcgaactacaggtcaagacgcattcgaccggaaagcagaggaacttgtgttcttttaaaattgaggtcatgcgcgtgcgtcagtccggcagatatacaataaaagacgcacgcagcattgtaacagaactggtttgttgcctcacagtgcagtgttgtacacagaagaatcgtctaacatcagtgcgatttcgtttctgtttagcaaggatctactgtcctcttacaggatgaatatgtcaaaaacgcgacaccgcagcagacgtttcttaagcgccaagactggagttcgggcagacgcagaaagactcccagttgcctcgaaagtaaaccaactgcacattcgaagaaaccacaagaactgcggatgttcgtcttcagctgaaaggaaacttctgttctctttgtgtcagtagaaacaatcgacagcttgccagcctgtttcgcaaggtctgtcaatgagcaggcgcccggaaagttgtcgtgcacgtttctgcaagcttttgtcgcaagctcttgtgaaaaaaagacaagcctctgttttgcggagcatattctcgatacctgatggtgagtgtctccgcaccacccttggccactgaatataggaaacgggaaaatgccccgtcatgaccgcggttttttattcgcgaggctccatttcctgtctgaattgttttcgctgagtgttcagtggaaccgactggctcggccgtcaccctcttgcaattcctaaaaaagtaacagattcttgaccgcaatgcagtttctcctgaactggtcgaagcagtgtacctcccgatccgagtttcagtctctggatgcagagaagtcaacgaagaaagtcgtcaacacagcgaccgtagggcctgccttcgatgcctaagactgtcagtatcaacggcaagccgtctaggatggcaacgacgcaaccgtgtttcccgttgagtagcctcgcctacagttcgatctgttgcagcacccttgtcactctcacacatgacctcccctcgcttttgcttcgctgtccgtacgcaagtggaatgtaccgtcagacaaagaagggcgctctatgccctagacctcggagcgatatgacaactccaagtggcgatgctgtcacttcgcggatcctctcacatcggatactcgctgaactgctgcacgacgctctgcggaaaacgctgaatgtgaaatcagatttgcccgaattttgtgtgagaagcagtcacttgaagcttcctcaattacgtctcaaattgcacgagatttgacagccaacaagaatacgcaactgcctggtaaaagcgcactcagacgcggccctcggtagcttccgttccacggagtcggcaaactgaagagactgaactggacgaactacctgcatctcgtgggcaagtctaaattcatggtgaaccctgcgccttttctgaggtgccgtcgcatttgcactacgaaggattacaggttcctctacagcgtctagagaggctgcagcagcttctcgtgaactggccgccttccacactaaggtagagaagcaaaagcagagtatgaatgcagcatcctttttttctctctacgcacataatgatctgagccagggaaccaggcacccgcgctgcttttttactgaggtcggggagccctcccttctgctttcctgaatgcgatgaaaccctcagatctgcggatttcgcgagagacggtggtcccgcccaaaacatgcggaaaaaaagtgccataaactgtggagggtcatctcattcctctaaagcttgtcaggacgccaccgcacagactgcatgcggtgggcttgcagactcgacatgttcttttacacatacgaccgcgagcaagtcgtcttctctgttcttcctatcagtttgccccaccgcttctcgtttcactgctcgaactccgtcctttctgtttggtctctgtccttgcagacgggatcgaattctgcctcgtcaagttcactcgtttcctcggttttgggtcttggtcgcaaagtcacctcgtcgagatctttctctacgcgtactttcgtttcttcgtcggccgttctagcagagttcggtctcgggaaaagggagatcgacgagctttgctggaccatctgtccttttctttctgttccatagatgcaaacaaattgctttcttcgcatttccatcccttctttccgagaagacacactggacccctcccgggtgttcgtttacagcgcgctctcgggcacactccatgtgcgcgtcgtttttcgtggaaactggagagcggaactgctcgagttcttttcttttttctcaactcgattcctgctgacccggtgcgtgtctcgaccggtgataatggcttcattttcaccttgaaactctcgtttcttccgcga

SEQ ID NO: 1331 - DNA, 2378 bp, Toxoplasma gondii
  source 1..2378: mol_type = genomic DNA
taaagttcagaagacgacccgcgaaacagttgcgcaacgggaatcacctggttttttgcgatttcagtgcctgtgtggtgaataggaacacggcttctcttaacactgcaagccagtccttcacactgttccactttccttactctcctggcgtggacatgcagaaagtctacgagttcgaccgttgctttcttcatctggcccttcggagtttgcaatgcagtcgtttttttctttgcgtgtcttctacttacatctggaaggttgcagtaacctcggaggcgtagaaaccgctctcttaaatttgcctcttgtccccttacgttaatggctgatggcaaaacgtcaaccatacttgagtgggtctggctgctgtttctatctgtttcaaagtcgaaagtcgccgtcgagaagcagagcagagaataccgacatggagaggacgtcagacttgtaccgcagttcaacacagataacaaaaaaaactttaaatgtgctacccactggtcacacatccctgcaccattgagagtaccgactggcttcgtaccagaagcgcacgtcacctatgtgcctctgcagagtttccatgtgaaccatgcactgggatttgacggtatcggggtcctcaagactgcagaaagacatcgaaaatgtctgttgtcgacgacgcagcagaaatacatgtccacctccagcctgtagcagggaaaagcctgttcctgccgacgttgtcgcgtgcacgcgatgtgaggacagctgcttaaagagtttttgtcaccccgatgttccagattacctaaccgttctgcattacgcggctctctctgtcttaggatgtgcctccgtggcgctaagaaaaattcagttggctgctgatgcatctatctactcatgagcgcttgctaagcgaagaatgcatcgttatccctggaatcgaatttcgagtaccacgcagtatttgctgtgtcccgatctcacacttacgctgatttacactctcggtggctagtacacgtttcttcttctcttcgctttcgaactcttgcacatcagccctctctcgacctctctttatctgtcaaatagttgtatctagcagtgtgctacaatcggtcgccgccgaagtcgtgcgtcccgttcagcgcctgcgacctgtcgagttgtgccggtcaactcgagaaaagatttcccccatggaattcacgttcgttccttctgcatgtttcctttttcggactgtgcgcagagaagcaacttgcgcaactctcaaacgcgtgctccacccgcctcccaatttcacagaatgattttttcaactgcaagcccccaagattcctcttgaagacggtgcctcattaaaaaattttattaaaactctccagtctatgtatcgcggcgagcaggtttggagggagggaaggaactcaaaggcttcgcggcgaaaaaattgaagccggcgtttgctgtgttttccgtcgcagacactgactggcctgaggggtcacttcgctgcgcactcccaaaggtcgcagaacgtgctgctgttgcggaactcttcgagcgttagagaactcagttctcctgcgctgcttttctctggagaaaagatcagccagttcccctgaaaccgtttcaaagaaaaagctgaaaatcgctgcgatggcggtcaccccgcgtgtcctccggtgacacgcagccaactcgcaagggcgcagtgcgagtgactcacactcgtgcgggtggaccctctggagaaaactggggaaggcgtctgaagtggagagtggaaaacaccttgacttcaataaaaaaagtaaaggagagttccgcgaagatgggaaggaagtgcaaatcggaacgactctttcttttcgtcttcttaaacagccctcgacccacggctagctgacctcagtggtgggcggcctcttcgtcgcgaaaggggggagcgggtgaagacaaagttcctctcgcaaaagagtcacgtgtcgcgagaagcaagacccgcttccttttctttgctctttaaaaagcgaaacgacttcgtttgaactcttcagaaacacggattcgaccgacacgctctccgagcgcgtgaagcggccgtttccgcgggtcttcctcgcgagacagggaattcgtttcctcaaaagaacgcacgtgttttagccctcgacgaagcctttgtcaactttcgcctgtgcaacatcttccgtccatttgcacgtagtcatcagatgactcattcgcgcgtctctgcttcgtgaacccgcactcgacaaccatcctcaacctccctccaaatggtacagacatctctgcgagttccgattttcccgaggtgctcagctggagtttcttcttgagcgaaatca

SEQ ID NO: 1332 - DNA, 2874 bp, Toxoplasma gondii
  source 1..2874: mol_type = genomic DNA
ccgcagatcgcgaaggtccttttagtgctaagagatgtggaatgaccttgaggttctgttgtgctacctcgaagtttgttgcatggcgtttggaacgagaacaatatacagactttttatggcatagttttccactctgttatttacatctttggggcaatgatgtccccggtgacgggctccaccttacgaaacgaaattgatgagagtaagtgaacgactgggaggcactgatgatagcttaccggtccacgcgccaaaaccttcttgtatttagcaggcgccttcacttcaggccagtaggcgcagcaattgttttcctgattgtcaccactgcagcagagctctaaagaaagcgcgtcctaccaactcttacaaatgcagtcttctgctcttcgctgaagtgactgaggaagtggagagcttcacacggcctatcagatggggtgaggacagtagacagtttctgcttgccttctcgcatgccgagtcgcttaccctctgtatcgccttccccagcactggccgttctgaagctgctgccatcctgctgggcatggtgcggaatagtctctcttgtacgaagggccttcgcatctacatcgactggcatgaacttgattcggcttaggtgtttgatggcacacttacaaatgagttggtttcctctttgcctcgttcgctacggctgcatccagcttctccatatcttctgcatttttgctggattagaaattattgacaggggaggcggctcgtattgccgaagtgcggttactggagaatcgtctgttcctggaaaccaggaggatcagccgggtagcacctagaaacagtgaagatgcgcttaccagttgctccgtgctagggagggtatcaaacgccagtttgaactcgtcggcgatgtctggtcacatgcaacttcagatcctgacgtttgagtgactccagagaacgcgactgaccattgataactcctcccatcctggctgaaatatgcatggacatacaacgtctttgtccgtttcggctcccagattgacaccgcactcaccgctggtcttcatcatctgcagcggattcaacgcagccacttcccgccacgtcccaactgctagagccaatgaaaaagcgacgaagcgtcgtgccattgttcctgtcccgtcctagatttctacctcgaagtgttgactagaccacattaaccaggcggcgaaaagggtcctccgtgcgtcggagaaaaggaatggtcatccctctgcggccgacttccgaatgcggcgcgaagtgtaactacagctggcttcttcatgtacagtcaagaatgtcaggtggtggctagcaccgttgccaatcttgcttctgtttcgtatgacctccgggaaggttgcataccttgccgaaacggactctcgacagagcctttgtgtggagaacgtagtactgaacccatgtgtcagcgctcaccgccagattgtgccgcggtaccggaaattcaaatcacacgtgactcactatcgcgataccggcgcgcaacctggtctacgtaagctgtggaaatctgatggttgaaaactacatggtctgggtggctgagccaaggagtgcaactttaccccgttggaccgaaaattttataaccgcggaatagtaaccggcacgttgccacgtatggctccgcgccccgcggttgctccgtccaccacgtgacccttggttacctgtcatggcgcgagaaagtgccagccaacgtatccgacccagcgtaaacaagcgaatgacctcttgctaattactgcgaatgctaaataactccgctgagcgcgtttcagccttcaggcaatcagtctcagctgaatgcgccaattggtgaattggaacttcgggaattggctctcccttgttgctccgtgaacatgccgacacgtcgctaagcgacataccctggaacagctgggtctgcagctggcagcttcggtccagcaccataagctggcacagacaatggaggattctcgattccagcactgcctgaatcaggtgggagccagctatgtatgtattgtgaagcggcccaaaatatcacgcagcaaacaagccaaaacgtttctgtggaagctgtgtaactcctgtgaatgaacgatacagtggcagtcaggtcgcgcggtgtgctcctctgtggtgcaaggggagaatcagcagctgctacggtgagggggggtgctgcgggtcctaggggggtgaaagcgtcgcgggtgctaaacggacacggtgttgaacacgcattcgagaaaagttttcgcgcaaaaggactcggcttctcaccgttttgatgtggccttttcgctatccatattttttcgcgacctaccgttaagaccatgtgttctgcgtgcgtttgtgagctgccagacagctggcagcttgatcggtctggcagctcgtggccggtcggtgcctcgtactcgacggtttttcttgagtgtggaaagtggacccatcgtgtgtgcgacgatctgtacgttcaaatcgtgtagcctttttctgtatttttgctctgttactggcggcggctaagtttttgttgcgcttcgttccaggcctgcgagagagggtccgcgattattgctgggcagcgtctcattggcagcatcgcggaaccgggtcctttggagcagccgctcctcgccgcggctgctgtctgtgtgcactgcttttttgccaactggcggagtcctcctcaatgactccgtgcctttctccgatttcttcgcgtccttcctctgatccagcgggtcgtcctgaacgcgtgccgacgagcgccccatacaaatcgtcatcaccctgtctgtccgtcccactcttcttcacgca

SEQ ID NO: 1333 - DNA, 2218 bp, Toxoplasma gondii
  source 1..2218: mol_type = genomic DNA
gaagaatccagaagacgaaacagcagtgtgacgcgatagcgagacagacacacggaaatggtaaggaagacacggagaaaaaaaagtcgaaagaaagggagacataggtccgcaagagcagtaaagaaacagattgtgggagataaacgaaagcagagtgcctgtgacagaaacagaaagcttcagaggaagtgagcaaccgcctacacataaatttacccatgatctctgtttggattggaaagtgaggtcctcacctgtgtctcaattcgcgaaacttcttgttcgagatgggccatgagccgcagagcgcgttggagtttccctggcagagtgaggcagtcctccagccactgctccacgggatcccccatttttccagggcatacaagtccgtccagcaaggaacttgagcgaaagcgaagcctcctctgcaagtcgttctcaactcaggagttcccaagtagagaatcacatgtttgttccctgggtcctcgagaattcgtttccttcctctcgcgcagaaaccaggaaaaacggaacaagctgcacctgactcccttcttgccagctctctttccagccttctagacgacggcggtgtgatgtcgtcgggactgaagatcgaaacggactcgtcgaagtctcaggagacgaagaagctcgaggaaggagcagagcatacaacacaggaaacgcgggagtttaactctgaaggcttcaaacgggtggaggccgcctcagagaacagcgagcgaacgcaccaggcttggtggtagcagaatcgtctgtctcgacagtctcctccccgcagggcaggaaactggaagtcggaaaccgtgagaggaatgcacggtgaacagaaaggcgcatcggggtacgctcgacaagcggaatggcagacggttcgtgaggaggttgcagttccgaaacgaaatgtcggtggctgtcgcgccgatggagcaaacccactgcggagagacgctgtcacactcctggggcgggcacaaggtccatgtttcccgagtttttgagatgcaaagtcctccgaccttttccacacgcttactacgtggaaggcagcgaaaaggtctccagaaaagccgagaagtgcgggaggaaaagagaaaaagagaatcggtcgccagaaaacagaaacgcatgcaagctcccccaaggagaaagccgcctctcgctcctcgcggctgcggcacgagggtgtctacgaaagcgttcttggtgttcttatggaacaggaggcgctgacgctctggaaaagtccacgagttcttctgtttccactcataatagcactgaggaaacgccagggaaactggatgctgtgcaacgcttgtctctgaggactcgcgcgagttcgtgtgtgtctgcttggagcctcgttgaggcgaggatcgaggtcttgtttttcatccatgtcagagcactgtgtacgttttcctcgcgaaacgcttaccgtgtacactcgtcttcgaggtcatattcggcgggacctgtgtagatctctcagtcgtattctttgctctcagcagagttcacacttagcgaactttgttgtgggtacgctttgtttgctgctgtttggtgcccacacgcgcgtctccgaagaactatgcacacaatatttgtgtttgcagagaacttccgtttttccgcagacaagttcagcatatgctccacagaatatccagactggggcgcccgaaaaaacagtgtgcatctgagacaccaacactcgcatacaagcctctcaggatgtggctgtagagagttctcccgtttaccgttgttgccctatgtatccttccgatcttcatgttgacgacttagtgacagaaagtctgttcgccgcttgttatataggtcgattctttgtgttcgattgtttcgctcacagtgcgcgcgcccgtgtgcaggagcgtcggctgtcattgtttgtctgaaactcatagaccccggaaacttcaagtctatgtgtgggctcctcgtgtcaaaagcagcagtggcaagaaacgacctctcccgtctttgaatgtcatgtttttttctttggtgtctgctacgctcgctgtctttcctcgttggtgatcgtgctaggtggtgacgttgctgcaagagttgagacagaaaatcctgcgctgaaaggcagactatagtcactgaacggaaggcatggcactgtaaattgcgtagaaaacta

SEQ ID NO: 1334 - DNA, 1712 bp, Toxoplasma gondii
  source 1..1712: mol_type = genomic DNA
aagagacagaggagtccgagacagaagacacaaagaaaatgacaaaggagacaggcagagagagagagggagaccgaggagacatcgagaggagactgcagctatgttggtagtgacgaatgtgtggtgaatcaagtgtaaaactcgaagcgaaccaatagactgaatgagcagtggtggtcgaagacaacgttgtggcggagaggagggcggaggaggcggggaaataaggtagaagacaagacgaggtccggaacagagacagaagacagagacggaggactggaggagagcggaagagtgcgaaggagaatgaggagtagagaagaaaagagagagagagcagaagatagacagtaagagataggcattgtaagagatagacaggaagaaaaagacaggaagagattaagaaaaagagatagggaggaaagagaggcaggatgaggtagagaggaagaagtacagaggaagagatagtgatgaaagagaaccttgtgcaccttggaagtgcagaagagagaagaaagagacagatagaaagaaaaaggatgagaggaaggaaggggagatagtgaagaagcggtggtgaggcctgttgttgtgatggggaagagagcagagagaaaagctcggactggctaatcacaggaatcaaagaacgaatgggagatgacattcggtgtggaaactcacctgggagccagcagtgatgcagtcccgaggacagcgagagctccgcgactgcggatgtctcgatagatgtggtgtgccagtttcatggtaagacttgacttcgaaagcaggcttaggagaagagaaaaagaaaaatgaaatctgactcagatcccaacaacggggggaaaaccgctaatagagaaggtcgcgtttgttagctctgttcagcgtgcaggaaaggccaagcacacacgtgtctctttttcttgtctcgcaatgcgagaaaccggagtggcgaaagaaagggcgttcttactcggaaaagcgaatggaagtccacggacgactttgtgcaaccgggtgagtcgggaaactgagagaaagtgtgttggtgaagaagaaaacagaaatagtggatctttgcgatctcttggaggacaaaccatcgctgttgtgtgcccgcggccgatcgcagggcctcgcgctcgtcgtggcgaggctaagaaagtgcatgtgtggtactctgccgaaagagaactctagggtaggtttttcttcgaaaaaacaggaagctgcttatcttcaaaagacaaaacgactatctttcgctgtgcttagagaatgccacgcagccttttgcccgagggaaagtgacgtgtctgtcccagtgcgaaggagaaagggcaccctctttgacacgacagcgagataaaggtttctgtcgctgttaataagcgtgactacagtagttcatatgttgcaccgagaacgcaccggatgtggaataacctctccgtagtaggatactgaaatccaacgcatttagctgtgaccaagaaaaggcacgttgagagggaaaaaaacaaagaattgctgtaatgctcgatagcgattcctggggagtatacattgggacctaatcgtcaaagaagtcgctgttgccttcgtcaaatgacccgttgtgtccctctctgcatccggcgcaaaaatctgcttctaaatctcttcatcgtttcggagtgccgttcgggtca

SEQ ID NO: 1335 - DNA, 3710 bp, Toxoplasma gondii
  source 1..3710: mol_type = genomic DNA
aacgcccgacgcattcacagacaggaaattggtcaaaaccgtgttgccacccctggtcacccctcacaaaaaagcaaacgaagcgtagtcatgtcagtacatggctactctatcagatgccgagatccatttcgatcatcactcaagggcgaagatgctggaaccacaccgaagtggaatggtacaccgcagtcgtcgcgatgttttgtcgtcagagactgtgctagacgcgcgggtttcccgtatctagaaaatactgtaagatctctttcactgtatctaagagtgttctacatccctgaatgctatttctcgtgaaggaccactggtggcatttcagcccaaaatatggatggcaagaaaacaaagacggtcttctttcgcggtacgcaccacacaaaattctacgacaagaaatcgccagaaacggaggaataggcacatcaggctttgccgtccacaaagtgtcacatgcgacactgaaaacaaactgcatcactagtttaataaaagacggttagcaatttcgcaatcacttgatcgtccccctccgcacagaagcaaggataaaagaggtgggggggagctgcgccagaaagaaaatgcggcagtcgagaagaaactggaagtctgaaatccccagaggaattgctgtttcttgtctagcagtggccctaattcccgaaacgactggaatcagaagcgctgtggacctcagacacaaatctagaaaaagtgtacggacccgcggcagcggacagagacgggagggacataaatgagggcgacacaagtgtgaagcgatggaaccggcgttgcttattgctgaaagaaggcaaacatggggtatccaagaacatgctgttttccacgatacgaagtggtgctttttgacccacctggcttcttgaagaggcgaagccatcggcggccacgatccgggaggtagtattggagagttggacttaggattgtagtggtacaaagcccgtagacaaaggatctctgcaaaacttcatccattatgactaaggggaaaagtgactcagaatttatgaaagacaaagccaatggcttgacctggtcgcgcaatacgcagccgcaaaaactcgtcctgaagagtggcaggacacccgagctggacgcaaagaaaacagttacacttcaagggtgtgagagtgttaacacctcctggttacatctttctgaagagaagtagcagtctgagagtttctgaccaaccagccctagacatggcgcatgcaagaaaatctgcgtgctgcatgaggcttcgcggtcaccccgtgtcacgcgactgcgtgtagtacagagtcagaaccggtccgtgcgaatgcggcgagaagcaaaacaacggaggagaccttcggtatccaaaaaccgttctagcagaaccaaccgtttctcaaaatggttttgactgcggtagcctgcgggtcagggcgtgcagttcacgatcactgtcctgatttcgttccacgtaaaacgcgccctgaacatacgcatgtgtattccagggaagtctgtcttgtgtctgcgtgtatgggccatccacttcaccaaaattaagaacccagtctgtctggagcagtggattttgaatgtgttatgctctctacatggctctatctttgctcctagccattgttcgggatggttgcgtctgtctccgttcggtcgcgctcggctatgctcccgacaaatagtggtccaacaagcggcaggctgccctttcacagggggtacgaatggccgtagagaatacttctcagaagtgcgaaccgtcgaagacgttgccctgcaagagtgacgagtggaatgtgaagcatacgaaggaatttatcggccattagtcgcgaaaaaaaaaatcgggtagaactttttgggcactagacaaggctgaggcaacgtgtcagcggacagtcgtactatccagccgttagcaggttacacacgcaacatgagaacgcgtattcttcatcaatgggttccagtttttctacatatcaggttgatggagtgggagcggtgtgtctgcaagcgaaattcatagaaatcgtttctcactttccatgttacacccatagaattgtatccagaaagtcgcttccagagattcttcactggaacgccgtgctggagatgctcggtttttttaagactacagggaaccgagaagtatgtcctttcttgctgctgtggtatctgaaaggggtgaatagccgtacgcatatttactccgtctgcagcgttagaaccttctctaggaataggggcgcagaagtttctcgatgtccgtccttgacgtagggggcaaatgagaagctaatcacgttacgtggctggaagttcccccacagaaatccaggactgggaaatgtggcacacagaagaaaagtaggcgctctgatacgtgatcggtttacccttgtcaacaccgttctgctagcgagtaacttccttgattcggcctgccaacgaacaaacgagccttcgctctcccaaaataccgcgctgtacacttttactgcatttttggccatctcactgttttcttgtcatttctgaaactcaacgatgcaaaggacggtttgtggcattgcattgctcccgctctcaaaactaccggtggatgggagtatctctactacctctgctcatcctgctttcaaacagacggccgatatgtgtgtacagaaacaccgttggatcattcctacagatagtttcggagttgtgatggggtacggttcactgtgatgacgtacaggaccccttgccgagcattacctgcggtaaggagcttctgacttttcactttcacgggttttgttttcttagtccactggacactgatgcgaacagggggatttccatcacgcagaccagacgccactttcgtattcattctgccgggagtgggactgccagaatacagcgtacccgggaaccaccagaacgcctgtgttgtccagcatgggtactttgaatgggaattgtcaaaacattcaaggacaccagaacgcctgtgttgtccagcatgggtactttgaatgggaattgtcaaaacattcaaggaaaggagccttttgcacatgcgtgtgacgaaaggtttcaaggggcgtttctctctctctatttttaatgtcttggcacatacggagaacgaagacaaccaacctaaagaaaacaacacgactaatcggtttcttttcaacagtgaaagaaagtagcaaactcgcggcggcttctttaccgtctcgccctccgatgtgcgctgcgacaactcgcactgacgtcatgcatttaccttgtgcgtgattcgatttttttcctgcatcacctcttcccccggagaatattcttcgctctctaaaatagtgaacaccaaaaagtgttggcggcaagacacaatagacagtctcagctttccgcttttgcacgagacacgactgttcctaaacagagaattgcacggaattttcaaggtctctggaacgaagcgagtagttgtagctgttgccttcgttgtcttgccggtctccggtaatttcttttgttttcgtaagcggaaggtaagcgggtccttttgtttccttttttttactgatattttgacaatttcgtccacttcgggtgctccaacctggtttttctccctcctgcgtcattccccagaatcgccctcgcga

SEQ ID NO: 1336 - DNA, 4417 bp, Toxoplasma gondii
  source 1..4417: mol_type = genomic DNA
gtaggtatctgcgaaggcgtctctgaatcgacgaagaatgaacagtggagatgcatgctgaacaggccggctgccggctgagaagactggtcgtgactcaaaaagaaggcatgttccgccgacgcacggcctccccaagaagcgcttaccctggtgattgcccgtcaacttatctcgaggtacggacaccgtacgaacggggccgcactggacgaaaagctcccacagaaggtcgtcgtcgacctgggagtcgagattgccgatgtacaaggtggcatcctgatttctctcgtagacctgagtgatgtctgcgcctccgccggtaaaggagcggtgaccgccccctcctacagccagcattgtgaaagatgggttgtgatgacttcgcagacctgttcaccggcctgtcttacggccctaaaaagtgggaagctgggcagtttctaatccacccgcagaaaaatctttggccgttccactccagctctcacgtccagaaaattcaaacgttacgaagagaaactttcggtgacgacggcagtgaagagggagacttggtaagggattagacgaagcaaaataacgatttgtctgcgtagactaaaaacgccgagtgctgcgcggacaggagggagaagagccaggtgaacgggggtgatcccgtcttcaaacaagcagacgcgagtgtctggtacagatatggtctgctacgaagacactgtaaggtaaaaaacacatcctggcaggttgtcgcactgcccgaccggaccctgcaggttacgcgaaggactccgctgtaagtgcggtggttgaacaaatccgtccaattggttcacgaagtttggatctttcccagtgcgggcaaaaaaaggcgcattcagttgatgcatggaaagaccgaggagagtccagagaaagatgagcgaggaaaaaaggacaaagacgacgggtcccgatgccctggaaggagtgcatgcgcacgtcaggatcccggagacctgctgcaacaaaatgacagcatccccgattcacttaacggaagacgacgggaatactggtttcaatgtttgtggttccaaacaggccgccttttcccttctactcacaagcagcgtccagaaaacgcattccgcggcgcggcacgcgtttgcgtcttgcttttcctttttgggggcagggaatccctgagcccggcaagtcagcaaacgaccttcccactgcatgcacgggaaaaagccagagtggcacggccgtcacagagcagtcccagttagctggggtagatagattctgagacaaaaggagtcctctcgaaaagttagttgactggtgatattattggagactcactgccgaggtctgtttgggcgcgtccatctcagacagacacgggtccgagaatccaggtcagtcgaacgcgttgttgatgccctctcaaacattgctacacacactcttctgctgtttttagggttcaagcggtggcaatcgagagtcgcacgtatctgtatatgtctgttagaccggtacagttccgccgcagtgaaacgtgtgtagagcagcgaaaggcgggattgttcggccacacaggaagcctttcggatgggctccaacccgtgcagctttcttgcccctgggcagcaccccaggttgcaacgttgcacaatttctatcatgtagttgcattgctacttcctaccatctttggatgctgcagctggaaagccgactagcgtacgataggtgggtccgcaaacatgccaggtgactagagggcacgtaatgacagctcgcaggtagcgtggcctcgaatcaggaatttcagccggagagtccgcgcttcctaaaggaagagcctcgctcgaattcgtgggttgtggagaactgtgtagttggagattggaaagcccttctcctgtgaagagcgagaaatgaaacggtcgaacgcatatgtcgctctcatcacattgcaaatgtgaggcctcttcggttccaggtagagcgagtcagttgcagatacaagtgtggtgccaatcgcctgttcagtctttgaaactgtcgacgcagcgtaagtaatcttgttcgtacagcgtacgcctccaccgctgcaagggtgcagaagtgaagtcgggtaacactattcgtccccggggcttgcccttgatcctggaattttcatgcaccgcttaaaaatggaatcagctgggcgcccacggaccgcattcatgaagttttcgagagacttcctttgcaaggctccccgctggagtaacaccatgatgacagctgggtgattccttggctttcacatttgcatagttgtatatcaatccgtgcatcacatggagggggatactgccacacatatttcccacgcttttaacttggtggtccgcaccgcagttgtagcctctcgaacttgtaacctggctgccctgaaacggatttgtcctggaggcctttcacgaggcacacagccaccataaaagggactttgtagttctttcaacgagatgactctcctcagacggctggtgatacggtaaaggggagagggcacagtctggacaactcaaacggcctggtcagccgcagtgctttagttgactagaacttgtccctgtccgagcgctcgtcaggtacaaagggggcaagtgacacagcggcccgcagcccctttgagctcactgaagacgaagcgtcttgtgtgtcgctacggaacgaagatagaaaggactccaaccggtacatttggtggccggtttccgatggcgctttggagtcttccatatccaagaaccttaggaaggtacaacaccgcacaggaaaaaagtactttgcgtcgaacgttgcccacagcattctaattgtgagtttttctttcgctcatctacggtttttgtctagttgacggtgtacccatacgcgccacaggcaaccggagctggctttcattgatctcctctttgcagcaccctggtcctgtggaaggctggagggtttgtagtcatacgacgttttgagtcgcaggcgagtgcccctagaaggcaaaagctttgaatatctttattttggtgatcgcgcgcgtgtggttggtgcgatggaagagtttaccgcctcgccctgctttggtgtgtctgcccttttcttgctatcacacatgtgaactacgaaccacacatgtttcaagtgtaaacggattcctgcccagctgcgtaccaatacgatgcttatcatgctcgctccacagatctgcgctgacatgccgaaaaaacctctggcacctcaacaacctttcggcgctgtaagcataacgacatctcgatattttgctcagttggctcgcctccgttgcggaggtctgagttgttccaaaacccccagaatagtcactggaacgtcgagctattttgcagttgaagaagaatacaaaggcgtatgcgcgtttcatctgcccgttctgacggttgagacagattcaaatgtaccacatacaggacgctcattcgttggaaggaacagtgagaccgcataccattttcagtatgaatgcctgggcgacggcatactttcacagaacgttccgggtgagtaagagcggtggtatgctgtgtcaacaggttgtgcagacgcaaaatagtggcgacataacagccgcccgagggcatcatacgttttcctgcccctgagccacggactctcaccggaaaagtgcagtcgatcttcagccgattctggacgagccacgcaagaatctccggttgcgcgacggctatgaatgaaaacaaataatggtagtgtgaagcccggcatactcttctcaaaaggatttgcgaggttgtgacggtcaaggtgttttctttcaacgggcggaaccttaacatgtacgaacgcatccgaaacaagtcgaaaaggaaccacaagatgacagccggagcattattattattatctttggtcttcgagtgctacgggcgcctcctgtcgttctgagcaaattcaccacgcaaatcgtgggtatcgtggaaggctctgcgttatcgtccgatgaaccgagagcttgacgcctgactgacattgtggtgggttccatctaaccttgttccccgaacagtatctctgttgttacacattatctcctcagtcaatctgaacgaagcagttcgacagcattctcgagctactcggctatgcttggactacacaagcaaccggcccaacagcagaataaacaagacacgcatgcagtaacgctgggcacagcgcaaccgagttttctgtggaccgctgttggctccgctgccacgaagctttcacttttctatttgtttgtgcttcggattggggtcactctcatttagggcagatcatagccgcggcccctctcgccgctatgctggttttcccgttgctgcca

SEQ ID NO: 1337 - DNA, 2819 bp, Toxoplasma gondii
  source 1..2819: mol_type = genomic DNA
tatctgcatgaaaccagaaccagagagttgcgcggttacacgacacggggtttcatgtgcaatggcgttctcctatagacgtggtagaaatcgattcaactgtgtttagagatgtttttccgaagggagccgcggctgcagtaagcagacgacagcgacctgtcgcacctatccgccaggatgctcaccgagttgttccgtgtctggctccaagttgcacaggtcttcaccctccctgatacgacagatatgcaaatctctatctacaattatacgtccacagatccgtgtgtacagaggaaaacttgaattatgactggaggaaatgactacgaagggggatgagcgatcggttgatctacaggtgtatacgcatctcaactccatggggcacaagcttgagttcttgcgtgtcgcatgacgccatagtgacgaatcacgcgtgaattggtgagtcaaagcgagaatagaagcatctgtttcagccttttttccgcacgacatgcccacccccgccggtgccgcaaaggcagttggcaggcgtaccgcattcaaggacgacgggtttccacaggagctcgaggcatacggagcacatgaattcctgctcaggagcctcgcctgtgagtttccgtacgtcctcttcctcgtcctctgcattgactggaaatatcatgatttgttgagtcgttccgtcaatgcgtcttgcgacttggctctggcgcggtggatcgccgttttgaaggccacgtgattccgacccatcgttgtccagtcctgggtggagaggcaccgcgtaaatttccacaggcgtccgccgagaaaaataattcagagagagaaacgaactgtctgcgtttccatgctcttctgccgtctcggtcccctgcccccctcttcgtgaagcgggcaccgactgcgtatcccccatttcccctgttttttcccaaaggcggaaagcgtagtctcttcagtttcaaacagctacctatccatcgtatcaagcggttcttccggagcggtagtaggaaaaaggcctggcgggaaaacgcttctccggtactcgcacggaagatgaacggcgtaaaaccggggaacgataccgtggccagccgttctcttggcggtacgagcagaatgccagcagaacgaaacagaacccaagagaaaggaaccaccgacaccaaaaccgaaacttgcacccgtaagaattgttcgtgtcgaacacgcacgcactcacgacacaacaaagcgtgcctggcgtgtgttggccggaaacgcgtgaattgagttgtagcgttggtacgcagatactttcttgagggagttagacaggaagcttgcgaaaagagagaagcttcaccggaaaaagcggcgccctttctgccaaaaagggctactcgtgacttcgacgagaaccttcacgagtcaccgaaagagatttgtaggaaaaatgcgagcaaatctcgacagacggagagggcgacacacttccgcaagcagccacatgccacaggccgattggacgtaacaccacgaccgaatgctccctgcaggaaaatccaggttgaagtgtgagctgcaaaggagttctttttcgtgcactgatggatgcatctgccttgtttcgctttcccagggcttttgaaaagctgttctcatattgcgggtatgcaagtcgacgcaaaatggatgagaaaacggagccgtacgcgcacaccctccttgtagaaaccggccgcctgcccaatctctcgatggttagttcagtctctaccgggggaaagcgcgagggaagagatttttatagcccgcgtttatccgtcagaagcgatatctgcagtgactgtggctctagcatacagtgtttgcctggccaagcaagcttttctcgctctcgagagagtttacaatgcacttgcacatcccaaaacgcgcattgcacgtgcctcgccgtatgtctccccctcaccataccctcctcgggggaccgctgtgtacgcaatttcgaggcagcaaagagagtgtcgcgcacgatgctcgtaggacgaagaacgacttccagaacaagagaaagaactagagtcacggaatatggaaaaaggttgcttaccagtctttatggacttcgctgctcgctgaatgtcacccgtcaaaacgtgttatacacaataaatgggcagccgtacaactgatactcggctgggtcagcacaaagacaagactcttctcaaaagggcacagtgctgcaattgtctgctgcgactagaccgcctcccaccgcacgtggatctcgaaataccacgctcgtgtacccgtttgagttctgcaaagattccctttcttgccagcaacgtcccattcaaccttgtcaactgcgaacaaccggaagaggcaacaggggcccccgggatcgacgcgaactttctttagccgctgagtcgccggagtcaacttttttgcagcgctcgaccctgggtcgcatctggttttttttcttttcttcaaagaaattttttctctcttcgcataccgactcagcgattcgctgagggagactgcgacgacgattaatcgcaggaagaactctttttcgttcccaagatgcctattgctgtcggccacatctgttcttgagttgttgcctgcgtccttttcctccttctccacagtgaatccttcctgcttctctgtcttgcgttctctgctctgcggctaggaagccgttttccgcttcgtccctgccatcccgggacccggttcgctgcgtcgttccgggttccgtgcttccgtttttcgttccgtccacccttctttta

SEQ ID NO: 1338 - DNA, 3401 bp, Toxoplasma gondii
  source 1..3401: mol_type = genomic DNA
gaaaatgggagagaaacgcgcaagaagaagacctatagcgaaacggtatctggcgcacagctcacgttgcctcgatcgtgtgcagcagcacccgttggatttttagcacgatgtcgaacacaggcatgcatctgtgtcgatttgagaaaagaaatgcatgcagagacttgttaaaacaggaaaagggaaaactctaagcagatgtccatcgtggtctttgtgggtgttttatgtagagaggcacaatagtgtcaggcagcttcactggcagcgattcgggaaacgattccgactttccagatgcagaactgcgttaccggcaaaaacaccaagtacacagaaacccgcttctgggttcgtgcttttggaaagggttggacacggtggttgcgtgaaactacacgttggtctctcccacgcgtcctcagaagcaaaagtaaaagtgaataggcgcagaagtacgcaacggtgaacaccctggaacgaactcagagtacgcatattctggtctgcagcactgtgaccacatatccgcacatgttttaggctttgtcacctttgaaatagaaagtcttcatttgcgacagggcagcggaacatcgggtgagaatcagcgcgggccaccaaacggtggttgtgggccagttaggagcactaggcatgacaaaaggacattggaacttagatttcgtttgagcgaaatgagtgcccgcgaaaaagagaagtgtagaggagcgagcagatggggaactccagagaaattagcattattacggcgggaaagattcgacagtaatgcatacccgacagccgcaggtatcagcggtcgtctgcgataataaaaaacattcgtcacaggaacagaaggaatgaatcatggcggagctgattgtagttaaatatgacgaatccagtacgtggaaagaggttcagaataacattttcagtggatcagtcgaaaagttagttggcaacatgatgccagttctcattgtgtattcgttggaagaacataattctcgattcgcagaaaaaagacgacactgccgtacacctcccatatagagaagcctcttttgacgtgagaagagacattcgacaagatctttgaggaaagatataacgagcgtcagagtttctaacttgattttccggttcgcggcggtgtacagctgcagcgtcacgaggacgagctgcgctcaatcacagataggcaaattcttcacactcgctgtttagttctgcgtttacaattgactgtgataagaacaatcatcgcaatgtcaacactagatccgccgtgacaaggtatatgcgtggaagcgcatccgtgtgtgtatacatacgatgcataatttctactgtgtagcaagtcgtaaaaaggatcttttaatgagatatcgtggagtctctttccgcccttgtaattttcgcttgccagtgtgacacggtcctcagtttctggtccagtttaaagaacagcagtccagtcttcagtgttttctttaactacaaactaaaatggcggctcgtgtaaacagacactgctcgtctccagatttttgatcggttggtaccgaatgtcaaactcattactcattaacacataaatcctacaggaatgaactgtgattgtgtttcagtgccccggagttgcgtcgtgagaatcgcggtggaagtcaacgaatccatttctgaaaattgtgcagagtctgcctagcagattgccatgttacggcactactttcacgcgttcttgccatgagccaggaacgccgcagttttgttggggtctattgtttttcggtcatgcttgctgcttacaatatcggcaatcgtttctcagtgtgtctcttaacattactggaaggtctcgcttacggttctgcgatgtggcagcaagggttgatgcttggacgactcggacgagttatgggctgtgaatatttcagcctagtaagtcaagttgggtatattacccggatgctctaggaaacgacgtctggaaaccgggttatgcagttctctgcatttaccctcgtcatttctaatggccgtgcgtcgcgtgtcaaggatgtttacagtttacgctgcgtgctgggctgttgccatgcctcttgaggaaaacgttggctagctggtgttagtcctgttcgcctcatggtgccggtttcgagaggagacacagccgagcttcatcttccaaaattgcctcggcctcatgagtcttttgtcggaaggcgtccgcgcggagtcgccgtcgacagcgagctcgattgacgggtcggataggccccatgcgctcgtaataacggagaggccagcacagagtgcgcggactgaggccgggagttttccggtgttcggcatcttctcttgcaacagcgccacagtttccccgatgtgagagaggtttcacgtttcctcgcttctttggtttgtgggaatttgcaacggacttggcagaaacgaagatttctgtccaccgtctgtccagccactcgggtccctcgtcggctgccgctccataatttttgtaagtcacgttgcgcgcggatgaccactctgtcaagcgtccatttttttccgcgccacggactttgccagtcagccctctctacttccgcgtcatttcttttgggcttcggctcactttgctcgctcgaactaccggttctgttatccccagtgcatcgaccgctcgaaaccagtttcagcgaagtgccgccagctggccgcgcaaacccgtgcaactgtggtgaatgtacagctgtgctgccttgcatcacttgtggcagacttgcgaaggcgttttgaaacgtgttccaaattttttgtcgtctgcggctgcacacggggtgagatggtaggaggtactgccataagtccacgggttcttgcttctgtgatcacctcccgctcgttgctcggtgaccaactcgccagccgttgtcaagtagaaaccgtgttgggttcgtgttctacggcgcgtgaagcgtttctcacctacctgtcgtccacatctcccggttgaaagtgccatcgcttctcttcctgtgcgacaacgatctctcccgtggctctcccgtgacactggcaaaataggcgtggttgtgcaggtatcttgtttaccggctcttccgcgtggccgactcgccccacgaaaatcttctgttcgtgtgctatgtgatctgcagagtctccctcggcaacggctaccacgcatttcgtcaacgcttgcatccggctctgtgctataactaccacgcgggcttcttcgcaaggtctttggggtaattgtccgggaagcgcctcctgtgccaacgcctttgcgtttttctgccgtctggtcgcacacctttcgtagaatttcgtcgaattcccctctctgcaagtcacca

SEQ ID NO: 1339 - DNA, 2799 bp, Toxoplasma gondii
  source 1..2799: mol_type = genomic DNA
cagtggacacggatgcgcgttcagatgcactgtacggctttcgctcacccgggagatcgtgacgaggagattgtgttcctgttgatggtggggggaaatcgggagaagcattcgtcctgcgagagtcgcagtcgcctatccacccttgactacaagaagacgaagattcaggaggagcaacgtggtaaggggaaggtgctgcagcggaagttatcctctcgcttccctgaggttggatgaaggagtcaccttcatgtgccttcttcaaatcgggaaccccgaatcttgatgacctttctacgaccttcgaatgagatgaggaagagtcccactcaccaacgctgcgctgtgaggaaggggccccttctgaagacgaagtgagtggacctctgtgcatgtgaagggaagtgaaggacaaagggtcaggccgaccaatggcggccatcgagaaacccgtgattgaaccttgtctttgaggatggtttacaggagcaccagtcgttacacaggggtcgccggtagaactcagccgctctcctcgttcattaagcacttgaggcgggacacccgattttcctttcaggtccttccttcgagtttccaaaatgtacttaggaagacctgggattgagccgacagaagcccctccagtgtcaggagagagagacgtcgtagatggcaaagaagacgctgggccagtaggaggagacgctccaccacttacagaacccgccatgacaacactaaaagcaaacttgcctgccagtactcatgcgccttactttttgaacagtgctcggaaaaaggcatgagtgcccacgagatgccacacgaatgctagcagcatcagatgataacgtagaggtgtctactggggtgtaaaaaaaaattcagtggaagagttcgtgcctcaaagacagtgatgcgaaattacacacaacgaaagaccatggggttctaatgattcgttttcttgcgaaaaaggaccagcgatgcccgtgtccgctacacaccagaaaagcatttgacggcaaaaaaggacacggaagaaaatgaccactggaggaaaacggaaggtcaggcgtcaacgaaagaagtcatcatgctacacacaattgtgcaatcaagacgagaaacgaatttcggtggtacatgcgaaaaaagtgacgcgcgtaagtgcagagacgagctttttctgtagtcgctaaacagtagaaaaagtgacagctttccatcttcgaaagaaagtggcagaggcattggtattcgaagtgtcagaagtcacaaactcgacccaaatgcagcgaaaaaaacacacgaaaacataaccagatgtagaaaaaggaaaaatcacgagcaatgcccgctagctcggccgcacaacggcaacacaccggcaagtgtaaagtgagacactcgttcgactaactttccttctttacgtgcgcgaagcaaaaccgattagcgacgctgtgcaaaaagaaaatgaccacagcgtaccattgccgaaacgacacggtatctccagtcgtcgttagcaggtgagttgccgaacgacttagctgccaacccccaggagcgccttgtcatgggtactgttgatgtcctcgcatattggcggggtagaacaagcagcttttcaagagcaaaacgtcaacagtaattttgatgggtctaccacacgcataacctgaggagggtcaacacgtcagttctgccatctactggaggcgattcgcaccacctgcaaaactacaaacagcatttcaagaccgtagtatttagacaaactcggaaccaacgccagagctttcatgccgcggaatgtggtaccttcacagatgatcatgcacaccagttaactctacaggcatcgaccacattcctgatggtgcaggcatggggagatgagatttaatcaattcgtaaacggcgggcagtcgtgacagagtggaaatcataacgtaactcttaatgccgctttttgggaagcgtgtctctatgatggctcgtaaaatgtgttgtttcacgtatgttctgtggtaccaccacacgccacacatcttttgaatgccaggatggctctcgaagttactgaatcactttcacaagcaagaatatagtttctgtaaaacccagctgtcttcccgtgtcccgtgctggtagacacagcaagcgactctctgctccggtggaggggacaaacaccgagacggcctcggactacggggaaactatggttttgccctctacagacacgagtacagatcgcgccaacctaccctaggacaacgtttctacgggtgctaatagaatgctttagagctcagttcgatacgtttggatcaacaccccagaacctatgaactctcaatccagtgtgtacctgagggccccccatcgtcagtttgacatccaggctagtcctctgtggcggcgaggcactgcagaaacgtggactttcctggactcccctccctggattttgagcaaacttcaacggcatgtcattttgagtccacatgatttttttactaaggcacctcagcccgttggtgtccccgttttcccttcctgaacgcaaatcagccgcttcgggaatcttcgatactcgatgtgcgcaccatggattttgaaattgagagtggcattcagctagggacaggacgacatgttcgcactttgagtagcgacaaatgccgttggaaacgaatcactacgaaccagtgaacggtagcacaccgtaggtatgcagaaatctgtgatctagacggagacagcttgaagctgcttggtgca

SEQ ID NO: 1340 - DNA, 3600 bp, Toxoplasma gondii
  source 1..3600: mol_type = genomic DNA
gcagttcgtgcatttgctcctgttcaacgcttggtcttctacgttgttatggtagtctggtcgctgttgcttccttgactcattgatgtcgaagggagggatacctttggcatggcggttccgcggatgaacgccggtctcggactgaacagcagggagtctcgctgtctaccggtagaagaaaagaaaatgccaggaatcgctgaacgaggaagactggcaagaaaagcgggacctaagaaagttccaagtctcatagatccgagcagaaagactgacaccgcagtgtattttccacagaggtctcacgaaccggcacagtttctttggcttgtttcaaatcgtggggtcactgactgtcccaatggagtaaaaactgctgttcctggtagcggagaaagtgcgttttgtggttcagcatctactttggtccttcaaagttccaggaggttcgaacgtttttcctctcaacaaggacttgtccgggctccacaagttaacggcagatgaagcagggaaaaaccagcagagaggacgcgtatggcgggtacgaacttagacgaatggccctgagaaaaggcagcgtgcagagcgggaagtgtgtgaacaagtcgacagcgaaaatgaaaagaaagcatggcaattggatctcaagaaacacgaagttaactacatgacatgagcagctgcataggcgggtcagtcgcgttagagggccgagtcgaaatacttctgcgtcgggaaaactcaagcgacgaggacacgcacaagaacggagagccaaatcaagtcggatgagcacgaaaaacacctgccatgccaacaaaactctcaattttgtgagaaaatgggccgttcctctcgattccacagaaaaaagatttgttcactttctgcattgcgaaacgatgcgtctatctgtaacggtgttttcacagaagttccaaacatcaaaaggccgatgcatgtcagaggagtaacgttcaccgctcggaagctccagaaggaagggactgtcaaatgttctagacgcacggttaggcatggctttgctcgtgtgtttgttctatcaaaaatcaacctgcatgtgcatgcgaatctagtcgattccggcgcgcatgcctgggtcgccttcgagagtgccacgagagtgaacctaatcggaaagtgcgttccttgtgaaagaaagcatagagaaggtcaggatctcgtgtggaaaccatcagaagtttccgttccttcaattgtttcccactaaatgcgtcggcagaaatgcagacgcctcacgattccgcactctccgccatcaggtaatgcgtctagcagttgcctccaaacctgcctggtcctcgctgcaaggccattcactctcagaaaggtttttatccagcaaagaaattgtttgcgatgtgggcaggtagaagcgagcctctgcgctagttggtttattgctgcgtcggccgcagacccacatataccgcattgcgtatgccggagtgtcaagggttgggcgaactcaggaaccacgggggtcatagtgtagattgtctcgtaatgcttcatgtattttgcagttagcgagcaacacaggagaaccggagtgagtgcctcaccgcgtgtgccacccgcagcagagcaacacacaactgccattgcggcggagcactttctttgaaggtcttgactggtatctcgacatgttgtattaccagagcgtctatcgtgagtcatgcgaagcaggttgtccagcacagaatttctctggtatacatggatgattctcgactcttgtgttgttatagccgctagtgccgggactgtatcgtgtacttacggtagtactgtcgagcctcttcactcgaaattgtctcagctgacagagggaacgcggtgttgtatatagggtgtcgtttggtgtggtccaggccaataacttgcgtggttgtagcgaggccagaaaccatcatctgtcagtctcttttgacaattgatcgggcatgtttcaccctaaactgaaattcgaaaggacacgactagcccctctgctacaatatctaaaggcttaaaagtcagccaccaagagatgggtgcatgcctgaaaacaaatttcgtctgtctcagtgctccgggcagcacgtagtggtcgagcaccctgctgcaccttctgccctttcgaagctggcaatagccaatcgttgaggttcttgcacaagccaagcctggtgtacacttgctaaattaattgctagtctcattagtgaaatctatctcaactgtttctgtatcacatgtgcagctacgtcgtaaaagcttaattacagagtatcaacaaacagacaaaagagcaagatgtaccatgaattgaatatgtcctatacctgatatagtggggaaaaagggctagaaacgctagaaacgtgggatactgcgtgcacaacgtacattcatttgttgaaacgtagttgcagcacaaacactctctcttcaggacaagatggattcgctacactgttcttgggaacaaccgcataaaaaatctcgagctgagcgcttgagggaacacggaaaagtgcaacaggctacggggttggaggggaccacaacggaaggcctcagctaagccccacacgttcttcggtgcaaggcagtctcaagacgaaggaacctttatttgccggtttcacgctatgcataactggtggaccaattagacattggcacttccgttttctgtagttcgtgaagggcggatttgactgttgacatttctgctctcttcggaacgcctccgctgcgctttaaagtaaaccatgcgacggctcaccagaggtccaccaaccgaactgtgaaaaaacacggtgctatttagcttgtgttcgcgccgcttgaagaggaatgaaccaccttgacagtttcccgtatatcagcagagtagctctgtgccatatatcaggaaacaggtagatcaaatggccaacaaggcagcagggtttcgccactgtcaacgccactcgtgaaatggagttctctgcatctgttctggttattggtgcaacacccttcccttacgcatattaatgtttcgtatgcaggcagtcctgtgaagagtggttcgctttctttcggcctaaagggaatcgcgcacatgcagaaaaagcatgcattggcatgcaactattacgctatgacgttcgctgttcagaaactgatgcgcattccctttctcaacttcgttcggtacaactagaccaaccaccctcacttgccctaaagtcgtgcactcataggcatctctgatgttttgatcggctacccttccgatcgccaatacacagatcctaggggtttggtttccctgttattccagttagattgaagagcattctggagcctatcatgcagaacagtttcaaccgtctcaatataccggcaagcctgaaacaaaccaggcatcctgacagtcctgtacacggaggaagccttcgactgtcactgttgatataaatggactaagttgatccgcaccgtaaagggcggcgtctcatgtagactggactgccatccctctctgtgaaacctctctgccagtgaagaccaaaa

SEQ ID NO: 1341 - DNA, 2174 bp, Toxoplasma gondii
  source 1..2174: mol_type = genomic DNA
agcatcggttactaggctttgtctggatgtgaaacgtttcactcagatcagttgttgacaggcttaagcaaaaaacgattaagactgtgtctggttcgtgtaggagctgggtgtgggatgaaatgtacggtctgagaaggctgggacgatcgaagtgacggctgcggaagaagcgtgacgctgcgaattgccatgcgtttatggtgccctcagctgcgttttggatgcgtccgcagcaattcctcatgcttgatggtgtccttctacaaagtgcaggcactatctaagataatcctctgctgcatactaaatgcggatggcagcgagagtgatttaccagccgtggcatgggtatttggaagcccttagctgtcacttatgttccatttcgtatgttattggagctctcggctcagagcttgttgcatgtccatttctacaacaatgtagccgtcgcttcacttgcaattccacctgttgccccgtctttcggagaacctgatacactcgcctgctcacaataaggcgaggcaggcggccagggaccccgagctcgcaaagacatgaaacaaaaagtggtacaaggcgggtagtgcgatcgggcagggattagagctttaatcttttcagcccgtgtcatagcagacaataaaacgcttgatacaagcccgctggcaattcaaagttgagcgcagctcccaacgaagttatattccatcagtgctatacttactgaggaccccaaatagccgtaaggtataatatcacgaaaaatttgacacgaacgtgagagacgtcgcagcaggtgtagacacatgccgcagttatcatggtaaaaaccacatcctacacgtgggcgaagtttgtttgatcgaacagaagactcgttgggtcgagagtatcttatgcctaggtgccgctgagattcaaagattctaccggcgttccagcaagcatcctcgacgtccagagtctggacctgctaggatggatttttgttctatatttaacgaagtgtggttgcaggaagaacatgggcatcgccaccgctcactcagttgttttggtatctgcagatgctgttattaaccagaagttcctgacgcatgtactactctctcccggacgtgtttcacatgcattcactggtgacgggtgcattccgtgagtatccgttttttccgtctctctttttccccttcacctttaatgccccatcgctcgcgatttttccggttctttccgtgtctggggttcagatgtgcatcaacagggtttttgctgtagctgtgtcgttggctgggggtgataactagctggtttgctgcttaagggagcgggaggggcggaacgtctgtgttcttctgctgcttcgatgatgcggatcaaaaagcggcgacacactgtccagcactttttggatagaagtagcaaagttgtgggaaatgctgtgttcaggagcagattaatgacaagcatgccactattaaaaagcgataatatgtgtgaactctttcccagcggagcaaaaccgactctcgggtttgcggttagcgtacgccgtcgtggatgccgctatacggcgtatttgagacacatggactagcacctcgtctggtgttcccgtttacagtgccttattttggttatttactttccacggcccaaaatgcccttaccagcgctatgttcctcttttaattcaacgtgtgaataagggttttttcagttaccgagtaaagttctgcagtacgccaggcgggtacgtttacgtctcaaggctgcggtcacgtcatcttttaagtaaggctttcccgcgtattttcgcgaaagttgaagcaaataggtgcaataatgcgacgaccgcaagcgctataagtgtggggtttcacccactacatgatcctgtggaatttttgaaattcatttattagaggctcgtcatatccttgctgcagtgtcattcagtctgtgtgttacacacttccttttggccacaaatagtggatgggtgtcgtcaggattgctggaaacttcttcaccgttttcccagcggtgtgtgcggtggcggcatatttttgtcttcgttttcaagtctcgttcttcctctctctccgctgcgccacacagccctacatgaagcgtcttgtccgcatctgaccttcagttagaca

SEQ ID NO: 1342 - DNA, 3322 bp, Toxoplasma gondii
  source 1..3322: mol_type = genomic DNA
aaagacctgcggagtttatcccgcttcctctgcctgcagagaagccaagtctcccctgctcgccttacaacttctccaaacacaccgcgcagctcttttgttcgcccttttggcttcaagtagacctcccgaggcggaaaagatctacgcgttctcttccagtttccttcccgtatgaagggacgtggcggctcaggtgtaggtacacctggaagccgctgtgggtgcagcagtcgacagtctttacgttccatacaccgcatacggtggcggctctgacacgacatatcctctgcaccactgttcaatatttctgcgagggagacgcggagtgaagataggacgagaaacacgcgcagaaaatcttgcggcggacgatggtggatctctagcgaagattcgtgtttctgacaggagacaggtaccaggtcccgatgcgtcggatctcttttgagaatccgtagaaaaccttgtatgttcacagacgggtgcttaatgccagtttcgggttcaaaagagcttcaaaaattcgaaaatgccactccgttaaccatgaatctccacggtaagcgtgtcgctggatctccgggtgtggcgtcggaaacacgtacacgttgtgtggagagacgaaggaactcctcgccctcttccccaggtaggaaatgcaacagatgcatatctagagtcgagagcggcggaagaaatgaagagaaacggagaggcgcgcttgtgtcgatgcagacaccggtctgcagctctgcgaattgcagacgacactgtcacatcgcggcgcttcgtcctgaaagcgacaacaaaggcaagttgaaatgagtgcgccagctgccgtcccttccaagggaaagtgggaacgaagaaagaaaaccaaaggaacctcgttcctcgtgaaagggagacgaaaagcggtggaaagcttgggcacgggacgagacacaaatagcgacaggaacggaggactggcacctgcaacagaaaaaacggaatggacgcctggacgacgccatcagaatgacgaggaacgcaacactgaaaaagagaaaagaagaaactaggcgagtcgaggagtctgccaataaaagtcgacggaaagccgtgcccgtccagcgtcttgttccccccttgtaattgtcggtgcgtgcctgcgttcaatactattgcaactttgaccctcgcgagcaaaccaaacaaaatgtttttaagcgtctgcgaaaaatttgaaaaaatgtcggatctcattcttattccactatttgctctattgtctttcaattagctgtcccctatgatgattctgagttcgctgccaagctctacagaccacatgcgttgtgtctacgcgtttgtggcgcctctgtcgttgcccgagtttgttctcgggcctctccggtcacgtggtcgatacttaagaggaaagtacagctttccttctctcacatgcagcaacctctctctttctatcggtttctagggtctattcagcttcgtgtctcccacttccgctcgagagttcaggatccggaatcgctacccgtggcagtaaaggccgcgagacagttcctttcggagggcgcatcgtgacttcgtcgagtcgggtccgatgttcctcgctacgtgttcctccacggagaagtgaggaaccgttagaaacatgacatggcaagcgtgacaactccatttcttgagacactgccagaccgcttctttctgcccgcctgtgaaactatcatctccagtcagggcacaccacagaaccatgccagtaggtgtcatacctggatctacagtacgccaggtatgtcttgcttcagtttcccccccgaatttcctttctggattattctctgactcctgcttgctgttctttctcgtaaagggagatggcacggcactctttgccgggatattttccggatttcaccagtatgtccaccttttctctttggcgtcggcactcatggccctccaacaaggagacgagtcgtcagtgcgccagaaccccctcggacgcagcgtgcccctcgagtgcctctgatcccgcgcttcctgaccgttcagaatcgtcacgcgttcgcccttcatctgtcaaaatatcgtgtcctgcaaatgcagatccgcacttaattacatggtcatggacagctaagtacgcattcgcagacacagttgagggcagtgggaggaactgtgggaatttccggagttttgaggagagatcccgatgggagaatctcgaccaacatcggcgcagacttgcgaggcgacgccaccggcctcggtcagtgccttacgctcccggggggccagtcggctctcaccctggtgggatggggtcccggggattcctgggggggttgcgagcccagatcgtgcttccaaggttttccctaagatcttgcacttgattgattgaatggaagagactttttttctaagagacgtcttttgattcctttgaaaaaaccccaaattttttcttaacgcgaattctcgccggaaaacccgagaccgtgtcagggataaggatcgacagcctcgcccgattgagtgcgcccggggacgaaaaaggtgttgaaccccgtgagggaactgtgggttctgccttgggaaccgccggacgccgagacactgcttccttttcttgttttttagtcttccctcaggtgataagcgcgacatttgccgcgcggaagtccggaactcgtacggcgtccgggtaacctgtgccccattatacagttcgcttccaggggaaacccgaggctgcattgtctcatcgattcgcgagcagggatcggacgcttcgccgtctcgtcccttctgtctcgttccgaacagctgcttccgcagttgtcgggctttgtttccagaaacacaactccaacatttaacaactgtgggccggttgccactgtgcgaagttcctgcgttgtcgagtcgagtgtatgtacagcccggacactcgaaccttggcaacccatcgcgtcacaactgtgtctcactccggattgtacagcgccttcgttcgcggtcgagatcgtcagttaccttgggtacttgttcagtgtacagaattcgtttaattttgatttgtttttcctccgttccagtgtcgtcgcctgtccagaagcttgaatcgtataaagccttgtttgcagtgcgcaagtgagtgtgagtctcaacgttcgtctgccaagttccgactcgagtcctgtctccggccactccccaggcagatttcgcccacaatctttcgttgctgacgtacggctgctatcgactattttcctgtcggttctcaacataa

SEQ ID NO: 1343 - DNA, 1653 bp, Toxoplasma gondii
  source 1..1653: mol_type = genomic DNA
actgacaactcatcgtgtgtagcagatctatttctattcactattcccgagtttaccacacaattcggtggcgtagcgtctcctgcatacagtactgtgtcggcaacaccccaggtcggtttcttgagtgctaatcacacctgcggacaagccagttgctcgtccgttcagacgagacatcctcgtttgttcgagatcgcgtagcaaccttgaatcaaaatggtcgcttcgggaattccccctgtgagcatcagacagtgtttttccccttcctgggaacttcgaagctaacgcagaaacaggcctcctttcgcctggtgtcacagtctggtgtctcgggttcagggcaaacaaaaatccagtgctaggcctcgttacataccggtgtctcctactcaaagaaacggagcagctgcctacgtaaagaagcagaaaacgccaatgaataatgcgcgtagacaggtgaaccgtatccgactgttcttagctgacacttgctttcttggtgagagtgacgcgcctgaactagtggtggtgaaaacctctttggcagagacgaatctgtgatagctggtggatttgtgcctttcactgtgccccactggaaacatctatatctgcacttgacgtaggacgttacacgccctccgagaataaacagctgtatagacaaccctgccctaaagaaaatatctaaaatactgatgaacgtcgtgcagccctggtcaaacagagtttgctcatcgaacgaaacgtaacgtgaaataacaacagagactagaaaaaaactctttggacaacctgggtgagtcatgacatcacgtgtatcggctacgtcatcgagggtcgtgacgcagatctgtggcgagcggtagcagaacacgtgcgttgcaggccacacatttgtttagtctttcttgttaaagccatgttgtgtttttctgagctaaaagacaggtattctcactgcagtcggcagggagagaccgagccgaaacaaacgtaacagatccatcgaagcacaccgaaaaactaccaaacttttcttttcaccgtacttagtcaccctcacaggtactacactggttgtggattataataaccggcacgcccatcattatcggcacaccttgcaagaacacggaagcagatcatcgtaggtagtgatgcaagcgctaatagatgcatcgatacgttatcaatgaaagcgtttttccccgcgtctcggcgaccagacgaaagagcatgcatacaacgcaattgagacgagtccgggagacgccgccgcgtacccgagagatccagtagcgtacagctgggcggaattatatattttcgtcctgcaaatttcttccgtaggcgcttgtacgactttctgcagtgccgcttggaaggggtgaaggtacgccaattttgctgaggctctgagaggcgccgtgcactgccagtcgtgtttcttcggggcttttagagcttccagagcatgcagcgagaggctctgttcacgctcgttgcgatattttccacccaatggggttgatgagcaatcctgttatctgtggataacggcaactctggttactttgcccgcgactactgggccgtcgctcgtgcatgtttggttccacagccatttttcatttcccatcgcaa

SEQ ID NO: 1344 - DNA, 1628 bp, Toxoplasma gondii
  source 1..1628: mol_type = genomic DNA
agtcgaaaagcgacgagagtgggcagacgcggaccagcagaaaaaaaggcaaagagaacttgaaaacggggcttctctttcctttttcaccgtgcaactcggcgaggaagtgccaaagcactcaacgagttggggaagagcgtggctttcgaatgcctggactccgacttgcgacgtcgacacgagcacaggcgtgtgagaccgacgaagtagtgcctccgacgaaaaaaaaatcggtggcagtttttccgcgataagcacccgtcggcctgcatctgtgaggagcgagagagtgtcacttttttagaacgagcgtcctttttgtttcacccgaggacagtccaagcctagtgaaatccagagtttccgtcgaagcggcacgaaccgcttcgggtggatctgggaagcaaagggcaaaaaagtcgagtgtttcccaggtttttatgagtcaagtgcaaaacagaaactttacaaacgtatttgacggataagtgtgtcaggaaagcatgagccacgtcgtgaaagcgctatccgcttcagcacggatccagagttgtctcgcacacgcacccacatctccgctggagttggtctcttctacgtcctctagtgtgttcaaaaacacaaacggatccccatacgaactcgcatccgcaagtgcgcctcacataaggaagcaaaggtccaccctttttgcgaagaacggggatttcgtggacagcgactgcgtaggtcgatataccaggcgtcctgcttttcagagacaagtgaacgcacagttcacacaattcagttacaaagtcccgctttggtttctctaggcagcccctgccctcgctgttatagagcaagcagtaagcgattcgtccaagactcgttatgcaaaaagaacgcgagacttcagggcgccttctcctagctaggcgttcctagagacggtcgaccagcggggtcagaagtgcccggctggactgcctaagacagctaaaactgttggactttttttcaaagctgcaggcgcgttggcatttacgcaatgcttgctcgcggtttactttggtcgtgagtcggagtggcaaaaagcggtatttgtgccgagctgtgtgtccgacaaccctctggcttacgtataagagtagcgtatctgcacatgtatatctgtgtcacactgtaacacagtggatacgacgtcagagagttaagatgatgactcctgcaaatatagaaaggtttggacgcaagggattaataggacaaagaatatgcggataatctaagttccttgttgacaccattaggggggtccgcagatcctcgtcggaaaaccccagggtgtctagcgatgctggaggcgatccagagggtcgtgtttgctcgcggctgaaacgccaaaaagagagcacagtcggctggcgaactggagcaggaattgagtcgacgggatctcagatgcagacgggtacgtgtgcgtggttagtttttactatttgcttctaaaggcaaccctgaaccgttgataatttcgtttgtgcaaggtcgttttcggtcacagccttttagcagttcacgtaacagcactgtttttctggaaggagccccgagctccattcacatttgagtcctcagga

SEQ ID NO: 1345 - DNA, 2920 bp, Toxoplasma gondii
  source 1..2920: mol_type = genomic DNA
gtggagaggaacaaagttaatgcgcttcctgaaagttgccgagcaacggtttctctctccagtaagaggttacacacacgcttcttctaaatgacgggagaacactcgcgtaagctattcacttcatggcgcccgagtgctgcccacgacagcctcgaaccacctgaatgaacatttccaggacattggtgggtgtagcgacaccgcgagatctcacggtgctcggctgctacgttgcacaccttgctcgtcgtcttcctctgcttcttcagactcctcttcaacctcattttctccgtctttctccgtcgcagggggggttgagttgctgtcagcaccttcagcaggtgctggagcagccacgtggccggcaccgacagctgcgcaggaaaagtggtatgggcacacgtgaaagtgaagaagagagcacacaaaagtgcgtcttcactcttgcgtcctagagcaaccgtcaaaagctgaaaaaaaattcaaggtttactctgcgttactcgagaaagaactttttctgtggcgtgggctcagctggcttcgacaggaaaacgccgcacacacacacaaagacttgccgttacagtcctcccgccccctcgaaccgtgacacccgggacgtaatggacgttctctatccgcgaaaggagtagacgtggcacagagagaccattcggtttgcagagctgcagccgggatacacaaattgcgctctctagcacagaggaatctcacgactcactctcgtcggccgctgttttcgcctgatcttctgccgctgacggctgaggggctgtggcagtcatcttaggcattgttttcagtggatggtttagggatggcgagtttgatcggacggaaacaggcggacggagttgccaacgacgccgatgcaacacccgaatcaggaagggaaatggcgctgcaagcccagcgaggcacaccaagagacagaaagagagactgtgcctcgtgacgctgctcgaagtaaagtatttttctccgcactggcttattcactggacatgaaaattcaccgaggataatcacatggcctggtttcgttgtgaatgtgcatgtgcgcgcggtgcatgcagttcaagcgcggcagagacgcgctgtcttgggctctcaccagacacgggatgactctcattctgattcgaatccagtgaaagcccccaggtaagagatacggaaacggggaacgatctccgaagagtagagcgaatttctgggttagaacttgttgaagacgaaggcgaaccgtcactggccgttgtcgtttggtgtggcggggtcatcccccttctcactccagatgtggtacaggccctcgaacatttacagatgctctcttcgccattacgactcggattccgcgcgtgaatttccgacgataatgtgcctttggatcacgagtactgtctttcgaccgagcgccagagacgaccgaacatcacgcaccaccatctgtagcgtggatggtgaacaccggtcatcttgctcacaggtcacacaactggcctttttgacgcacagctcgtgcctgatagttgccagtgttgtccagattaaatgagcattggtagaagtttcctcagtgagttcgctgtggcataggaatacgaaatctacgccatcatcggctacttgcgctaagtccactatcctcgtgagactgtgcacacttatcgagtggtactaccttggtcgcagtcacaggaaaaagtagcaatacattcacgtatatgcttatgcatgtatttcaatttcttttcgagcctcgcgcggcgcagctgccgcctcaccgtgtgtttcaatgggcgtcacacacgacttagcacgacacagctgaaaatagtagatagcaagtcattctgtcatccactgggtgacaattaccctctcatgtatacgagtcactaagcattcagcatcttagaacgcatgtatccatatgcatcgatatgaccataaagcataccataaagcggtgcaaaagtagctcaccagggtattccgtcacacgagaggacagtgtgaatgaaaatgcgatggtggatcctctgcgaattgtcaacgaccagctgcctctgcacagttgatgtgtttgtctggcagtgtagcatatataacgaaggaccacgattatggatgacgtcacaatcaacaatctattcattggacgccgacacccctgttgaacactgaatccattttgcgcccgaagtgcagctgaaattcgccagtcaacccaggaacagcgtagatacaagtgaccgttggacttaaaggagggtcgtgctactgcggacaccagcatggtttttacatctggttttttcgtagctcttctgagagcggagttgtaccgggatagagtgcggggtaggcgacggacaaaaacaaaaaacgaccgtggtctaacagttggtagttgtgcttttaaaagcatctcgtttgttgtcaacagaaacaacgtcgacatatttacgccacatcggcatacttcgctgtttccgtccgggtgctgctgcctttttgctaattgctgccgtacagccatccatagcggtttgccgtcttgctaccttgcgagaaggcatcttcctgaaagaagagaacggtcaagcgcgccgcaagaaacggtgcttcggcgcttgtctgaaacagcttgtttgcgaaatgtcagtgaccgcgccatccctggtcatggcggttgttggacagaaatccacccacgcaaacggatgccgacgcgcgggagaggagtctcggtcatgttttgtacatacacccgacgatgcgaatcgcaacatggctacttcgtagggccgttggttttcccatccgtcgttggcctgtgctagggtatcttagggaagctggtttctcttcctgtccacaa

SEQ ID NO: 1346 - DNA, 2080 bp, Toxoplasma gondii
  source 1..2080: mol_type = genomic DNA
tgattctgtagaactggtgatgcaccgccatttgatgaaaggctgcgcggcgcagcaaacgcagaagcccatgccaacccactttttcgcgaggaaagtaactgtttcgcgtttcctcagcacacggcaggttgctactcttggatgggatcttgctcagcggcacaccctgctgaagtcactgacacatctcagagcagtcactggcattttccagtgtcagcatttgtggcagtccacgctacggtagtgcgtttccacagccactggatcttctcagcacggaagagtttcgtcggatacagcggttactgttattttttcaagaccttccagttgcggtacttaatatcttttctggcgaaatcgggatgccacggttctctcgtagcagcggttatttacggacggcaagtgatatttttgcgttgaatctgcttttactggcgacggtcagacgtgaaggaaagcacgatcaattgacagtggaggcagaaaagaaacgtaggaatctcttgtcagttcgttgcgcgaggctcttatcatcttacagaatacacggggggatatgaaccccttgctttattcttctttttactctaggaggtaccacaggtgtagttatgggcaatgcaggtatgggcattcaactgttgcgagacaatatccactttcagtgtatgataatcacagtgattatattcgctgccatggtctgtaggaagttttcgtccaaacgtaaccacgtgtgagtgtggatttcgttatcactccttccttcggaaaaggtcctcctcgagcagtgactgcttcgtttcttgtgaaaaaacagcaggaaaaccttagaggtgggcgaatgtcgtcctcaaatcggtacagaaacacattttaaaggtgaaaccttgccaatagacactggaacgcgattgctggcgctcagagtacctcttctccgtttcactgctgaaaaaacctccgtctccaatatgtggaaacaaggaagtgagaatcaaaacgaagctctctatctctctacaatatagagggggacaggcgtctgataaactatagcagccgtgcgacgactcgcctttcagggcgtttcgaataaagtgaacggcgtatagtggcatcaaactacacccaatcttgtttcctctgtacaatcaagaagtcgacaacaccagctcttgctcgtgagcagatggaaagaatgcgcgatgtcctgtgtttacaaaacacttcagctcctccgtgactgcatggtgcctcagccgcatgtgcgggaactgaaactgaaaaaaatacagggccgagaaagcctggatgtttcaaagtcttctgggaaccggcgggttgtctctgcaatgcccggtctcccggttctgcatcggaggaaagaaaaagccctcgtgttctccatagcattttgagatcgtcgccagaatcgaataaagtgcggtcttccctgtcaatttgccaactcccgtcgctcaagaaatgagcagcgtcgatgcgtgtgtcgcagccgccaggagctggtgccgcaaaagcgcgaattcccgtgaaaactggcaaaacggggggtttgccgcataggattatccagaagaatatgttagtgttctgttgccgatttgctcgctaaaacggatgtttcagtagactcccttgggcatcttttgtgatcgaaggaaaacccaggttacttaccatcagaaccacaactaaccgaggccgcgaaatcgatgagctggcggtgacagctgtgcgtgtaggcacttctcaaaacggcgactacgcaaggcgctggaacgcagtttttcgtagactgtcgctgtacacgacttcttccatcacatcttttctccctgagtgactttggtgcgttcaacacgacaacgcccctcgtttcgtcgactgcaaagtctcctgtttcgaaaagggatttgtgcgcgtgcgtcggtccggttgagttgagttcactcggcctagcatcacgctgagcacaagaacgaagtggagaaacaagccggcaaacttacctcttccgttgcctttcccgtaaaacgaaacaaaa

SEQ ID NO: 1347 - DNA, 2095 bp, Toxoplasma gondii
  source 1..2095: mol_type = genomic DNA
ccaggaaacctgcttttccgttcgcttcctgcttcgcgtcgacgtgaagcccaccctccgcacctccctcggatgcatgtacaccccaggggcctgcggtgtctctacaccctggaattctccccctggccgggccggcgtcctccgtgcatctgccttcccgcgtgagagttgcagcggctctagaggtgtcttcgatgcttctttctttcacggacacggcagtaagccgccttttgggggaattctgcaaagattcgcctggcacctcctccctcacttcctccgcgaaaggcgaggagggagagaaagacagacccgagagaccgcaagatagaagccgcttcgcactcacgtggtcgggaacctctcgaggaccttcagcgcgagaagcagagacacccgaagcagatgcggcagagggagaggcagaaggcacagctggaggagaagaagaaatcgacatcgatgaggagaaggtcgggggataggagtgccgagcagacggcggcagagacgatgcggcagacgcagggacagatgcgggagtagaggagcctggagaaaaggggaagacagggtgaagactggcgttcgcagatgcagagttagaacagagagaagacgagacgggagacacggaagaggaagggtggctagctgcagcagacaatgacgccgagagactgtctgccgcagcgtaggcgaagccgctagcggctggcgtggcggcgcctgcttccatttttagattgagagaaacatatgaaagcctgagggagaagcatgtgtcaaggccctgaattttaaatggcggagcttcttcgaattcccaaacctcctcaaggagtataattacatgcaattttacgatgagaccttcgatcttttgacttatcaacagagtagaaccaaatcacacttatcttgccccgcttcgctcctccgaagagagttcacacaagaatggcaactcccgcaaagagcccccgcggagacggtggcagagattatgcaggtttccttggaagggaagaagcgaggcagaagcgtctcggcaggtgtcggccggaggcgtggatgacctgtttgacttgaagggacaaccggagaggcaaaagcgcgctggagagagttcgcagacaagaaacgcaacgactccgtgagcgaaacaactgaaaaaagaaagagtcgcgctttccagagaggggcaaggaccgcggctggctcccagagctggcgggtgtcatcctcggaaacggggacggcaggcgacgggaggaaggggggtaacaaaataaggtagaggagcattgacatgcagcgagatgcagaatgtaaagagtcaggagcagaaagagcttccgaaaaaggggaacgaagagaaagaaaagaacccagagaaagtccaagcagtgttttgcgaactgctctctcggtgtcttcgcatgcactggaaaataatagcgggaggcttcgccggggaaaagcggagggtatttgtcagcctgaacttctgtttccctgcgtcgttcctcttgttctgttcctcatttctccacagcatcgctccgtgcgccgaacgaggaaaaccgcttgccatgccccttcgccttaggtgtatgtacacctggaggagaacgtggccgcgggaatcaagtttgagtcgacgcctctgttgaggtctgcagtgtcgctttctgtcgctgcttccttccgtctttccttgtctgatcgtctttctgggaagcacaactcggaaaagggagcaactgaaaacgcaggggactacgagaacgtcgatcacaccgctggggggggcgacggataaacaccagcttgtgtacgcgtggaaatttttccggaatacgtgagaagcgactagctcgacacgaatcaaaagtcagagccacccgagttgccgaatatcttcaatttgctcatccagagccgtgtggtcaactggaacttgtgcgacccccctctctccctacgttattccagttcagcgcttttttcttccacttctcgccttcttcgtctactcgtcccctgtgtgttctccgaaaagggactggcacaggtttttgaaaga

SEQ ID NO: 1348 - DNA, 2138 bp, Toxoplasma gondii
  source 1..2138: mol_type = genomic DNA
tcatcacctcgaagcgcggctttctgccctttcacttacttcggtggaaccccgatgcatctgtgacatccagttgaagcagtctcttgaggaagtacgtattgaggacccccaaggcatctcgaatgacgtagacgacaaagatccagagaagcattcctctgaacacgcgccagagggcgcgaatgaccgatggtttcctctttccctccgcagcaagtttttcttcttctgcaagactcttgtccgtgcgctctgaccagtagctcacatcgtcggaagcgctgagaggtggtagctcttctggacggacgctatgttgcatgcacgtggagatgacggggtttatccacgtgaaaaagagcttcccaaagaccccggcggagtcaaaagtcagggggaccttcttctccctggatcgttgcctccagcccccccggagagacccatcttttgtgtagccgtcccgcatggtacacggactgtgtcctcattctcgtgtacacagaggccaaggacggaaactgcttagacaacagcaagccgtagtttgtgaaaaaattacgggaggccctccataatggatctgtccacccgctcaaacttcgatactgaatattgggaagtaggcaacgaactcgaaagccccagcgccttccctaatggaggctccgccccctgggggggtcggtggtgagaagtggaagctaaagatttcggagtcttctcagaagcagcaggggaaactgttggcaggagacgaggcagacttaagggggaagaagacagcgaaattctcgtggcggtacgggctttaactcgagagaaaagagctaggattggcggcagcgccctaggcagcggtacacgattctgtcggcgagttcagggagaagcgataaagaaaacggggcagatagacagtggaataagatcgaatacaaagcatgaagggagctcagacaagaaaaggaaaaatcaacaaacttttccagaaaagatggagagaaacccgtggctgctgccaggccgggtcagcaaaaagacaagacaccgtcgccgcttccgagcgatagcaggacaaaagcagaaaagcagcggcgaaagaaaagacaactgtttttacgagatcgatattctgtcgattcaagatgcgaggaaaattcgactatgttcaatactgggagagttcagaggaaacgcggtcagcaagttgacggcggcaaaccagcgagctgagtgttgaggcaggtttgaggtgcagcgacctcggtgaaaacaacaagaaagcaggactgaagaaataaactttacggaattatagtgagtcgcctaaaatgcattcgtctttccgagtttaccagttgaaacgagagactttcagtgaaaaacgtttcctgcgctggttagggcaatgaatgactcaagcgatgcgcagccgtctatgtgagggcctttgtgtcttccacgtacgctagctgactctgaggaggcggtatttttcactccaaataaaaagcccggtttttctacacttccttctctgcttttccccttccccttagtaatcaaaagtgacccttctgccatttcttgaccttggaatacgtgaataactcggccgcagccagagcatgcgtcgctgccagagcatctgccattgttgtcgagcagcctagcgggaatctgtcgtgcaggggtgtgtgaatttgtagagggcaattccgagatctttaatcaagttttcctcgatctcctgacttggttgagacgtagaagctccgtccacagaaggttttaacccgctaagggtggtggggtcccacagccctgcccagtcttcaaaactggaatgtctgtacagctagagttttcaaaaacgaggaacatctctatatacctttttgggggaaacgtcgtagagtttgtgggctccttatggtcgtatgttccgttgtgttacagcccacgctgaaacagcgacgacagagagcgccgctcgcgccttccaaaaaccttgttggtgccggctatttctcaagccaaggggtttcttcgcatgacatgaactttcttcttcgtccttgtttgttcgctgtgaaaacgtcgaggagaaagaaagcatttgaatacatcaa

SEQ ID NO: 1349 - DNA, 3469 bp, Toxoplasma gondii
  source 1..3469: mol_type = genomic DNA
ctcacgttccgccaaatcattgaccttaaactcgtttccggtaactgaacttgacttctttcgaattgaaaagcttaaattgtgtgatgttttgttgagggaaaacacacttcaccgtcttggtatttgacttcattcaggtctctgtggcactctcttgccattctgagagaaggcatgcggcgcggacttatccttgctgcccggccgttaccgcttgcaattctataatacaaactcgttgagtatccgcgcacgtatccgtccacggttactttgttcgtgtgtctgcgcaacttccaagacacaaagctcggtatccagtcggttgttgaattttgcacgcgaactgacaagcgtcaatgcggcaccacagccgttaacgcacgcacaacatttccccagtcaaggaactgattctcggcgtcagccttccgacaatagtcccacgttcactcgcactctccacgtgtaattcgttcccttcattgactccacgagcgctgatgacgacaaaagcgagctttcccaggcactgctatgcgaagccagaacactggttctggaaggaaccaaccacttcggcattagctccctcgtttcccccgatgcggtacaacgccggtgtcgcgcctgtttgacagtagatagccacacgagcgagacggcataaactgacagacagacgtgttcccacaccgtggcaggagaaacgctttcacacatgcattcacatacaatgatagcacgccagacaagtaaaacacattcactggtctctccgtctctgtactgtctgctggtggatattcccactgcatgggcttgagtaacatcacactgtttcacgaacgcttgtcgcaccactcaccgcgaagcctatcctcgtctccggtctcggagagttcgacggcctcgtttacatcggtggttgagacaggggagaaatgcggtgtcctcccatgcccagggtatttctcaaaacgtgccgccacgtttcgccatgcctgagcgaccgcgactggttcagcggtgtagagaaacgttgccgttaagacgagagccgctccaacggagaagagggttgaggggacgaagtcgccgatgacccaccaggaaacgaagcaggacagaacaatcgagagagcgttaccaaaacacttgagaatattgtctgcgtacttgaggacagcagccacaatgaggccgccaagtgcctgtagaagcacggcactccacactattacgttgtatccttgaaagaatccgtactgttgaattttgtccccgtcgttccagtaggcccccagcacagctaagactgttccatacagagccagctggatgtttcgtacccagatgctcacaggagtctccttgaggattttttccaagtaaacgccggcgaaaccgctagtcaagcaggccgaaaaaaccgcaatcaggcctattactggattcccttgattcaaatttccatgggaggtggtggaatctcctgaagggagcgaaataattgcaacgccgcccgttaggatcagaagtgccacccacttcaccaagggcaggcgcttgtggagaatgagaaccgacagcacggctgttgtgaggattttaaactggtatgtcacctggtagacagctccggacaagttggagagtgccacaaaaatcaaattgttttgcagcgtgtacagaaccgccggcactcccacttgcagcatggcaatcggcgaatgacaaattgccgcattcagaactcttcccgtggataaaatactccagcggttttccccgcaaacaataaggactcctgcaaccagttttaccaattcagccatagttaccgcggtcgtgttcaagtactgacgactggcaccatcgtcagatttggtaggaagacgagagacgcgtagcacgaggacggctgcgaccgtctgaacaaccaagagaaaaaacgcgacccacttcatagggagtctccccacgaattttggaggagtcgcttcgtccgcgccacgaccagtcattttgttccgttgccttcatcacaagctttgctgcttttgcagagacgtgaatgcggggaagagagtgcgtaacctcgctcagaaataggatcacatgaaagaaacctatgcagatatctatctatatatgtatatatcaagcaactgacctttaatgtacaacaaaacaccgtcaggcagtgtatacgcgcatcacctttggaacacatatatacgcgcaagccgtagtaggcgagggaatgggcacggccagagcgatagaccatcaattcgtatatgcacgccctactaagttaacatgcagctaccagagcatcggggaagcttatccacaaacatcgacaagccaaaatggacattcgtttccttcatcagcacaccatcgtgccctggagagtagcccatttttttgccacacgcagggagggaggttacaagagtacggctcaagacagcgccctattcaacttctgactatgcagaaaaagaggcggaaatttggtccctggaagacaacaccaaaatgtgaagaacatccttgtcaatttgttatcgaagcgcctctccagagcgcagaggatcataacgcacatgggtcgagctgtttaaaaccgtttcccctcggtgcagaatgccagcaagtgtgcaccgataaatgaagcgaccgcctgtgcccttcgcttaaaaccatctaccgctcttgtgaattcgcaatcagaagacattttcagaagtgcacaagaaaatcctccggaatatcgttgtgatgggcccccaagcagaaccagtcagctgttgggaggtgtcgtgaccagtcgccgagcccccctccgctgctctgtatactgttagcccgttcgcttacggtaagttttgcttcttattggcaatccgaagacgtattcgattccgtaagtctactaaagacgggtgtaaatcacgtatcacccccaaagtgggacattgctttcggccgacagtcgttcccctgcatgtacacccctcctagttacgcatttcgcttagacgtgcactcttttttcttctctgcctaggggtcccgaccatactgaacttttaccgatgggattttccgtgtcttctaccgaagcagcagcgaaatgaaaacttttgcgttttccgcagtcgcagccgagaagatcaggtgcacatacgccattttagatatttcagtgccttgtcgacggaaagaataaccagttcacagttgactcgcggtcttgatcaactgcggtgccgcgcaagtgagaacctgctgcgtcgtcttgtctacacctcgcgggggctgctcgggatttgagacgtcagctgcctgcggcgcggtcgaagagcggcgatggacatggaagcttcatgaaatgtgtagacccatcgctcgcagaacacttagaatgatgtagaaactcttgccttttcaa

SEQ ID NO: 1350 - DNA, 4978 bp, Toxoplasma gondii
  source 1..4978: mol_type = genomic DNA
aacagggagacgtgttgaattctttttaagtttttgcgcagatggtcgtagcagtagaggagagcaccctttgttccttcttccacacatcgacaaacggtgcctggtttgtcgaccaggacgagcattcaacagcgttgtaatccctaaaccctcgtagggattcttcgaattttttcttcgtctgtctcctgtgtccacgaaatccagaaagaactgctggagtacacgcagcattttttcgacaagtgatgcgatcgattcagcactggtcgcacacttacgtgcgctggagatagttggtggaaacgagtcctctcactgaagttgcccttttttgacataagtatagaaagcctaagaagtagaatcaaaaggatgctcctgtccctcgatgttcttgcacagaagatacattcaggcagcagaactaggggggttgttggactggatgaataggaaatggctgctgcagcaggatgcagaagcatttctgcctaccagcccgatatgatgttataagtacctgcaggaacccaagctacgaggcggtgtacacgtgatctcaccgtgaatattgcttctttgagagaacacaggcgttttactgttaagctgcgatttagtaaacgaatgcacaacttcttgaaatgcctgcattctttgcgcttggggcgagtcagtggccagacagagtttactaatgcagcccggctataaggcgtcatgtaaaggatggcggatgctctgcgataacgaacagcttctagattgcctctcagttttttaagctttttgaatccacgcatggcaaaacgtttcaaggtagcattcgagcaatgacatccgatgtgcgcccagaatcaagaagcagttgtgcatatcataccagagagggaaaccgagtagacacgcggcagcgttgcagtgtggtgacaatcgacagaacgtagttttttccctcgacacaacaaaccggtagcgcgtcttttccacgtggctacatggtacaaaaccaaactgaatcccaggtacagcagatgtgctcacacagcacttacccgccggtggaccatggtggctgctcttcgtttgtagtgccgatatagtctatagttcctggacagagtgaatggaatcatgatgcagcacccacacaatccaagggccaggaaaatagatagcaatatgataacaatcacgatatagtttctgttgacaatggaacatccggttccgagagcgtgggtctcgcacgttgagtatcgttctttgtccatgccagccacgtgaagcatgtaaaactggagagcaatggtggtaacattgtcgcccttctcgtaggctttccccgtctcaagtaggccaaagccgcattcgctatagcagtcgtagggccagcgacgaaacgttaaaaaatcatgcatcgaatacgcgcacaggattccatgaaatgctgtggttgtgatagtatgcttgactttgtcaaggaactcaggatctctggtctgaccttctacacatccgtgggtgactggagtccttgaagcgttcccttctgagagcatttttggtaaagagcttgttactccagatgattgatcgtgaccactggattcgccagtactgctgctatctcgaggaagttgcaatatgcggtatgtaaaattccaaatggcttctccggtttcaggtgccagatcgtcgcggtcatccggaacactatcaccaccccttccctgtgagaaatgcggttggcttcgaggttcattcctccaggagatgctgtcgctgactggcttcaatttccccagctgtagttcggcggcgaggcgtgccagatgtcttcttccggcaggtgagagccggtaagccattctcgaggtgctgccttgcaacaaggagttcagctcatttgccccttcattttccagctcccacattcgttccagcgaaagctgtctctccagtcgttgcacggtggctgcttgcgaccgaccggcccatctggctcgctctaaggcctgcccgtcctccttctccggcgacaaaacgcctgtatatctatttgtgggatgagccgtcccctctttagtcgtttcagggttagtgactagctgtcgtattgactccagggagtcaccgctcaccgtcgacgtttcgtgctcgtgcttgttggacgtcttaaacagttcttcgatgagtgtcttcgctgcaactggcgtttccgacgacgttctccggagtcccaggggcgcatacgaatctaggaggaagaaaggtgcatcctccagtgaccctgtggtctgcgagtgcctctcgagttccagtgaggtgttgattgccctgtacactctaacgtagtcactcaacaatgtgacactgagcacccaaacgacagccatgaagatgaacagacagaggactaaatagacgtatagccctagcagcgacttccatcgtgtaaacacgccaagtacaccgactaccccagtcacaactccggcagagatgaagatcccaccaaacgtgagactggtgtacgaaatgctgaagagaaccagtatgccaactgccaggaaggtcacggaggacaaaagaatgagcaagccagcatgacgcttcttgctgtccactggatgatccgcgacctcgctgggctcccttccgccctcaggtagaacaccagagctcgagacgggtaccagattttggtggctgacgtcggctgccgttggtcgacggcttgcgtataacgtatccgaaaaaccgttttctggcgtgtcggttttctttggtaactcaccaagatgggattgtgcactcgaaggtagcatttcgatttgcatccctattgatgctcttgccgccttcacccgtttgtccattgctggattgtgttttaccggtagattttcaaggcttccggctctatctcttccagtcaaggaactgccgttaccggagagtcgcacaggaggcctatcagcctctgccgcagagcttggaatcatgatggatgaacgatatgttcgcagtggcacagcccgctgatagctccagcgataaacggcgaggcggttgatgccttaatcagcaataaatcttcgtcgatacgctcataagaacggaacaagggaacttggaattcgacatcggctagcggcgcctctcgatctcgggaggctgggtgcaatttctcccaaattaagtcgcttggtgggagccaagggtgaagtggcctctgacagccaatcagaactccaaggcggcatacaaaaacatggcttcgaatatcaacgctgtatgaaccatacctccttacctcattacagcccaaaagtgagctgtcgtctggcactgtacgagtgtaaacacaagacgcacgtagcgtgtgatcaaaactttcaagtaacaccgacccttttgtaacaggttccaacagacaccaacaaaaatcattaaaccatttgcaggacttcttgacaaacgatgtagccccagcgagtgttctgagaaaagttctcgaagagctataagactgacgtgggctgaaacggtcaaaacccctaaaagtcaggcagaagtgtggtcatgaggtctgtagattgctgcacatccttgctgttgtttaggaatcgaatcacaaatggcggctgagtaaacggaggcagtgtgtgtacgcttctccctcgtttatcggctgcaaaactaacacttttctaattgagcatgcagctgagcatggcgttatctgctggctttcattactgtgccacctacgctgtgggttcatgctggtgcagaggtggctccccctattgcataacgatggcttgtccagccgagcagtgtgtcgatggacaagaaaaaggggaaaaaggaattcgggggtgagaggcgctaactgaattctggtatggtgttaccacagcacagaatgaagcaacagaaaaacgccgaaaccaacaaaccaacaacggtagctgcaaaactagtacgcatctctattgacgggcgaacatcgaaaaagctgtcagagagcagctttacgagtagacgggagagtgcgactcaggtgtttcatttcttcaacacgacatcaagcgccatgaagctttcctgatcctcatcagattcagcaagcatgatcctccatttctgtaggaaaccttcactgcctgcataatgcgacttctgaaattgaaaatatagagtaaatatacgcagaaagggttcttcagcagataaattaatgtccgaatacttaagaggattgagtcccactgaagttgtgaagttttcttagcactccttgaaacccttagaacttcatctacggtagccctcttcagcttctcgtctgtcaagcgtacagcgacgagtgtgccaacgaagctgaggtacatgtcgagctacgtcgagctgggcacatatcgcagaattactatcaaatttagaagtagccaacaagtagcaattgtacattctatgcgttcgaattcgcacctttttgcgtctgatgtactgatagaaatcgtggtgactagggcctttcgttggcaatttttggctccgcttcttggtagacgcacccgatcggtaaggaagagtcacgaacatgttccaaacagtagcctcagtaatcgtatatgaatgcaaatgaagttcgctcttttttattttctaatgcaccgaatctagagaatatctctggacgggtgctgcgtcatagtgatctacgtgtgcataatgctactcttggcaaaggaccaaatatgcgaatcgctgtaaagtctcacttctttgagtgtagacacaattgggaaacaaggcgagtgcctcagcttttgtcagaaatacaatgtgtttccatgattatattgggctacctctcagctccacgaaagatgcctgttctcaagttgatctaaatgttccggattcgtttttttcttttgtggttcaacaacagcga

SEQ ID NO: 1351 - DNA, 3708 bp, Toxoplasma gondii
  source 1..3708: mol_type = genomic DNA
acacgtcctcgatctgacagcctaccttctgaggaccgtaaggagtgaaggaactccgtccacgcctgtgcttctccggcttctcgctttttcgtttttgcttcctgtacaactccgttttctctgtggcttctcccgtcttcgttgcaccctcttcttacctcctctacgtcttcgtcgtaaactacggggagggtgtcttcgcgtatcttttgatcgctcttcgttcggagaaactgtttcttgtcgacccgaggcagtcggagtctccggtgtcgtgttgttccagaggagggaaaaaggctggatcttatcgctggaatcacgctcagtaccctaggcaccctaacgtctctgtgtccggcctatttgagtttaccgttctcttttccattgaaatttcctgtacactcgacgtgagttgcgccagtgcgaccacgcagaaaaccatcgaaggtgcgatgtgctcgtaggtgtctcaggacgtctttcctgtctctgtttttcctcctgttgttggtgccttcgcgttcatttgcttcctcgtttcctctcctttcctcagagccaattcgtcgccagcatccccaccgagcgacttcttcgggggagcttttcgtggccacggtggccgccgcacctcgaggacggggcggtcgaggagtggaggacggcggacggcggcagaacgttttttcctaaagcctgaacacgacgaatagacaacaactcgcttccttcgactccgccctgtctttccgggggctgtcttagtcgtgggcgcagcccttcgacgttcggcttctgtctgtggatgtgcaggggcgggcacctctccgctgtggcactctccttccgtctagacttgtctctgtgcatttgcccgtcaccttcccgaatataagccgaggcaaggaggccggtgagacgccccgtccacaaaggaaacgtgggtcaaatcaatctcgactccagttgtacatgcatatatacatatacatacacacccacatgcatatatatatatatatatatatttatatattgatatgcatgtatgtatatgtatatttgtatatatatatatatatatgtatatatatgcgtacacgtgtatctatatgcatatgtcggtatacagatgtgtatattcgtatggtctgtctttgtctcttttaaaagatgaaacgatcgagtgttgtttctccacacagctccgaacttcctcgctgtgcttcaaagcagacgcgctgaagttccgaacactgtcaagcgggccaatcttctctgatgtccgcggtttggctgaatagccctgccacgcgtcggacgcgagagaccaacagaacaggcgcatgaagcagtgctccaacacagcgcgttgccgtggtcttttatgatatcggttgttcctgtttcgcaagaaagcacaagaactgcgtaacacgaatcgaatctacagatcggccacttttacggaacgcgaatcgaggatacgccgtcctgtcgcgaagaaacgggggatttccgcctccggggggtattctcagtttttaaatcccctgcatgtggagtggaaaacaaagccactgcagtcgtttattagccgtgaaacgcttgacaaagtctgcgggttcatgctggacatccctggacggaaggtgcacgccagggtcctgaaacacacgagggaagtttggatccggtgaagaaagacacacaatgttttctcaaccacgctccgtctctgtgtatccggtttgagttattcagttcgtatcgggagccatctgcgcaagcagatgcctccacacgctgcaccctttgccacacaatggggtttgcttattccgacgaaccactttttcgcagtagtacgtactacggcctagcctgcttgttccactgtaacctcattttcgtttctcgggtaatagatgaaagtggtgttctaaatcggcgtgccgcaacggtcccgcgttcccacatgctttcccggtctctcttcttgcaaattacacgcgaagactcctgagcctctctggttctccaccaccaccgggggggagggtgtcgaaagcgagttcctcgaaacaccggagcttcctgtcgaggcacggacacgcaacccgtcgtaactatgagggaagaaagccgtcacaatggtgccttgttccggctttgccagtgttccgagttgcgtgagctcgaacgctttgagaaaaaggatgacaaacaacggctgcgacacgcagaaaacatgccgagcaggggtaagaagaaggctggacagcggggacctccggctttctgtgcggacgggtgcgatgtggccttccgccgcgtcggtcgaccgtcgcgcctccggaggagaccagcgaagcttcagtacgacaggaagcgtctctgtatcccttaggtcggacccggagacgggaactggcttcccgcttctgcccgtgctcacacaactgttgcgttccggttttgggtcgacctgtgtgactttcagaatcggaaccggagactctgccaggagtgcctttgtagaggatcaagcgatctcagctcgtgaaataaccccgtccgccggcttccgaaagcctggcgggagagccagagcaaactagaccctctttttctaagttctcgactgcaacgatctgggcgaaccccccgccatgcggtaagctgcgactgcctggcctggtgctacggcgcgtgagagacaggaatgttcgagtgagactggaaagcaagaaattcagaggtgagtgggacgtaaggactctctgcgtcggcggtgtaggaaagggggaggagcaaatgctgccttggggggggggtctgtcgtcccgcaaacgccaagacgagagacaggaaagggagcctctcggcggcgctcgcacccacacgaagttcgcgagcgctgcgtcgatggcggacagcgccaggagggattttgtgtttcgctttttgttccacactgtgtcttttagcttctcttttcgcgagcagatacggcgaacagaatgctgcaggcctcaaaccacagcctgcagtgaaagaccctcgcggccggggtgacgctggccagcagaggcggcgcgcaggctagcacacgcgtctcgttttcgttctagtgttcgacgcgtctgtgccgcgtgtgcactctttcggagcccgttctcgtccatttctttggcctcaaagatgtgaggtttcgcgtatgaacagagacgaggcagtgtgtaaccttcgtagtttcgcctctgtggccagagaacagcgtggactcgggggcagtcaagaatcgcctggcccgcacggcggagaatcaccgggacgcgtgcgcgcagagaatcggctggacgcgcgctcagcatcgaaggaccattgcactcattgggaccgtgttttcttcactttttctgccaagtctgtcgatgtccattttcacctccgtgtctctttcgcctccttgagttagttgtgccgtttcggtgatgaaagccgcggagacgacgcggcttgtcgcgacgccacgcgagtattgcatctgtggtcgctctagagttgagtcagccctcggcagcagagggcaattctggagaatggactgccatgtagctgcctcgggcgcgtgaagcaaatctcttagtggctgaacatccgcgcttttcctttcctctttcgtaggagcgaaga

SEQ ID NO: 1352 - DNA, 2245 bp, Toxoplasma gondii
  source 1..2245: mol_type = genomic DNA
gcacctgctgttcgcgtagcagccgaaaggattttcgagagatttctgctggtggcatgtttcgtgtttactgcgccagcggtcgtgtgatcctgaggagagggatgtgaagaggtgcactgccgccatgcacatagtgacttaatgcggctcccgaagttgatgatgctcgctttccctattcagtccgtcaccgtggagtagaagaactgtgtacacagttttatgagagaacacgcaaatagcgaccgcgttaaagtatatgactgaacgatatgtggcaatgatagcatgtgccgttctatcgaactaattgtttgcctacgttattagaagctggtgaaatcagcaggttcttttacatgtattcgtcggtagaacttgaaaaccccccgccggcggcgtgtctgtcacgtggagcgaaatcgacgcatgagaacgacggaaggaggtttcttaaacggctgaaggagacaacactggatcgcacgcagagtccgttgacagttttaggtgtccgctgcgctaggcgcgttatgcagtttcatctcgggcactgaataggtacctccttcacatgcactgatcaagacatcgttacttcaggcacgtgcggatgtcgcgtcaagaggctcacgacacgagaaaaagtgcgtactcgagagaaatccttatgctcagccgaagccccgagtagcaccataaagacacagtgcatgtagatgcatagtatatatatatatatataacccagatacacactcccttcgagcgagccaaagcgttaaatcgctgtttcggaatcactgtttagctcctcattgctttcagttttgctcaggcattcatgcaacagtttgtaccatgacctctatatgtgactgagaatgttccaagttactagaaaaaggagtgggacgacggttggaaccacgaatgcgtgtgagacgttctgaaacactcatcaatcatccgcacctacgcagtaacacaacagctcgtcacaactagtaatgacttctcacactcgtaagccttgctgaaacactgcctgaacgaatttgacagaccctaccattcaatcttaaaagtagagtgacattggttttctgccgaacggcacaatgcaagtggcgaaagctgcctctaagggtccgacatcagcaaaatgaacctagtaggagggtttccttttgcataaacaagtactagcgggacggaatttagcccccggttactcaagtgattcgagtgttccacctgaaagggtggcaggtgacttgtctcagtctcgtttgaattgtaacagctacgcacacagtctgcatgattcctgttgccgctgatctgtttcataaaattaggtatttccatcagtcacgatgcaaacgctttcacgcatctgtccccactctatcagtaatggacacgctggtaacatggagagaaacttcaattcctttcaatacctatgcatcggctgctggcgttgattcgggtagacctcgttgctacgagattcacaacagcacccgccaaccagttagagaaaattatgcggagcccggaatcagtcccataggatgcacgtcgtttagtacgccgtgaaaatactcttgtgactactgagaagacactgcttttgttgttagcggcatgaagctttttagcaccttgttttgcgcgaaacattacgaaattcccgtgtcttccgctgctcgtcgattgtaacgcggcgcacacaagaggctggctggccgcacggacccaccgcagcgccccgagtcttgcccactcctgcgtggcaaagaacgatcaagaaccatttaccgttggtgtttttttcaaagacaagtttctgcgactgagttcgtagtaactatcttctgtcggtgcttctttatccaaaaaaccacatttgaggtccgcgtggtggcctcgggtgcgttcaccgctaagatgcatgtgaccgattttatctagcaatgcgctagccgtccgtcatttttgtcactgtcgattttcgactatccacttttccgtttgatgacctagtgattgctacttctcagcgctttccccttcgctccggaagagagggattttcggagcagaggagtcgcatacgtggcacgtaagtggactacaacgcgtagcagttgagcgcggtgtcgggggtttgctacgatgcgcggagacgccgtgtgtgtgtaggcgtatgtgtgacaccttgcagtcaacagta

SEQ ID NO: 1353 - DNA, 1744 bp, Toxoplasma gondii
  source 1..1744: mol_type = genomic DNA
acatgtccgacttcgaccgcttcaagctcatggtcatcttgaagcaacggagaaaggtcatgcaacagaagctgaagagtctgaagaaataagtccgaagacagagagcaagttgatagtgtttctcttgtgcggcgtcgtctccaggcgagaagcagtcgcgcacgacagacgcgagcggcatgtggagacgcgaggaagaacgcgtttctctctcataactgcttctcaaggttcctaactcaaactttccgttctctttgtgtctccaaacacttctcaccaatgtctccaggtcgcctcaccaggcacccacggacataaaaaagtctcacacccgagaagagacaacgagaaacttcacttactgtctggtcaaacaacgcggggtgctccaacacgcaccggcgtctagagaagaaaggaagggggcgttctccgtcgcccaacggcatccgttggctctctatttttgactgcagaagttatcggcatacgcataatatatgtccaaagacagccacagcgacattctgatttccaccactcaagtgtagggtcgacaggattcaaaccccgccacggcggcaatctttccgccgcatcaccgcctaaattcattcaacacggtttctgccgtactgtggcaagatcgaaatcagtcatccatctcgttgtatgtatatgctccgaggaaggcagtggctctagtaactaattgtttactgtaagcgtagaacggatcccgtagcaacgcgtgagactgcattccctagtgctaagagcgtggctcagcagtgcagcatttccacgcgcagcagctggggcagaaggctcttggatattcaatgagaggtgcacggttctacgtagacactgagacattcgaccgaacctgcgatagataaatatgtccggatgattgcatgttggtgactgaatgtcagccttgcaaattctaggtgtcacacgtaatcccttcgggagaagacgcacttgatcggcctactttacgaatattacagagtctcagcactagcggttaaacgatgctctcaccatgctggtcatgagaagtacaatagaacttggatccagtacacaaatgccttcaaagtctcaacagtattccaactcgttgcggcacacatatcatagacatgaaggagttgctcccaacttactagaacgctgaaggagttgcgccctcgaacacagagatgcagcgccacagaatccgacacacatgacccgcaaaatcaacttcacagtgttgttgtctctctgcgaatggtaacggaacgttggtgttgcagtgcgtaccggtcttgtctacagcaaggtcttaaatgctgccttaacacttagccttccgacgagtgtttttgctgctctacaaacggaactggcgcgtctaatgtactgtagcgagatgccgattaagaccctttcttgagcaggtgacttcaggagacgaggagacccactcggggatagagcgcctgtctctgccgtgccggcgcgactttcccgggggtttgtccatcagcacgtgtgttcgccgcaggaagagagggagtttttcgtcgaggaaattccaaggtcgatggcttatctcgttccttgcgtcaccattctgagagctgtaaccccgcgtggccacatgcttgctgacattttctccgagtgacggagaattgctcccgtctcttcgctgctttcgtagccacacccgcgaccacca

SEQ ID NO: 1354 - DNA, 4914 bp, Toxoplasma gondii
  source 1..4914: mol_type = genomic DNA
aaccaatgtacgcgttcggctatgaaactcaactccaaatctttcccagaaaggactttttaaacccagtggagtgtctacaagtgcgatgatctacacacatgtctcagagaggcgaagtagagaacgcgcatctgattaatatagtacagcgcgcacgagaccgcaccccagataaataaatacatcttgaataactgttcattagcggctaggtgacaatcaaacatttcagttgggatggggcatgtgtgaccggaaacggaagaggcgcgaacagccgacggtcgccgaaaaatgtcgaatctatctctctctatatatatagtcgagttttttcgagagacagggatttgaaaatgtctgaacgatcacctgcccgacggcagaaagtccttcaaaaggtatagagctaacgtttgtggttgtagaggcattacgctatctctgggctgtacgatataggcgcctttcggcttgtgaaccctaaaccagtagtccaactcgtagtatattctacccagagaaacgagcgggcatccagcgtctcgcggccatgtttttagcgagaaaagacacaagaagactccgaagaggactggggaatattcgggctggcacaagtagcacagaatcgaataccgcgggtaagagccgagttttctgaggtccacgcgcagatagaaaagtaccttttccaatcgccatgatgcagagaacacggcgagcctggttgtttcagcaaagaaggaaacggttgaaagaaaatgcagtttccgaaaaggaaagaaatcgtccaggtcttgagactgaagttgggtcttggctggactacaggtggcgcggcatttcttgtgacaagctgctgctggagaacgacgtgttccgtagtgaagcggacgaaaaatgccgaaatacttttcgtcagaaggtccaagagcgcgacgtgaaaactttgagatgcttgcgttttcgtgggttgacgtttgcaagtttacgaacacaagagcgacaaaacctcgacgacggtaccccgccaggcgaggtacggaagggaaacgagaaacgcgttttgttctaacgatgaaggtggtttcgagacgcccagatctttcgttagcgaaagaacaccccccaaaaattgcccagaaaccgttactaggtctcggcttgcgaacttttaacgcgacatacacgtggataattttctgccgcgggcgggacgctgttggcttccgagagtctgcactgctcggcgtacttgtcaacgtacgagaatggaaaaccaatcggtgtcgagatatagagcacctttttcacgtgcagagcaacgcagcgcattactacacagaattcgctcggcgattcgcggcgaccggcctttggaaaacggcgagcgtaccttgcgtgtgccaagcagtccatacggacgcgaatcggaagctcggcccaggcagccaagcactgctcgttctgcgtcgttgagtaccttaccgctcgacagccggcagcgcttctccccaccctccgctttctcttgcatgtagacagccgcggcgctggtattcgccttcagcccaacagggaaggcggcaggccgtagcccgaagattcgccgcaggaaaactcggcgcagcggaagatgtgtttttcttcagctgagcagccgcggaaatcttcgaaacgcagccagacgcaggctgcaacggcagattctgcaaccgtgtcaggctctaaagcgcttccaaaagcaggaagccacccctaagaaaaggcgaaatggcgccgacggcgtttcccctcgcgccaacggcgttcgtgtggaagacgcgattcggatccgccgttcacaaaaccagaaggcaagtgtgtgtctgccgccggtggaaaaacggcgacacaagtggtgtgtagccgcctgtggtgacatcgcaggtccacgcagtttcctgtcatctgcgtgacaccgtttctgtgcagtttctgtccggaacctgggatttttgagtttcgcggcagaacgggctcataggacccgtttttctacactcccatgaagagtagagtcacgacagatggatcacgagcgtgtataaatccagataccgcccggctgacgctgaggagtccgtggtttctagcgtaggggcggtgccatatactgtggctggtcacggaggctgcttctcgacgtaccttccttgtcaaccgggaaaacgagcagcgtataagctttcatgtagtcggaacaatatagtatgggtcagcgaggaaacgtagcgtccatagagcacttgttgtgtctgtagtaaaaggatggtttagctggacgtgcatcaacgggcaaaaccttacaaggcattaagcatgcaaggtcgcccaagaggtgctccgcgaaaagcgatcaggtgtccgatcgggtgacaataagcgggcaggactagttatatataggcatatatacattgaatgcaggaagccgtgaacaagaggctaaataagcgggactcctgcgaaaccattcgacagagccagtgcgatttggtcccctgagaagatcgccagtctaatttgaaatatcttctccgatgttaagacgcaatgcacccctgatgcaagacaactgtaagcccttggcaaatagtcctgtcaggtcatgcacgctgactgcaagtcagcgaaccatgcgtatggtctcaacgaggcggcattttttgtgtaatttccacttcgttacgcagtgccaccggctctcatacgcaaacacatggtatccatgaaaaaatgtggtgcgtcagtgtcagaattgcgccgtgggaagacacaagaagaaactgcccaatcgtgaatatagtctgcagcctagttggtaacaaggactcgcgtcaagtcagctttcgggagtttctaaatggccaagcttcaggacccgtgaaccgcttcccttgcatgtttgacagtgtcatcggagcgggacaatgctaggcaacagcagatcgaccctcgaagccccctccatgtggagcctcgtgagaaacgtgaagctcattggaaaaatcgcgaaaaaattggaaacacgatatcgccgttcatccagtccgccgtgtggccgggcttgtcagtctgttgaatcgtcattccggcaattcagcacaacttatttgcttcaggagacgtgttggttcgccctatctgcttacggcatactgatgcgttttcgcctgatgatgcagcagtagagatgtatagctatcaacaaaaacagaggttctcctcgattgacacgacttctcgccaatatcgtttctttgagcgatcctcgctccgagtgctggaacggagttccgtgttcgacctgtgaagatcgattctagaactttttgacttcgacgcagagggcgccgtaccaattagtccacggtgagaggtaagcgtagtcttccaggaatgagagcaaaatccccgaaagatcgacggaacttcgccgtcttgatcgctgactcgaagccagtgtccggatcataaaaagctgcgcatgcagcttttcttgtaaacgcccctcaaagatcccacagctgcgaataagccctccgatacttttgcaaattggcctgacagaaaagttgaggcgtttgcctttgacggtttttgtctccgttaccatcacgatatggactcgtctggcaacctgctttgagtcttgtttcctcacatcaactacgacgcaaatcttgtcgcttgtcctgttgaactatttgctggctttaggcgagttgttatttcactcggcgaagcagtgcgaaccccgtcacactgatattttgatgaactgcgtctcccagtgtctgaacccgacgaagcatggttttctaatgctagccttgctccgatgaagccttccgcccctaagagactaagaaccgactaatgcgatgactttgatgctcgtctcaccaaagagttgtgaagaagcaatccagtatcgtcattttgtatactcgcctggaggaaggacccacgccgctcagggttgtgaatcgctacgtacagtgccgtcttgttgaaaactcttggtacgacagaagccaacaacgtcagcgtaggggtacacgagtgttttgttttccagcggaatggaccaagacagaaaaatgacgcatgataagcgacagccgtttctggggcggtaaacgcttgtcagttcctcttgataccagcaccgctacccattttgtcagttgggtccaccgtagtatcatcttggtaccaaggtacacgtggaatgtgtttttttgccggttactctgaaacgtcagtgtaaaatgagattgaagaatgggaaccgcgagctccaaaacgcaggacggcttcccacagcggatgccagaagtgccagagttccctctgaaagcgattctcctcggaagtccgttcagtggccgttcatgcgtgttcgaccggtaggtcccgcaagaccgctgaagggagtactttgatacccatttcgttcagcagagtgaaatcgacacagaaaacttggaagcaagccaagagatgtactgaatatcgatttgcgtttttaaagcagcgcgaaaatagcaagcaacaaagcagcagcccccaaaacaaccgggtgctgtcgccataccaaacttgcctcgctgcgttgttcgtatcgaactctaccatcccaccttcgagtttgtttaaccttcctgcacaagtaaatgcaacagtgtggtgcacactaattcacgtttcaagacgaaggtgcagcgtggatttaagacatcatgaactggtcctccgaaagtgcagctactgcggaatgtctatccaggaagagactgagcggtttagtgaacccgaatgtggcatgtcgcgttcgatgctttcattgacgccatcaaaaga

SEQ ID NO: 1355 - DNA, 2382 bp, Toxoplasma gondii
  source 1..2382: mol_type = genomic DNA
attcgtgtgtgcgtagagactggtgctaaatgtcgactctttctctgctaggaactttggctacaggggaagataccctttgagtgtgtttgcgctactggatttttgatctggtgaatcgttttttcggtgtaactacgaaacgcggtgttttaaccattctcgcggctaaagatggcgtaccgcgaaacctaaagctttttgcccgcgcaagtatctcgtatcacgcgttcttcttcgcggcagtcatcaccttatgccttgctagcacgtttgaactcgactccggtaactcaggaccgtgaatatgtagcatcaatccaattcgtgggtcgacgagggaactgtgtttcagagtcacgaggcattcagtcacgtaaaattcgtgtaaccgcggatgtttttccggtcttaagaacggcccctgcatgtggtgcaacagagctccagaatgggctcccccctgtctctccaattagcgcgtttctcctgttggcaaactctaaagaaactaatagatccagacgcagagtaacgagagtcggttgaacccgagagagttactcaagaatctccgtgttgcggcgacgcttcgctcgaaccactttcccttgcatgaagtctctggagtcgaactgcaagcgacaatagcgaaaaaagcatccacgaactgcacgatccgatacgcgtcgcactacacttcaagagtgcccttcttcgatcgtgagtggaggcccgcgacatcgaaaagtgtcaagcgaagagaaggtgaacgtgttctcttcagggaattccgggtcgtcccccgccaccaagatacagaatatggcaggagcccgcttcgatgtcactcatgcggttttgtctaaactggcgaaatacggaagaatgcttcgaggccccacaggagggaatccgcgatccgaagaacgccacgaaagagatctttggtgtggctagttctgtcagtggtaatctgcgtcatttgcttgttcgcgctgagaactcagcccttttgtgaaaacagttgctctctgttgttttccactcatttagcgtctttgaccgtatagtgaagtcttctgcttcctttgggcgcgcgaagcgcatcagcgcctccgaggttcaggagtgcgtgtcactagacggtgcaagctttcctgtttcggctgtctggcactcagacggaattcaagatacgtggaacagtatactgcgacagaaagagagtgatggtgcgcataggcatggagaagaaaaaagtgcatgtgcaaggagacagaatgcacgcatctgttgaaagagagatacggaaatacttaaagggagaaaatgtatgcatacatatattgacagagatactatgcacgtatcttgacagaacacgcctaactacacttttgtatctctatatacatggaaggtatgcacatggaagaaatgtgagcggagcatgtgagcattcatgaagaagctgatgctgggagtggtctcaaagaccgccgggggcagtggcgtcaaacgagaccgtgttttcaacttgttgaaaagctaccgtcgcctgtgtgtcgattttgggaaaagcgtgagaaggtctaagacctccctctctgtccgatcttaccagccgtcctccatctttttcgtccaaaaaatatgtgcatgacaagataatatacacatttactggggttgggtaacagaaagtgggaagaattctttgacccagtcttttctctgtcttgtttcgtcgaggcaacgacgtgcatgcgttccccccagctgctgggcggcgaggcaccggaaacaggcaggtattcttcgcatggcttcttcctcaccttgtagtttgaggggaatctttgagggggaaattcattctgaaatcaaaggtagagaagcgacattttcaggggaaatcccgcgtttattccccgcggttctcgcgtctctcccaggacaacgggagcgcgagaaaaagtgccgaaaggggcttgtgaaaagcagaggaacaaaacatttcggagaacttgtgctttttatcttcggacgcgttggccagaagagagaagccaagcgtctttgccactcttgcccccaccctctcttcgtggactcgtccgaagataaaaaaaaaacacaaaccggttctgcggcacttccatctttccctttcttactctttttcttcctttgcttctttgctcttgccttcgtttcttttctttcgctctctcctgtctcttttctcttcctcctccgcttcgtcgcgctttgggcttttcctgtgcaccgcacgcggtgtgtttcgactctgttttctcgggtcttccttcgtgttttccttcttttctcgtcgatttcttctgtttctctccaata

SEQ ID NO: 1356 - DNA, 2185 bp, Toxoplasma gondii
  source 1..2185: mol_type = genomic DNA
ctgctctcttctgcaaaagaccctccaaaatcgttcagattatggtcttcccgtcttgtgtcacacgagggggaagtcccgtgcggatcccctgtcccgtctgagtcgccatcacggcttgtcgtctcagcgcacactctcgacagggcaagcctgtgcagctgttcacgattgtctttccaagagatcgcagactgcctatcgaatccgcagttcctgagaggagagcacagggaagccctttgggaacttgcacgcaacagccatcgcagacgcagaagccggccagcaggcgcatgcaggtacgcaaacgcgctgggtcttgctcgaaaagcggagctgctctgaaagcagcgggacccaaagaaagaaacgaaaatggataaacaccggcagaaagtctctgccgccgagggcagccggcgcccggatatctgaggaatggccggaacagcagatgagcaaaaactggctttcggctggaagcctagaagcgccgagtgcgaggtcatgtgcaaggccttcgaatggtctgcattcttgagaccggcactggaagagcagagcgccacatggcgaccatgatcagcctcaaagtgggcgtgggggggacccgcgaagttccaattttgagacaacacgcgacctctgactgggaagaccacactcccgcagccggaaaccacaagtgcagcgacgaaggagaggaaaaagagtcgagatacagcgtagcagtcaacagaggcgcccatcaggaagcatacagccactgagactgagggtagagttccaaagcacaggaaagggggcagtcacgccgcgaaattgcaattcggcttctggggatattcagtaccgtgcactgagggcccatactaaaggccgatggttaaaccctgtatggaaaaaacaactacttcgcgctccaggacgcagttcataacacctgatcgggagagaagcacagctcaaattcatcgagcaaacaggcgtgtctcgtgcgaaaatccattgtcatgaagagccaccactcgttgatgaagctgccaagagacacgcaaacacacaccaacgatcagtgtcaaggcggctttctggccagtgtgcatctcgttgggtgtgtttcgtaaatatctggggcttgctggcggggcaacttggtatcgaacatgcttgttatgcgaacgtgatacacgacgactgccgtcgcggaaggcggaccacggcatgcacacacgagtgagaaatttactaagaaattagttttccgcgcttagagtgacgtactggagaaagaaagtgtggctccggaaaaggaactcgcaaaatgtgtgctgcaccacctgactagtgttgctcagtgtgcctgggcttccaggaagcaccttccgcaaacgggtaagacaactgccgaacagaggactgtctcagctccgatatccactcgattgagaaaaaagcgaactgcagcacagggcgacgaaggctgcagacctaaacgacgcaggatgcaggccaagggacctgcatgcatttcccgctgccaagcgtagttcacgtaaactggtgaagcgactcctgcgagaagttgcctttgtctgcgtccacatgttcggatatacgtttcacctggctaaaaagacacgtcaaactctataaagcatgaacgggagtatgtccatattaacagcgtatagacttcaacccaggtgacactgttcttgcatgaagtgtgtttcgcgccaaccagcagtgcatcagcagttatattaactgcaagatgagggttagagtcgctgtctccactcgagaccggagatatgcaacttaggaaagcgaatgcagacgagaataactctctgtccaggcgtgagctatggtgctttagccccgctgaggtgctgatctgcccggtgtgctgctgaagtctgccgccgccgtgtttcgcgttacgacacaaacgcagagtacccatgcccgcttattttgaatttatatttcaaatcttcccgttgttctacacatcaagaaaaatgtttatccaggagtagagctcgcatggtctgctttgtccacttatgcttccactgaagcagactatctcgccctcacgactgtgattcgcggcacttgcgacagcatggtttccctctagtgcctgtgaagcttcggcggtctgcaagca

SEQ ID NO: 1357 - DNA, 3019 bp, Toxoplasma gondii
  source 1..3019: mol_type = genomic DNA
cactcctccaatggaacatggtcgaggtaggtccattcccacgatgggccaagagacgaaggtgttcgtcgtgcaaatggtttgtcttccgttcttacacatgcacttacacacatataaactacttgctgtatgtgtacatgcaactacacaaggcacgaacagcacatctggatccacgtgggcacgcgaagagaatactggatagtgcacattgtgggacaagggaggcaaagtgacatctctggagctcaccaaacgaaagagcactcgaatggcgaagctatctacaaagaatgggatagcaggacaggagttggaactgcatagagagccagcggtgcttggaggatagcgctgactgtggttctaaaggtgcactgcaaactcgttgtgctctggagggatgcgcttctcaagtcggatggacaccggaaagcaatgtaccgaagggaaactgcaacgaaacatcccgcctcatttaaagataaagaaagcaacaacaggcgaacctcaacattccgtgaacttactccaacagctgctcgaatcaggggagtgtctctagccaaagcaagcgcgtgtgggtcgtgccagaattcagaggaaaaaacgtcccagcacacacagaagtcaaacacagcagagagcttcaatgcgattcgactccttcatgtgttaccatgttttaatgcgccaggaagagcggcagcagtccttcgccgtgctcacattcgctggagatgctgtgctcgcgctgttccgtcgttgcgacgcgtgtaaaggagaggcagagtgaagcataggcaatgagagtgtcagacgtctccggtcgaacattgaggaaggagccggtcatgcaagtcgtcaccatcgttgcaggacgacattaacaagaggaaaccactactgtttctaacatcggagacagagacactgtcaatgacagcctacttcgtttggagcctcctctggcatgtggaagcggatgagtagcaagtccaatattgtaagggagagcaataaaccaaaccgttgtcgtgaaccaatcggaagatgctggcgtgtatatattactgatgggtagctatcctgcatttccgttgcactaaacaatacgcggtgttgatgctcgaaaagcagtgcagcatgccagctaccttttgtgtgaataagaagactggataacataaacgggcgtcgagaggctggaaatgtgtcttggtcgaatctaatgtttggtcttgtcccgttgtggcagcttcgcctgccgtatttcgacgtagaggatgaagcagcaggacgccttgtggcaccggggtggaaacgcgtcgctagcgccacgcaatgttattgcgtcggctgggtctgagacaatacgtgtaagtgctgtgtgcccgaggaggaaagtccgggggaaaaaatgcgagatcgctcccctacaaatacgtagtagagcggctgccacatgtttgcagtttcctgtaagctttaatctccagcgttgcagcggctgtcgcatatctatccgtcaatatcaatgatcattgttcacgttagccccttgaatgtcatgaactgccctctgcgatatcttgttcgcgttgctgactacaccgcagggactttccacctatgttggcgtttggtggtcgaagctacgggttctgacgaagccagttcagcttcttctgtaaacacattttcttcacaagtggtgggcggttcacattggttctacctatgatctccgttagacagtcgcaccctcacagtctcacatcagtgacgacgcaggaataccacaactaacagaaaaagtagaggaagcgtggaggacggagtcaaccgtggttgtgtttatcgttgcagcaatatcggcgacaaatggttttttctcaattagagacctaccgtgatctcagcagttgtgccgccaccggtgctcgagacctcttcgcatcaaagctttaaacgttttgcagcatttcagcaattggatcccggaagctcgattgcagtactgccccactgtgcagcgatgtcatgggtttcatcccacctccttccgcattttgcgcagtgcctatggctccacgggatgcgctcgttcatgtgtagcacctactttgtacagtcagtgagttgaacctggaagaatggtttcacctggttctttccaagttcatcagcaaatacgtggcaaatctggggaatcgatccgcaaagtatcaaacgggtgccgccgaaacatggcccggttctcaaggcattgtgcgtgacccaacagaaccgcgcagggacggttttaaaggcggaatggcatcgattctcagcgacgaacggcttggtcggcgatgaatattcctttcgatgcaaggactaaacgcacacttttcgtggatgcatcttactgaattggcaaaagccacatggtgaattttgctacccgcggggacacaccgtttaaggtccgagcgtcacactactgcggtggacatgttttcggacactgctgtcgtgtacgagacattttgactttccttgggtccacctggccttcgccaagtacgcaggtgagagtctgtgactgtctggtttgcgacgcctaatgagcgtcgccgtagcatacccatgggtgggcccctgctctccgtgagccaagcgcacgtcccaactcgtacagatcccagggaagtgcccaaaccgcaacaatgtttgctcactgcgtatggtctcttcgttttaaggaactataatgtaggatctcgggtaccctcggtatagcaagatactaccacaggtgaaaagtaactcatacgtgttttccttcagagtggctgatccgagcaaagttttcttttgttgacgagtcagcagggggcttcttcctgaaatatcaagcggggttgcagagtgtcaggcacttgcgtgtgctgtttgtcgtgcctgagttcgtcttggtgtgcaattttgatttggcatgtgtccgcgagcttgtcgttttacgtagtgcaaa

SEQ ID NO: 1358 - DNA, 3332 bp, Toxoplasma gondii
  source 1..3332: mol_type = genomic DNA
gtcacttctggaaggaggtaagccagcaagatctgcagacgtccgtacccttcctgcggacgaaggggagaacagttgcagtcaaaagaaaactccgttctgcacatttccagaggtcgtcgctctgcgcatggaatgctcagctcaggtcttcaaaccagacaaatgcacagcgctgtcacactccgcgctctgcaacatagacgcacacgtccacataccctacatatatacatatatatatgtatatatagaagtatatatatatatatatatatgtatatatatatatatatatatgtggagacgagtgaacatggatgcttgaatctggaggcatgtacagcgcccttttcaagagttcttaccgtgacgagcccgtcacctgcttcgtcgggctgtgcgaggcatttccaccagccaaagcgtcccgggttgagagtgtctgccggactgcggagttcctgactcagcgcatttgcggcagttttcgcgcccatgaccagatggtgcccgagaggtagcacgacctgagaattggttgcagacgaactgggagctgtgcacacgatctggttgtgcatgctccctcgtcgagtcggttccttgttcggagcagcaggtgccattttttagacaagaaaggcctgttgcgaggaaagccgcgcgacccagcagcagcagcgacagacagattcttcggaggagcagggaccctccaaggctttaaagcgcacgatgtgcgaagaaagcaggaaaagcctcccgtcggaaacgactgcggaggaagtcgaaagggcaaagccagcagccacagaaaaggcggcggaagagtcgggaaccacaccttttgcccgccctcttttccgtgaaaagattcggaggactcagagtaaactgagagtgtggactgtcagacgggtcacggaagaagtgtccccgcgcaaacgagcagaagcgcgatttctcggtacaggattatttgcggagcacagggcaaccagccgaaaagccggccggcggtttcttgagtccggcaggtggaatgaggtcgaggaaacagccgcctggacagatctccagtccgaatcaaaaacagacggcgcatttaattggacgatctttctcctggcacacatcgttgcctagaggcgacttgtgcgttgctttttgcaaaaacgcgccattctggaaagcagctgggattccctttcccgtcgctctgccggaaagaaacgctggcaagctagcggaccgcaagttaaccagctcaagcaggagagttcgcaggcgttgatgaccagagacgacagtcaaaaaatggtcaggtttgctcgagcggttgggggaaacagtattcagctttcacaacgcaaggcaggcgtgtgcagcgcggggggagggcggacaagagagcagaaacgcggaagatctggcgacgacgctgacgctttaacgttgaagagacaggggacgcagaaacattagccggaaaatgcggaaaaccggacattttaaagtgcctcgcgagagaacggcgcggtcacctgcaacaccctgcaacctgccgcagagttactgctggtacagagagagttcacttttgctggaagaatgccttcctgtttcggaaaaaaggataatctcctggatgtcgtttggaatctccagctttctcgttgaaaaagacgcctgctcctggcgccgatttttcgctgacatgtgcgagtagagggctacgcgctgtgcccctgtgtacaggtgaccgaacacgcggtggcgctgaaaagcatctttcgttgcttcaccacgagttcggtaacccgacgaactgcgaagaagtccgacggaagtggcatgtcctctaaagtcgcatgcgtttaacccctttgtagagcgctagagagacaggtttgacaggttttgtgagctcgtgcggaagtgtagccatcccaactcgcgacacggaggagtttggggttttcacctcgtccccagttgcacacgaacgggtccttccgacaacaggcatttcgggccacattcacaccacgcttacacggtgttcttttgatgattgacatgttccggcggaggcgtagacgacagaaactccagaactaccaaattttagttttaagtccatttgttctcgatacacgcagtcctatcacatacctcgccagtgtcagctggggcggggcatctttaagacgcgtgttaaagcttaacaccttcaaaatgtggttcatacgcgctcaaatgcgctgtgaataaaccgctgaatgaaatctattcccctaaagtgaaaacgaaaaatctcatccacagtcttccgccagtacgcagggaactctacggcttagggcagagcggcagaaaatagaaaacccctatcgtcactactaagattcggaacgctcagtcgaacacgactgtgaggcatttggtgtgtttgtaaatgtcgctgggaactacgggcggggctctccagtgaggtcacgaggcatgcaataccaatcagataacaactgaagctagactccctgttgttacacctaaaatgggatgcctaggtttctataaactgcctttatctgacgaatatatactacgactgggactatcggtttagatctggaaggtctttgttcatcctacgtaaagtgtgtaaacagcgtacctaaagcacgaatatctttcgctaacagtacacgtttatctcgggtgtagcctgttggaacggcggtccctgagaaaaagaagtcgttaaatacggacatgtttgtgtctactgctgatcatccgcctccgtcggtatagaaaactatacgcagcgttgaggcagtaaacagagcacataaagtggaattgccgtttattgttcctttcacacattggtgacgagaaactcgtctctcagccgtcacaagggtataaaagtgagtagcagtaattttttccaacgacgagagccagcgtcacctccgtcacacaacgacgcacagtcaaaacttttggatgctttactgcgtgcggattctgagagttgatatgcttttgatgaggtgtgttgtatttcgcaggaagactggtggtatcctttgtgttggagtaagccagttttttgctaatttattccgaccatttcttccgtatcgcgttgacaaaagggttccgctgaatttttggcttcgatgcgtaccgtgcgtgtctctggaccgaccgagtgttataagatagtgttcttgagactttgtatgccctcgaccctctcaacgctttttgccccttccctacggttttgtcctccttttttgaacgtggcagga

SEQ ID NO: 1359 - DNA, 2532 bp, Toxoplasma gondii
  source 1..2532: mol_type = genomic DNA
ggcaactgtgctgcctggtccctgcatgtagcttgtgtgggttttgaaggacgtcgtagacttcagccgtttcggcaagttgcatttcgaatagtttctccaacacttcccccgttgtgttttttaccgacttatgtaacctttttagttctgcagaggcgaggcaaacgtgtgagagggcgagagccgatatcgggaagtagtccgtttcggtggaagttcacagcagagactgagggtgtacagcgcatgcagcaggctgttgacgttgccgaaaacacgacagaaagagcgttttctcggcgaagaaaggtgatgtgacgtttgccgggagcttctgaggcgagaagaggctgtttacaaggagaaagcagacgcgcaccgcgagactggccgaaggagagacaggaaaacagaaaggagcgcaagcgcgacggaaaagccagtggtgaagggaagagagaaagacggagaactgccgaggaagaagtagacgcaaagcccaccaatagagatggctacaaagaggttaccgtatcctccgcacaaagccgatacagaaagcgagcgacatgtaccaagagagaaagaaagagcaaactggagagaaagagagaaaggcggggagacacacgaaagcacaaagagaggatcggagagagaactggaaggaggaaaggtctaaagagtcgaccaccacacactctttcgatcagagagttccgagagcttgaggagcacatgcatatctctttttcagtataccttgtgaacgagaaggcacctcgacgcagaagcgcggttggtggaacggactcgagaaggagaatcacgatttcttgagggaagatctttgcgcctccgtcaaaaatcgaaagcggtcgagcaaggtgtgtttcggttgtttgcgtctcagtgtcccggcaagactctttgacagaaggaagagcaggagctgctctcactgcaggcaaatgcaagcgccagccacttgctgcttttccattctctttcttttctctccacggcagcctgtggaggaacttccttccacgtgtatgtctcggtccgtgtgtatatatctttgttgtgtgtgtgtaggtgtgtgtaggtgtacgagcagattcttgagcacatgcagaaaggcgtcttctgctcgagaaaaaaggatctcaagtctgaggaggcgctttttgtgaagtctggggggggagcgcgtcctgggtgtcggcgggaggcgttgcgctctcccgcatgtctcaaaaagtgacggaaagaaagtggagagagtgtggcgtctgctcaggttttccgcgtttctttgctgcgttcacactttgtcgcccccctgtctttcctcttccttagctctctttctgtttttctccgtttcaagtcctcttttccgttttccttcccggttcactctgctctgcgttctgggccgcgcctcccctccgcgtcattttcgacctcgccggcaaagcgcaggtagacagcgcggccgccgccacagatggcgttcgttcctctcgacttccttccttcctccgtccgtttttcctcttccgcccgccactttgagcgcgaccgctccttctttccgggacctgagtctcgcgagcacgaactaggaaagcgaaactctccgcttcctcgccttgtctgccgagcaagtctcgtgcctcgcggttgcacgtgacttcgggcagggacccgggtcgcgccacgagatccgcgcaagccagacggtgattctttcccccctggcgagagaagcaacgcagggagtcttttggacctgaaaacaaagaaaaagcaaagttccagccagaaaacaggcgaatttctgcgaaggttcccgcggcggtttccgcgcccgcggccacgcccgccggcgtccaaggtgtacgtacaccgcatgcgggcgggtcaccacgccgggctgagcatttggaggtcgaaaaaaagccaagacaaccctgcgaaaaaagtaggcttcccgtagaaagcgaggtggcagcaaaggcaaggaaggcgtactggtccttggaagaaaacgcaggaaaaaaacacgtttccttcggtgtcttgcgacgttctctgcccagctcacgcagtgaaaaaagccgctgcgagctgagttgcggcgacggaggaaggccgcctttttttcgcatactcccgtgaaattctatctgaaggcttcgaagattctgtctagcgctagttgcagcttttcagccgtggacaacgggagaaggagggatttgcgtagttccgtctccatgggggttcgcgcagcggaaagcgaacggtagaagaaggactgcgtgtctctctctgtgcatgagcatgaggctcaggcctacggtaaaagaacgctgaactcgcgcgacaatgcatcccagaagaaccagcagagttcgcagaaaagggagagcgaaaagctggacgcttggcagcgggagttggcggacacagccgagactctcgagagcattcgcgctgcgcttccgcctaccgcgggca

SEQ ID NO: 1360 - DNA, 1976 bp, Toxoplasma gondii
  source 1..1976: mol_type = genomic DNA
cactgttggctgttggacgtgaggtacatcagtacaaaggcgaaaaaaactgtggatatagcagtatccgcctggatgtaacggagcaatctgtaactaaagagttttcagcttaaactgaggaaggaaaccagtattaaccgtgcagtttttatattcatgcccatctccgcatctacgccatactcggcagtgttccgttggtatgcagcagtgtagccggttgagtgggcaacgcttgctcagcttatggcagatcgtttctctgtcatcatcaacgattcggaaagcggtgcgagaaccgtggtgttttctgctgattagtcgtcctctttcaaaagtgacgaaagcggctttcagccgtaaaaacctccatggttgtctcgagggttcgtaaccccgtgtgttattatctcagtgcaacaaggggatgatcagacggagtttgaggtggcacggaggtgcctttctgttttatgaggcattcacacgggttccgttttgttcgaaaatctgtctctcacagagcaactgaaaggacagaagcggctcttaccggaactgcggtccagacaggccaaaaccaaggcaagcatcgcaaagaggctggaagaagagaagcacctcggggtgtctacgcatctggataagcgaggaaacctgcagagtggagaacgctataagaagaagcagcgcgaccaaaagcgtggtcgtcaggacttgcgtaacgctcttggttcagcgggtcaactagacagaaagcaagtgaaaaagttacgattgaagatctcctagaactaccgaagaatgtgctcacatgtggctgtgcaatgcgtagcgggggggtccgaggacgtggcgaagaaccttccggtgaattacaatgtttcccgttgtcaaatgctgcattcgctagcggaaaaggtgctttgatgcgaacctgtggaagggctaggcgaatgcttacttcctgagttgggatggacgcactactgattggttcgctctgtaaatgtagctcggatccaccccccgcgatagtaccctggggtacgggtacctgttgccaagcaaagcaggtgggggggttcgtgtgactgaaaagctcgcgtccgacctcaggcaaaagcagagataataaaaggtgcgtcaatttccgagtcatagtcttctggagagaaacaaacgaagaaacaacgccaaggaaaataaacagatgtcaaccacatgcggtgtccacagcaaacctaacactggcgactgtaagcgtgggtcgctagcagccacagttttgtgttgtttttcacccctagttgggaatgtgcttggcaacttgaaaactgtgggagccggaatgtttcccatgcacagacgtctgtacacagaactctaggtgctattcttacgacgaaacaccgctcctagggcgtgaacactggctgagaagtttcgtctttgtgctagctggcgtgaacctggtgaagaaaacaacgcaaaatggcgtcgaagacactaactagaggtctgctgaagtcccagacaacacacaataatccatacagtgctcccatacgttcatttcggagtcaacgtcaggtgactggtggttgacgccaagaccgcacatggatatcgcagtgcacattcgaagcggaaatcttgtttcaacaaagccagaagagggaagagggatggagtttttgacgaccgcgctgcactgctagctcggccgattgtcgcttgcccaggtagccaatatctggtggagttgaacatgcagtctagcttttcttcgtgaatttaacgcgacaaacgaaacgtgtcgcatttggcctttcccgagtgatggcatcgtaagcgtttttctggtcgcgagctccatacggatctgaccccaataagagattttctctataaccgtcgccagcagtcaacctcccgggtagctccatatttccctcgccttcacactacga

SEQ ID NO: 1361 - DNA, 2159 bp, Toxoplasma gondii
  source 1..2159: mol_type = genomic DNA
agataaatccagtcatgaagagagtagcaaagcctacagattcagtgtgcacaccggctgattccgtgctgttcggcttcagtttacttgtggcaagcgagagggtgatgcttaagtgggttggggatttgtagaagtaatacaaaagagagcctaatggtctcagcctcagcaacggccttctgggtgtgtgcgtctacttcactcaccgaagatggccattgtcacacatcctcccatctgcatatggccatgaaatttgtttggacggataaaatttagatcgctcacatcttgagcgaagaagtgagccacgatcgcggcaacgcagaacatggcgaccaccagaatcctaggctttgatttctcaaactccatcccctcaatgggtatatcatcagggccgccgaagtacatctttggaaatcagcaaaacaataaagcaacctcgcggtatcaaaacgagggagtagcacaaaacagagatacagatcataaacaaggaagctttgcagttggagtgatccacagaagtgtaagaacagtcggctgcgccctgatgtatgcacactgcaacggcaggcatatggccaggtgcccaccacatgagacaaaacatttactcccttgaatgcgctgcatcagaaaaacctactcgcttcttttctctcgaagtccttcccccttggcgcttttaccttgcgttatgcgtgacaaataacaacgatgtggcgttttggggcgctttcaagtgaactgtcatggattgaggaatgcaagcgcatggatagagacccgtgctgtcaaagccgaaaggcctggacagcctagtccccctaaagcattgccgggaggtgccccaatagtgtgtactggcgcagggccattctcttcactcatgccccgtgtagtttcaaatcgaagcaagcacaagactgaacgccggcggtaccgcgcagccctgcgcgacacagccattcttgcgctctcgatctctcttcaaatgtgatgctggtactgggacagtcgaagaaccgacaataggggcaatgcaaatcgctacattctgcttctatcagagaatcaccgcagaagaagttcacccgatgagtttcgcggcgtcgcgatgcactcgcggactgcaatcgcttcgtgccagtcaatttcctgccgtcacagtacattagaagtgtctctgccaataggaaaccaagaagccccacagacagagagatgactgcagacgacgggcagctgcacacaactgctatgtggtttgtcctcccacgttatgtgtgccagtgggcgttgtcctcggaaaaatcgtccctcctgtcgccatctcagtggacattcgtccgaacttggaaggcgatgactataacagggaactcatctaccagtatttttttggcgacacagtgtgttcactgcgctgtagacactggtacggggacaaccaaggatctaccagtgttgaggcgttcgaaagcggacggcgtgctggggttgcgcgacacagcgcggcatgctgcggttcgcacacccgtctcttccgtcaaaggctgccgtcatcgcagtggcatcaagctcaaattggcggcgcgactcgatgggttcctgctcggatcatttctacgttacacgaatgctcatacactctatatctagaattttgtgacgatacacatgctctacatgtttttctttcacttgtgcacgcttctacctctctcttttcttctcgcaatccaccctctcctggatgtagctgtgcgctggaagatgacagctttgcacgttttttcggaaacgtcttgctactgcgacaaagcagcgtgatcttaaaaaatttagcactacgctttttttcacgcaggccgaatggtcagtttcggtatgtcattgagtttgctgcggcagatgttttttcctctgcatctgcgcatgcacggggcaagcggcaagcaggtgtcctatacgtggcatcagtagaaacgcggcactttcgccgtcagcattttcgaggaggtctgaaagatcgaagctccatatgtgttctttgagaagctcctaagacgtcttcctctcaacgaatgtggcgttggagtcccgttgaggtgaaccggtcgtccgttttcattgtacagttccagtca

SEQ ID NO: 1362 - DNA, 3714 bp, Toxoplasma gondii
  source 1..3714: mol_type = genomic DNA
gaccacgaggatctgagtattctttctcatctgcaattcgcgtgtgtttgcctttcggcgctcgtttttccactgttgaggtcttccgacatgttcgtgatcttcttcctcggccctgttcgccttcacatctctttgtgcccttgccgtgtaacgcactgccttgaaacctccgtctttcacaggatttctgtttttgcgcggtctccgcagttttctccgtggtggccagacctatgttgctaaagacttcttgcttttcgtgcagcgaaaagtcttcgagggctgccgaccgagggagatgtttgtgatttgcgtgttccgtcgttttcacgaaactgcatctgtatctattgacgcttgcaaactatgtgcgcaagatattgaacggcacctctctccgcactttgcttcggtgttcatagatttgaatgtagggctatgcgactgcatgctcttgcacactcgtgactccagcgcatctggagtgtccgttgcttctttccgcccccctctccgcactcgctcctgtggtccaggatcttcgttgtcttctctgtcctcgcgacatgggcaggaacaaaagagagggatgcctcatctttgtcgtttttgcgcttgagaaggctacagggctgcaataccgtacatgctatctaccgaaactcgaggaaacgagtgtttactcccaaacgtttcagcgagaaagaagagtggacaaaggcgtgttctacgtgtgtccagccctcgcctgtttcttgcagactgtcggattactttgtctctcactttcgacaaatcttcacataaagagctgtcggcctccacctaaacacagcgatgcagagtctacggtctcacctgatccgacaccgtcgccgaatgctacacatgaatgtctcatacacgtttataaatccaattgttcacatgcttgtacacgagcgtgttagggcaaaaaccgaaattttcgttttttctccgcctcagcaaggcctttctgtttgcacatgccgatatatatatatatatatatgttcgtatatagatgaatcgaaaaagatgcatgtaagggacatacgagacagagaggagcgtgacaaaattggtttgttctttttcttacagggagcgaacccgaaatggatacgaggtcaggctgaacgaaggctcatttcggtcctccgaggcaacgcatcttgatctcggggaagtttcgaactctttttgtgcaaagaacgaaaaaagcaaaaggagggggacagaaaacggaaacaaaaaaaggagaaaaccctcgaaagcaggagacagacttatatgcacgattcccttttttgggatagctgcagcatccattcgcgtagcgccgccgcctcgactgccatgtcctcccgagttcgaggcctgcgaaataaggacagaaacgccgcaacacaaggtgccttatcagcacaaaagaccaggcacgaaacggctttgtagggagtgtatgacttctttgtcccgacatatattgttaagtgaacaagtaccgtcacgatctaagtcagtgagccagcatatttagagacagcctaagcacacgcaaaggcacctcaacaggctcgctgtattgaacagacgactggacgcgcactgttccggcctcgtttttgttttgttcgggtattttcctctatttttcttttgctgcctcttcgcctttctggtaatgttcctatgattccttccttgccattggtcgttcctgtcgcgtgtttttccgaaagagaaattggaacctcacttttgctcttcccggtcaacgccaggtctccgctctaagtcgccctgaaaccgaggaaggacgtggaggtgaacgtgggacacggtttgtccactgtcgcgaccatcttggagagtaattgaaaaagaatctgctttgtgtttcgagactacaagagaagccacgagacgggcacttgcaaataaatcctttacttcctcttctgccaagtcgcgaaagttctgaaaaaacaaaaacatacagaagaagcgaaaccccggcgtacacatatccacgacgtcggcctccacgtatctgtacaacgacacatatgcatatgcgtgcatacatccacatacaactgtatatatccatacacatatatatatacatatatatacacatatatatatacatatatatacatatatacgtatatatatatatatatatatataggttggcacaacgtcagtgtgtacgcacgcacgtaggttcttcatttataggcgtagaaagaattgactcgggcgaatggtgcgcagatgtatgtgtgagtgccggttgattttaaggtacgaggggaacatgattctgtggaagtgcattttggactccactcgcatgcacgcattggatgggatggtgttcacgtgttgctttttctctgtcctggaaaaaaagggtgctgctttttctggatctgtgccccctccatttcgttccgtgagcgaaactgaccgggacaacgcgtttggggatgattagaacgtggcctggcacaacaggctttagattcgtaaaagcgatggagagagaactccagaaaaaaacgatgcctctttcaatcggccatttagagaaccggtatgtttctgtcggatcgtctgctcccaggtgccgctgccaatcgacatactctgcaggtgaggaaaccgatggacaagaagaagagacagaagaagagggcagagacttcgaaagtgaagttgaggaaagcaacgccattcttctgaggaaacagggagtaaagttcacaaaaaagagggaagataccaaaggcgaaagagaggcgcctgcaactcggccgcggaccgacgggagacacagagacatggatcgccagcaagaagcattctgcccgagtcgtcaggccgcaacgcttggcgctaattgactttgtctgcagaagagaacggcggaacgcaaagaaacaagtacgaaggaaacggtgagaacaagagaagaagaaacagagacacaggcagagacggcgagtgagatgaaggagactgatagacaagaaaagaacggaaaggcggagagaaacgcggaaattcggagcgttcaaaaggatacagagaaacggagaaagagatgggaactcgaaggaagcgacgagacgcaggcaagagtcacagagagaagacactgtggagtgtgagagcgagaaaactcacccaaaggcgacggaggtatgccagacctcgcaagtctggtcaatacggttctcctttactgacttcggccgggacagttcgatggcttcagttttttaaagcggaaaaaagtcgttttttctcagtgagttgactttgccggcctttttctgaaggtcgcgcatgaggcttaggcgctctgcgctgtcgtagattctctgcatctgaatggtttcttagcatctctcgtgcgactcaacgcttgtcgatcccttaacatctttatcggcattttttgtctctcttttctcatctcctgctctcgctttctgcttcgtctcccgacggacaccgtcctttctccacatgcttcgagttcttttctctcactcagggcacttctttccctcctctttcctgccggccttcttgttacctgcgaagttttttcttactcgtcttttttttctgtgtcgtttccccggtcctctctctcctcctctgaaaaaa

SEQ ID NO: 1363 - DNA, 4077 bp, Toxoplasma gondii
  source 1..4077: mol_type = genomic DNA
ggtaaaggagaagttggagagtagaaggcgaagaggacgcgagaaggagaccgagaaaaataggtgggagagggaggaaccaacagaccagcggtgtgttatggagcgtcacatcgagacagaaacggagaaagcgggggtgtacaggcacgagacgttttgtgcgttgttttttcagcttggacggctgggaggttcgcgacgggaagttttgtcgcatgcaaacccaaagaggcgcatatgtgtctgaatccagctcgtcgagtagctcgagcagcagcagcgacagcgaatcttccgacgacgaagacgagttggaagagatctcgaagaaagtggcgaagatgagggaaggcgtcgacgctgacacctggaacctttacgcaaagaccaacgccgtcttgctgcagcgacggagacagctgctctcggtctgctctcctgcaacgtctggggctcgtgtgacgtctgtatctttcgaagatagaagcggtgatgttttcctctccacggcgcagagtgcccgttcctcagacgcggatggaaagaaggaagacggggcagggggctcggcggatgcagagagaagtggggtgtctgtacacctcgccaggccaccggagacgaacgggacaaactctccaggagcagcggggtcgacagacagcgagaccagcgaagatgacaacgaaagcgacgagcaggccgacggtagagagaagagcgacgcagcatgtggagctcagaaaactctaaagaggagaactggagaaaatgaggctggacgcaacctcgcgagtgccggcactgagaaaggcgtcgaggggaacggcagaaacacgggggagacgagcgctctcggctctgctgctcaggagcaaaacgccaaaaaatcacgccttctcacctcggaataatccatatgtgcagtgtaactacactcactcacgagtcattccggttttacttctgggtgcaaacgcgcctccaagtccgagaggtgcacttccactcttgtcaggacgcacgtccacgctaaagccaccgctgcatgaacagtcgtcagacgctcttcgaacaagaggaaacacaactgcgtagtggggatgaacaagcgagtggacctgccgatttagacttcgtcaaagcttttgggtggcgaagctttcacaaactgctacacatatttgaacttgcttccgcgcaaccaacaaaatgcatggactgtcgtagaggagatgaacaagacaaagtgattctcaactcggctctcagtttctcaatagagagaacacggtgccacgtatacatacaggcacctctagggatgtcgatcgatgcatacatacctcacattcatgtatatatatatatatatactgtatgtgtgcgattcgctttccctctctctgatggaaaagtacgtgctgaatgatcgtttgctgacggaagcgtgccagagagcgtttataagaggaaatgcgagtttccccgatctcagtgtcggcaaaattggtccaggcagtgacttttagctgtcttaaacactccaggtggatggcggtggacagcaatgataaagatcttgggactgtatcccataagtggagtcgaatattcaggatcctgagtactatgttcacttccgtgtagtgaatctgacagagaaccgatggctggcctcatttgacgcctcttgtgaagtgcatggatttgcagactcacgcagatgcatgcaaacttacacgcagacagttaggaacacattcgcttagtagacacatgtgttgaaactaaaacgttatgtggggtttccttggagcaaggtgatgaccgtgtacggagtcattccttcgctcgtcaggcgaaggcccactacatcatttgggtttgactttgtagtgaagtgtcttctgttcgcttctgagttctttaagcgtctggtcttattcctggaagctgcatttggtattcatctgagtctacagaacgaaaaagttcgtttgaagccttcagtatgtccatctcaactgcgtcagagtgcagtagcaaacagacacccgatctatattacccagactctttgtttcggtagataccctaggtacccgcattttccgctttcttcgccgcagcgctcgtcccaagctcttttttcccttcctttcaacacctaactgaggaaactttgcggaacctagtctagacagtacttccgaagttacccgcctttgctgcaccgaactcccccgactttgaaagagtcgacgtgctcccttgggcagtaccttagattttgcacatcccgtgaaaacttcgtgccagcgaggagctgtggccttttccgcgttcttacttttgccgcgccagtttaacggcaacccccaccgagtaaaactgtatggatgtgggtctgcctccctcggtccgcgtctcctgcgaaacaaaacgaattgccgtctttctgacgtcctacctggctaggttggaacttcgcgatcgacgctggaacgcgcaattccgcaatggcacccttcagtcagtgcgttcctctgagtcgaggatcccgccgagacttggcttccccgaccagaaaaggcaccaaagccgcgttctgccgcatttcgttcgcgtttcgcctcttcggactcgcacgaaggacttcgcgagactgccacgaacaaaagccacatttctgccgcgaaaactcctcgattcgtctagccacactcaagaaaggatttactcaaacgcgccataccggggatacgcttggctgggtccgcggccgcatttcaggtgtctgtacacctggggactgttgcgcgctcacgtggcaagtgctcgaagtcgcgtttttgagtcgggcagggcttcttgtccttcacgcgcgcaagtcgccagcggaggcctcaggtgaggcactttcacgtcaacaaaaacatgcgagactcaatataattcggaaaacgccgtttgcaggaaccggtgccaaaggcgtcacctcgtctggctgtcccaggacgcgcacaagactctccgtgtcttgctcctgcttgtcgggttcgcgcgggtccgcttggcccgcatgttgaccctgttttctccagtttctcttttcgctgagccttttattcttccgaacttcttcccttctccatttccagtcggttaagcgcccgtaccgcgtcgtcctcaatcgcgttgttcgcgaacagcatcttccgggcgccgcggtgcccggtgcacgagcggagaccgtttgaacacgtttgttgcaggccttgtggcgacgcctatttttgctgtttccgtaagaaaatctccctaccacttctatttgactccgggcaaagtcctgataccgtctgaccgggccgaactagacatcgtgctccaattagcgaaaacgccacttgaccgccgcgccggatttgagtcacccccgagcgctgtcacgagggaaccggacagaactctgagtgggggtcacgtcgtttttcacgaagccgctctttcccctttttcggtagtgaagggagatcaaagtaatcttcctcgcgtcgcgttctccgtgctggatccctcagttgcttctcggctcgcgaggaaacccccgacttcgactgtctacagacgcgacaaaaaagcgcgttccccgcttcatcttcccttgcgagcgaaggctcgagtcagaggccactcgtgccattaaaatacgtggagaagctcgagacgccgaacccccaacgtctctgctcccgatctgtccgtttccagagccgtttccgtcatttttggaattcgcttgctcgcgccgccttctcgccgtctccgtcttcgctcgcttcaagacttttttcgacgcgtcgcactgtcactcttttcgcggggacgacggagcagacagggcggcagttgcactgtatatagttcattcccgttaattttttttcgccacgtgagcttccgactctcagtcttgactcttcgtagagtatctcgcaaggcgccgccctcgacacctgcagatcttccacttttttccacgagtatgctggtgcggctttcagctca

SEQ ID NO: 1364 - DNA, 2838 bp, Toxoplasma gondii
  source 1..2838: mol_type = genomic DNA
ggaagcacagagagtggtattgtgtgcagcaggtggaaaagttgaaaccatcatgcgtcctcaggtgttgtttttccttctcttttttcctggcatcgccgtgtcatacacatgcgtggtattgttctggatatttttgggtttctgcataagttcacgcatcgtacactgggaagtatcttcttctttgcagaagtggaggcctttggggacttcagagcacagcgcttctcgcccttcgtgtctgtacatcccaccgttttcgcacgtgaaaaacgactcaaagaggctgaaaagatcttcgttggacagatttcctcgtccgatctcttcgggtgtacacacacctctgcagtagcgcgccgcctctttctccagaagacgcagcagggatctcctggttatcacttgaagaacgagaggcgctgcccgtgaggaaacaaaggcaatgagggaacgcggtgtcgacttcctcgatgaagtcgctgctcattttccccttcgagctcagatgtctccacccagtgtgctgttacacaaatccgtacttcttgtaaagagacacaccaaagaaatggatagaaatgagtgtacatggacaacaccaaacatttggctttgctgagtttaccgatccttacagacccacatgcacccgcctctgctgctctctgtgtggaacttcgcctcgagagaaaaacgaagcgaagcagcagacccggacgttttctcctcgttcgctccggtgtacttggctgacttcagtggagggacgagtcttggttttttaactcgcgagtcctttctcgtctagcgacaaacatctagatggaggagtagcactagggtggtggcaacttaacttcggcatgcgacagataaatctctctcgcactgttgttcatttcaacacacataacctgagtgaggatcgtctgacgggagctacagcgatggacctaccacgctcggatgcctgtttagtttcgtctcgctttctccggtgctacgtacagacgcctcaccatctggaacgaacaaagagtacctagtagtacactaagacggcctgtctctgaacatcaacatctgaagctgtcaaggccacagtagaaccatagagagagcggatgcatatagcgacatacacaggctcctcctgtatataatacgtaagatgaatatacagcactggaatcttattcagtcgaatctgaagatccgccagctgcgcatacacctgatttcgagcagaatctccgtcgaccggaaggtttttgcctcgaggcgcgaaggtcttttctcgcgagctcattcttcgtttctcattcctccgctccagattccccctgctcacttctcgtttggcatttctcgtttggcatttctgcgtccctgtgagtgaattcttcgcatttctctcccttggagattcctctcaggcgccgatttagaacaaaacactgcctttcgtccagcctctagttcctgcgcacatccatcttctttgcttgcacggcgaatcctcctcgcggtcgtatcggtcttcgttgctcgccgcgccgcctctgggcatggtctgctgtggtttctgattcctccgcgacgttcttttcgacttttccgtgattcagagaactctcccttttcgtttcctcgcttcgcggcgcgcagaaccggcaagttcagggaggaggcggtggcgagtgctcgggagacggccgagagaagggaaaaagctgcgagttgtgctcaccgcgcgggtggtgtgtatgtacaccgcgctgtttcgagatcggcgaccgcgtttcgcgttctcccgtcttttcggatttttcctcgccctcgctcggccgaaggagtgcgttttccgtttctcagcgcctcgttttgtccctttttcttgttcgtcgtccagcttctctcctggcacttctcctcgccggcatctctcggtctcgctgggcgctgggggcgtcacttctgccttctcgagattcaggtgtacctacactctcctccgcggcgacagggtgactcgcgtaatacttcgcacgcgctcctgtcgcgttgtctgtcgacctgactcgctctgctttcctttcggtgcgggccaaactggtttttgcgccttttctcaagtcagtcgaccccgagagcgcctctccttttcctgcgaaaaagagtcgcgaggaacggctcccgagctccctcgtttcctccagacctcgtgcgcaggcagtcagagttggttttccgtttgatgacgttcctcggcctctcctctccactgcgacacagtctgaaactcctttcttcccgacagtcaccgcttccgtgtgctctctcccttttctgaggacgtctgctcacccgttccgccgttcgtcgagtgtacgtacacctctctcaccgagtgataccgggtgatccagccaccgtctccctgtttgtgtacagacgcgttcttttactgccctgcctgcagcttttcgttcgttcttcccaatcgtatcgcggggtgccgcgtcgctggcgaccctgcttcgtctgcgttgtcgatccgtcctctttcgactactttctgtttcgacaccttgccgctcttccaaagaaagaccctctctctgtgtcgcacccggactctgcgtcttgccgcgcagcaccgagaaacacagtttcctctgtcgccgtccgcggcctccgctccaggcaaagaggtcttctccgcaagtcctgtgtgagcgtgcggtggatgtacacccgagtgtttgccgcggtcgacacggcgcggggtccggattaatcctcttcgtcttccactctctttcaccaaaa

SEQ ID NO: 1365 - DNA, 2092 bp, Toxoplasma gondii
  source 1..2092: mol_type = genomic DNA
cagattgtcatagatctccatcaattctgcgatctacacatgtcgcgattgacataaaaatatatatatatatatatatttaaatggacaaagtattataaacatatgcagaggtctctcaacgcaggcgtgaacacagaccaagacgtacattgatatatatatatatatatatatatatatatatgtataggtattcggagaagagacggcgaaacgcgtactggtggaaacgcaagtcgaagaaggaaggctggcgtcgcagagtgtgtggagacacagacggaggagaagattgaggagttaggtggacagctctgctggaacagacagaggctgtctgcaggagagagttgctgtgtgcgttgccgcagaaggccttgctgcctcgacagggtgggtgttcaggagcaagcgggtgcgagggagaggccatcgaggtgaaaaaagagagactgaagacgaaagtacaagcgaggacgaggaggcagaaacaggaaacgagaggagagagaacgagaggagaaaagagagctgtaggacgaacaagagaacgagaaaagagaggagagaagagagagaagagacatacctccgtttgggccgagacggtgcttttccatgacttctttgtggtcgatgaggtcgcgcagattgactgcacagtcgtagggcaggaagtcatttgcaggatcgaggttgacgacgatgtgcggccgatggagcgcccgaagcatttgctgcatgccattgcagtaggtactttttccactccctggtggaccaatcaccagctgtccataccacatggctccgcagacgctgaaaacgaacgaggaggagagaccgacgaaaagaagaagagaagagccgacggcaagcagcaggtgaggcagagagagaacgagaagaagaagagaaagagaagagggagcggaagaagaacagagacgacggaaagaaaggaagagcagacacaatggggaatctgaggaaggcccagatgaaggaaacggagatgaagcagtactggtcgagacgtcaaagagaaaaaagagacaccgcgcgagatcagctgtcactccagccgagctgcgaggggaagacgccggaacatcatgcagaatgcaccgtttgcagactcagaaattcacagtacctttcacagacacgagaagaagaagaattttttccaaaaaggacctcttctttggcaattctttctgtggcgtcgtgtctcgcactcgctcgcgatgcctcgaaaagttgacgcgcctctgcagggcgctgcacctgacttcgtctctcgaggaggttcctctgctaagaagaagtctccgaagctccctcgacattctctcatctctgcggtaagcaactgtttgcctcagaaacgctctcgagtccggagaagctactggtagccgtttttcgaggtgcatgcgcgctggagagcgctggagagcgctggagagcgttggcggtcgcacgcaggagtacgtcgagaaacgaggcggagagcgtcgcgcatcgtcttttttgcctctttctccgagaagagcgcctttcccggagagaagaaagagccctttctcgcttccagagcgacactggtcctggcaacgcgcgacgcgaggaaatcctgcgctggcgggaggctacgaagtcgacgccggagagacagcctttgcaagacgcggttgggagggagagctgacgagagactcgctgggcgttccgagactgggaggcgctctaaatttcagaaagaggtctttcacggagttgcaaggaccgtccagacgctggaaaacgaggaccatgcgaagagtggaaaactccactggtcgctttctgtcgagtcgcgtcggagccgctagatagagtcgcctcctcgtttttgtgtcttctccctccctctgtccagcctctctgcgtccttcccaggcctccacctttcctcttcactcctccgtccctgtcgtcctttctatgtctcctctccttcctttctctttctttctttctctcactctcttgtctctttcgcgctccgacttgtctgtctgaacctcccatctctgagttgcaa

SEQ ID NO: 1366 - DNA, 4631 bp, Toxoplasma gondii
  source 1..4631: mol_type = genomic DNA
gcatctccctcaaccggattacactccttcatacgttacacctctgttttctccaccgccgcacagaaacttgtgtatcggggggtctcctcaaatctctctatctctatctttctatctgtctgtgcgtatttactggggggtaaaagtacaaagatctgtgaagaggatgtatttggtttctggggcttttgcagaaatctgaagactcttcggcgcacttacgcactctaccgtagaattgcatgctttccaggacaggaccctctgtcaatgtcttttcttcagttctggtgagacaagtacattgcgtgcatcgacagaaggcatttccacgtgaaaaaaggagtgcttttttcaggtctacaatatatacaataccctttgtaatttgaggatcacaactcatgtggccatatccctatacacatatgtataactatatatatatatatatatatatatatatatatatatatatattagagacagatacggtgatgagaagaagattgattttgatgttgaggcttacaccgtttatgtaaaggtatttctattctcgaggtccgctctatgcgctattagcattggttcaacgtgaggtggtcacacatcctggccaaagctctgtccacacacggctaatgctaacgctgtgaacaatgtaagcaatgccttcgttccaagagtttccgacgcatttatgctctctggagaaacgacttgtttcgctttagagtctcggcggtgtgttcgctctcgcgttcccggctatttttttctctttcgcttccccctactttgctgtcaaggattctggcagcggatgcacggcttctcacggcagatcggcccttgagcaggatccttagggtacgaatcggattaatgacggcgcctaacgttttgcgaaaactcaatgagaactagaaggggcgttcacgactcacggtttagagttccgtagttcctttgtcccaccggtcacgttcagagggtgaagcaaagatctttttcgaaagagacgagggaagtgcagtttcgactgaagaaatgcaacactaacggacagcgtcgtcgtactctggaaaaaccagcgttatcaaaatgtctcccggaatcgggcagccattctagaaagcgattcactgaatgcgattcactgttttgtgaatagacgcgcatgcttcagcaccggtagactgtttttagagtgccgcaaatccgaccgttcttctgttttagcgccaaacctccgcttcccacttgaaattccctgcatgtgtctgtttcttgttttggccattctttttcggtgcttcctcaggctctcgaggtggcgacgcagttcgcgcccaccccgtcagagtgtttgaatttcgcgaaaacgaaaagtccgtctgtggctcttgatagctcttcacgatccgagcctcttggcgacgggccagtgacccacacaccgtccacagacactagcaaaaactgtttctctctggagccgacaaacgacgcttttcggtcacttggtacggggggaccccacgaatctctctgttctggagacagtcgatttcctctcgagaatgggcgcggctttccaccgcttgctggttgtacagttgccagtggcgctagcggttatgatggaaatgccagcgcggggacaagtggcaacctgcatctgtcgagcgcaatttccgatacggctttcaacacatcgcagccagccatgtcttccttatcttcgagagatcgatctacactcgcacagccaccacgcggcactccgaatcactgcgacgttgttgagcaaaggcctctgctcctgtcttcctttctgagggctctcgtgctactcgcacaagatcagcttcttcacgaagaggcggtcaacgccaacgccgctccactggtcacttcaccgtggtgtccggcgccgaggaagtctgtagacgtcgctctctccagctttactgtctctctcttgcaattctatgagacgtgctctagcaacgtggggggcggcagccgaaaagagagtttaagcaatccgacgatgaagcgaaacagcagcatgtgcagtcgaagcggcagaaaaagaagcagtagtctcgcgagcagacgaagcagcctcagcaggaaaatggcctctccacagacgtttaagtcaccctctctcgacgccttcaaaccgttcacggatcccgagatcctgcaagcctttgcaccgctgcgaccttttttcgctcgtagatttgcctttgtgccccccgatgctggaccgagtttcacgggtgaactggagaaagcaagcaaaaccaagaaacaaccaccgggtgaaagtggtgagtttaaacctctcttctttctcatcctcgctccaaccgttcggcagggactgttccactctgtcaatcgactgctgctggattctcccgatcttcgtcgcagttgtgaaaatcagtgtccgcacatgcgtaagaccacttagatgatagcccagatgctttcacgtatctgaatccgtacttcctttcttttttcactggctggtagctttggtcaactgcgccgcaaacaagaacctccttccctttagccagaactcatcgcgatttgattgtagttttcgtgtttccgaaaatgtgcatctttgcaaactctctgcttgttcgagactttgaagagtatgtcgaggcctcacgacatccagtttcgtctgccttaacgaacgacaccgttgatctttctccagcggccacgatgtcgagaggtccgcgtatgacgggatctgtctacctccaagagttccttttgatgctgcgggtaagaggagtaatgggcatgacaccacaaccgtttgtatgcctactcatcctgcggttctcttgcccgcttttcgtctagcaactttcttctacctcttcatccgtctcttcttccggattgtggcacttcccctgcctcccagaactcgagggtaagaagagaagggaacacagcggagtccacaagaacgaacaagttgcatttcctgaaatcgacggtgccttgagaacgaaattcagtttttccgaggacgaaaaggaaatgaaatgcgcttcggcgtagggatcgaatagaactggttcacaatatcgacgtcttactctctttacggccgctttatgcagcgctgggggctcttgatatcgtctgcggaaacagaggctgcaaagcagatcctgcctgcagagccctccgcaccaacgacagaagaaggtaggttttatccgcgcagctctccaattttgaacgcgaaatcctcgtgtgcttagccatgaggtcgactgttgagagcagagctgtgccgaaaataccgaggtcgtttgctgaatgcactcgacattgccaatgagtatgatccctactatcgtgttgagagtagtcttcgtcgcgacagaattagttcgaagcgtttgctgggaagtgtattctacgagttggtcttctcgttcagatcctgaagttgtttgtctaccggatcaaaggtctgtgatgttagcacagcagagttaagagaacggttattgtagaaatagcaccgatagaacgccatgcatgagtacgacagagaaatcagggcaacctgagatcgttcttagcaagacaatgtgcgtagttagagatgtttcgcatctaatgtgtagttttctattgctatgaatacgagaggtaaaacactagtccatgcattacgcatacaacataaccgatacgaataacctcaatggtggaaaatatggaaagccaagggcctacctcgaacacaactcttcggtctggtctcttccggtgatgtgtaggatgagacgcatttcccttcgtgtgcccttcagtcatcgacccgcctcatgtctcccaacaggtttcgtgaaagctgtgaaacataaccaagtgtaagatgtgcgtgcatacttcatttggcatggaccggctccatttttcgttttctagaacaaccgtctccgtcgacagaacactcaactcttcagccggccgattctgaaaagacagcgggagcatcgggaggtcctttccaaccatcgcgagcgcagcgaacaagccccctttcggaggctcctggtgttgtcggtcgatgtgagaaatcacggcgacgactcagcgtgactgcgggatccccagacgctaagacggtgagaagtgagaacccgcagaaacataatgcggtaaaacgaccaaagcgaaatgtcgcaattcgcaggctgtctcgtcttctgcaagaggtcaacggggaccagacgagtagctatttgctcccgtctcgaacagggtgaagaggtcttttcagatctcagaacggagacaaagggccgatgcatgcacatgagcgcgtctctcaggactgtgttcgcattcaagactctaatctcaagcgaggctcttggtgtgggcctccacctcaatcttgtttcggttgagagaacagtcttctgtctacgtcccatccggttatgcagatgaggaaacgaggaatgtttgctgcactgtcgaaatgctaaggcgctgggatgcgtttgcataggtcggtttttctagatccacactgaacgggtgaagaaaaa

SEQ ID NO: 1367 - DNA, 3737 bp, Toxoplasma gondii
  source 1..3737: mol_type = genomic DNA
tgacagagcagagatgaaacagagacaggacgagaacctttccttccgaagctctctcgtcatggcgcgcggccactcttcgaacggaaagcaggtttcagatggtctacaggtaaaccaaacttgggttcttcagaaagctagagcacgtgaaatggccgagaaaagtccaaacggtttaggttccggtttccgacaagccacggcgaaacacctgcgacacgcacgggagtttgccagcatttctgtcgtaaaacatgtcaacgcaatgtcatttacgatggaacttatttgattcgcagaacaacagacgactacgtccgccgtgcaattatcatcatatattcacgttggcagtctccttcctaatattcgtctgtacggcatatacacggatcgaactcctggtggagtgtcgaggctcagaaagactgggacgacagcgagaagaagccagagaaaaaacgtaagattgaagcacagacacgcatgcagttgagagatccccggtaggtgagctaatagtcacatttcaaaggtacatccaggaaaagctctggtgttttccatggacggagctatcacagcagattatcgtcactaagcgtgcggtctcgactgagaggtggaagcaagacacgaaagagtgtacatgttcttcaatgccgtcacagaggcacaagcagaagcgaatagaagtgaagtggaaaacaaaaagacttcgtaaaacgaggcggaacatccacacagaaagcagcaaagcacggcaaaagacccggcaccgcaggcatcctgaaaaaacaattcctcccctgtcacagcccctgggaggaattcggtcccagatacgtgtgtatgcatgcaaatgccataggaagatgattctggaagagtaagccactggaaactagaaaaacggcaagtgttcgaagaaaagaaacgagagcggcttctcgctgcgcctctctgcggcgcgcccgcctgtggagcaggaaaggccgtcaaaggaaggaaagcgggggtattctatgggggaaaaacgtgaaaatacacagcgccaatcgaggagacaaaaaggcgcggtgaatctcgaggcagccctctcgaaaacgcgacgaaggtgcaacttttgatgcggcaaagcgcagacacaggaaccgatcctagagaacttttcacttacatcgtactcttcatccattttgtcagccgcggagagacagacaggaagaccaagaggaatggggagagcaaagacacaaaggaaaaggtcgaaggagagtcggaacaaagaagaattttaaaagtgcacgaaaaggcaaccccttagtggctcggcctaacgtcctcgatacagcggtagtctctccgcgtaaagcagcagaaaattactaaaagcgtacatgcggagagacgtagatacgtctgcaaatttaaaactctgtaaacgaatctctgtcggccagatgagatttttcagcattaacccagatgtgtgagcagacacaacagctttccaggggttcgtatgcgctccaccaaccgaaggtttccactccccagaatgatcgtgtgtctcttgcctaaaaaaatggagaaatcactggttggaggatcttaaaccgtttctgggatgcaagcagcctgagaggtgaaccaatggctggttgccccgtcgaaatccaaagtaaaaggcaaatcctcctcgctgaactcatccggtgtgtctaggcaacgttcccttcacagaaggaaaaaaacgagggaggacaaaggggcggaacccgcgcatctcgctgttcatgcacacgcaccgagcttggcggtacctttttaggtaacaagagaagcagaggaaatggcgagaaaggtttgttgtcttcacttctgtaggaccgggatcacacggggaaaccctgtgtctgcctatatacaatgccacagttcggtacttaacacgcggtgtctggagggcttttcaccaagtaccaaaacagcagcgtaaatcctgtacattgtttctataagagcggaaacgtgcagagaggccacttcacttcatgaggtctccgcttcctaatgacgccatcattgtcgtaccaagtgctcggcaagaattacgtctgcgtagatcctcaagtgctgctgtcaacggcgaggaaacctactcctcgacggaaacagagttatatcccttgttgtcccgaacattgcaaaacgtgtaatatgcgaatgcctgtgtgtataagcatgtggatccagttgcacattgatcaacatcagtgcagttcatgagtataaacaagcacacccgaagtctgcttgtgcgtttttccaacttagacaggattctcccggtcaaatcgcagatgccagttttttacgagtgaacactgtgctcccaaagccgcaatagccaaagaaccacgtgtaccgtgttcactattcactacaaaagagtcagaaggtaagcagtaccatgcatcacaggccagccgggatgtttttccaatcgggtcagcaagatttggattactcgcaccggcacccactaccccagcgctcgacggtgaaagtgtttcttaagaaagcactttgcagtcactccagacctctactcgcattccatcaaaagcgaattccgtgcgctgccggatctcattctcttctttctactgccctcttcccggctccatatgagttgttcatgcacgaagatttttagtgaagctgtgattcccttctggtgttgacagcccgcatattttggtgccgctttttctacgtcactcgttctcgttcgttctgccgaagaacattgtggtctagcgcacatatcatcaggtgtgccgggacacgtggtcagtctcacaggaaagcaaacagtcatttcctccagtttcatgttctggctaacgtctatcgactggcaggacctctggaatactagacctggatgccgtcgatccttcccgtggtacgtgccatgttctacaccgaggtccgcaattccgcgcagtgcgccggtgtaaccttccgtttgggcgtttgtgttgtttatggttcttggaaatcttcaggagtgtcaaatgcacgttgcctcgaatcggtgagcaggagaaagctacccgttttgcggctgttgctgccgcgcaacacgattggaacatgctgtatcgacctagcgcacggagtgttggcgtccgtctcgaaggccgggttttccgtaagttttcactgcatctgttcttttcgcgagaggccgcttttcgagagctcgtcgacaggaaaatccctcattcgttccttcatctttttgcgacatgcgtgcagttcccggcatgcgccacggcattcatgccagcgtgccggtgtgttgaaattcacgtgctccaatctcacaccatggcaagctgtcttgcgccggtgagcgatgcgccagccgaaagatgattcttccctggtgaagcgcggcggggtgcagtttcccacttttgttccacttgcttccccgattcacgtcctacattgtccagtaactttcaatttcgtatgattttgtcgcgcatcatactaggtccgcaacgttccgccgttttcccttgcagcctcccgtcccttgtgcagccggtgcaatcgagcttgccgcgttccgcgcgcccgaagccagccgttgtcgcaatcgaggtcgagaccttgggaaaccctgcgcagaaaagcgaggaaacgagacaaaa

SEQ ID NO: 1368 - DNA, 2929 bp, Toxoplasma gondii
  source 1..2929: mol_type = genomic DNA
gcagtactacttcgaggctttcctggcttttctgaaggacatctgcgcccctggcgtcctcgcccgcggtctccgtcgcctccacttcttcgtcgcgcaccggctcctcatctgcaccgtctctcgaaacgctcgcttgctggctgacgagttgcgaaacaacttcaggggcgtcgtcttcggaatccgacaacgagctgggtgccgcagcgtctttcttcgcccctcctggctccccgcggagtcctccgccgcgctggggggggacgcatgcggctccgccctgtctgtgtgtctccgtcgggggcgccgacagtcgccacgcttcggagccgctcttctgctccgacgtttcctgcgttttgcgcggcgaccccgcaacttctctccataacagcgggcgttgcagggcctctatcagctggtgagttttaacgaaacagccggccgaagagtcggaggaaacaaccgacatcggtccgtccctcggatcgtcataagacgagaagccatgatgacgcggcagcctcaagagaaaaatctggaccggcttcgcagtccagtccctctgtctgtcgagaacggaggcgccggatggccctctgcacgccgagaaagacgagccgtttccgaggccggagggagacacctgagggtcgggagaggggcactcggacccggggggaggagagaggagactgcatgcagagccggactcagagcctcggcgatgagaaagccgagagaacgacggaaccggaaggcctgttttcgggtgagtcgcgatgtcgatccagagggcctcttttgcacaggcgaaacgcaccttaggagacttccccttcagagtttcagcggagaccgtctgtccagcgtctgttcgaagggtgtcttcactcgcgttcgagttctgctccgacaaactgtgcttttctaggatgcgatatgacatctctgaacgcgcgatctcgccaggctcggtgacagataaggaacaagaggcttctggagcgtctgtgttgtctctgccccgccaccagcctaaaattcttaacgggggagagacacgagcctccgtgctgccctttcgttcagcactacacattcctggtcgaggtccgcgcatgctgttgcgtaggggtctactcctctgaggtgcctccactctccctccgacggtgttgccaggcgttgcaggtccgccagccaaggcgacactctcggcttcatgctcatctccagatccatctccttcgcactctgcatcggcgtctctctcctcctcaagaacgtcggtcatccccgtgctctgcgtcaaagagctggacgagcgcgcggtgagtttctccgagtctgcaaggaggcgcctggcaaccgcgagcggcaggggcgggagcagaacagccacgaccgcggtggaatcgcccagaatccaccccgctatccatcctgaagacgaagacagaaattctacgggaacgaagaggcgaaacgggtgggaagacacgttcattgtcgcgctggacgggtgctggacgcggacaggcgcctcgctcagaaagagggcagatacggcggaggaaccaagacaaaagagaagaggggggtcggacaggcgaaaaaaacggtagaggtgaagaagaggagaacgctagtgcattcgcactacaaaaaggggagggtcttggagacgaagcagacgacgcgcgagaaaacccccgaacgcctgggatcgtgacgaagagcctcgtctaagccaactggccgggccgcgaggacggttggaaaaaacgcacgagccgtcttcatgggaaacgaacagacaacgggcaaaaacgcatcttcatttcacctcgagatggagtaggaaaccgctctcgcgttctttcacgtggcgcagaaacctgcgatacacacggaagcacggctgtgaggtacgcggtggaaaggcgtgagagaaggggggacgccgccgaacagaagcgcgaggaaagctgcaaaacgaatttctctgaaacagagacgtagggacaaacatcccgacggtcaaactgtgaagacaaccgcgtacacgctcgcaagacggggtccgctgtgcctgtcgatgtgacttctgcatgcgcgcgagatgcatgcacactcttcacagggtaacggaaatgcaagaggagcccagagcctcgtcctcctgcattttcccgtctcattcgcctttgacaaagtccttcaacccaaaacctcctcaactgcatctgtccccgagtctcagctccctctgccatctcggttcgagtgtctccacgcagccctctgacacgacgcggtcgaccaagctgtgcccagagggaaactcgaaaattctgggtccaaatttctcggaccctccaatgcgtttccgcttttctctcagcggaattctagccgcttcgcgctgttcaacagagcctgtttctctcctttccgagagtgcccagcgcaggagccttctgccttttaaagccccgacttcgcctgctctcgttagcgctttgtccttcctctcgttagcgccgacttgtgcctctctttctcattcgctgttgatcgtttcttcagttccatgcacttgttcatacaggattcagggtgtttgagtctgcctctctctccggtggcatccatcacattaagctgattttgtctgctccgctatcgacctcgcgagcgccgcctgcttcgtggcaacttcattccttccttgttaatccccccctcgttttccaagactttccactcccatcgcatgcagaaaaacgttctgtcgttgctgcttcctcccccgtcgcctgtacatttgtcgcgctccttcaggacacccggaacgaggtcgcctcgaagaggaaggggagagtcgtctgcctctgaaggcgattttttctgtcaagcgcga

SEQ ID NO: 1369 - DNA, 3200 bp, Toxoplasma gondii
  source 1..3200: mol_type = genomic DNA
agcaatcgagtcggctgaagaagacgaagatgaggaacaatacgaagcagaagagaagagagacgacgccgatgggcaagaagaggcaggcgagggtgacggaaaggaggaggaaaaagaagaagaggcagaggaggggtgagaaggcgcaaagtcggacatctgtgaggtgtgtacggatgaagaggagacccagattccattacaaaaacgacgaccccgtcggttcccgtggttctaggaagcatccaggacataagccgaaagaggagtggtggctggagcggtttgcgacgaagcgagagaaactgaacgaagtgtagagacacctcagttcagtgtgcgaagaacgagaggctcactgtgtaaagaagttctccccacgagcaatgcggatataggtttacaagcatgatggtgtttggagaaaaaccgcggccgaaagacaattcccagtgccgctgaagcgaaaagacgaagaaacggaagaacggattcggctgtttcgcattctcttcacttctgagagttaaactgtcgcctgtatcggagtattttgacgaatttgagggacgcagaaaagaagcacatggaggccctgtgcctcaccggtcccttctgtcgagatcaaagcatcgcgacattggtgtttagcaggccgaagaagatttcagagtctgcagaggcattcttcgaccctttactttcctgcctctcgccttcttacgaagaggaactctgtcagcacatgccgcttagcgacacacagcggaaagagaaacatttgcagagagatgggagccttcctctgcttcttgatgtccctttcgcgttcgataaaagtcaagaatgtcttgaccactagaagccgccgacgcggtaagacaactgggcgacgttccgccttctatgttcgccgtactcgaagaaaagaggtattcaccctggcgaagacgtaaagaggagcacacttggagtcataaggaacgaattcaatttctagtcggtctacagacgcgaaaatctgctagcatttctgcattttcgcgtgcatgcccccctctcatgtcgcagtgcatgcgctgatggtgagctgtcggcctggaactgtttgccacgacccctcgcttatccagaaagcggtgtggcgtgcgcttcggttgaattgttagcaaagccatggcatgcagactgtctcctagtgttcctctattttaggctgtctaagattcgtggcaaggagcgacgactgtacagacacccggaacccatgtgacagactgggcgcctctgctgccgtagacctcacgccggaaacaacgaatccgactaagctagttggccctgaaattcggagaaaacgttaggttctttagatgaaatttatgttgggttaaacgaagggtcgcggtgtattcactactgcaagtctgacacattcttgagaagcgacgtcgatcgttggtaaacagaaaaacgacgacacgcacaggtgtttcatttctatacacagcgaaggaacttcgagagttgaaatgtatttgacagcgagtgtcaattcgttctttagagcacttcgttgatgtctgctataaacggcggtggtcagattcctctattcatataaaagacactcttggtgtctcttggagagtttacccacaagcacaccccatgttgcggacagaaggtaaacatggttttctcaggctcaaatagttctgtgtaaatgcgtgtgcaattgcttttgtgtgcaaccgacaggcgagtgatcatgtgcgtcacagtggtagtcatcgttgtggagaccacgatccttgacggagcgttgcagaccactggaacggaaaatatggaactacttggaacaaaatgacaacaacacctgtggtacacatcacacgacagctctcagagacatttccgcattcccttccacccctacgtgtgcctctcatgagattactctcttgacgtaaggactgtataattacgggatcggtactaccttctgcagcaagtgttccgttcactttcctttacgttggtgaattaatttcggttcgtctatacaatcctattaaaacggacagatgtccaactgggaaccgaaagtggaggctcagcatatctcaccacgttgacacctgcggatgatcgcaaccttgacgaggacactaatgcttgcttgtggtgtgaggtatagctcctgcgatgtgtaactccgtaaaattaatgggctgcggtagaaccgtagcaaagctataatcacacagttcgtccctgtgacgcatttgctatcgacactgggctttatattctgtaccagctgatctagattcgtatcttcagcctccgacgtcccggttctgtagcaagcacgcaaacgcagccccgtttcggcgttccgattttcacgggtatatgcggagcaaccggcggcaggatcaacgcgcggtacgcttcacaatctacattattagtcattatggtaacctggtgattcaaggaaaaaaatgcattgaacaagagccgcttcatcgtgcgttttggtaaaaccccttccaagtcgcggaaggttcagagacgccccagtcgtccgtttcgatcaaggccgtggtgttggcgaaaagagacgtgttattcgacgcagtctgttgaccggtcgagcgcatttgcatcgacgtccgctccctgtgcaagagcatcttcgcgtgtacttctgttctaacgccgatccgggcgtctctttgttttccttggagttccctctgagccgctagtagtctcctgtgccaggctggagagacgcagaaacttagatccagaacatcacatagtgattgcagttcgtttcctcaatttacgtcggaaagtcctaacttttgcgttacgctaactgtgtgaaaattcagtgaccgtagcttgggaagacgtcgtcacacgcgacggcgtgactccgaatgctctctgtcgctgtctttcggatcgatttgtctggtgtgcaggtgtatgtggaagaagagtttgaggctgtatgatttggggttgttttctgcgacacgtgtttggcctttccgtgctggtgtgggttcttgatgtagtttctgtttctcgtgagaccgtgaaaccaaaagcgcagtttcatctgcacagagtttgcaagagagagcctgtgttcttgtacagtcgtgtcacaa

SEQ ID NO: 1370 - DNA, 2942 bp, Toxoplasma gondii
  source 1..2942: mol_type = genomic DNA
cttcgaagccagtccttctccgtaggtcttgcgaaagcagcaaacggaggcaagaatggaggagaaagagcagaagacagtgaacaagcgcgagaagaagagcgagaggaagaagagtaagacgaagaagaacgagaaaacggagaagaaaagaggtcgcgttgtgcttcatcttgcgtcgcaggacgtccacagcaggagcaccgaaggacgaggaccgactctgaatcgctgtcgggaagagaggaaattgctccgtcgctcgcagcctctgccactcgcgctcccagaaaacgggaacggcttcctcgcctcgctcggagcgttggagacgactcacggatggagccgcgagactcgggaggaaaaagagacaaagcctggacagaagcagagacaggagatacgtccctctccgcgcctcgccttccgctagtgctctgcggcttctgcctctcgacttcgctgcagctgcttgacggtttcgtctgtgaactcctgcgacgaaaagacaccggtttcttttcctccgtctctctcgcctctctcttcgcctctctcttcgcctgcgcccctggcagctgcacgcgcttggtgcctggacgaaacgcagcggagagagaacgaaagacctctccgcctttcgaggttccctttgcctggtggcctcggttctcaaacaagctctctcgaacgtgagcctcccttgctcccctctccgctggcatctttctcttctctctctcctggcctctaggcgcgtcacactcgttgggctcgtctctcctgggtcctcgccgtctcgcgccttctgccgcgtctctgctccctctcctctctctcctctctcttcgctctcttctttctcttctctctcgtgcgtcttcctctgttatgtctcgccattcttcgtcggactccacaagcagcgtcggtttttcttgtgtccccgccttagtcgctgtcgctgcgactgtctgcttcctctctggcgagaagtccgagcgatctgaagaggagagaagcagcgtcgcgtctgaggctccaggggcgccgccccacaaagaggccgtggcggccgcagtttgctgaacgcagggcgttcctattgagacgcatttcagttctcttctgttgaaggagacgcccaggtcctcgcggtcgtccccagaaagcagcaaacacacatctcgtttcttgcagagccgcgatggtgggcgaagcagatgcggcaggtccccatcgtcaccgaaggagtcgtcctccctctctcttcctccttcctcgccttcgcgctctttgccatctaatctttcgcgctggtctcctcgccttgcctctcgcgcatctgtgtgcatgcggtggcggacaggcgccgcgacagggccctcaggatcttctctgccgctcgccatctgcacagagatgcaagcttgtgccaatctcttttcttcctctctatcttctcctcttttcttcctctcaaccttctcctcttttcttcctctcaatcttctcctcttctcctcctctcaatcttctcctcgtttcttcctctcaatcttctcctcttttcttcctctcaatcttctcctcttttcttcctctcaatcttctcctcttttcttcctctcaaccttctcctcttttcttcctctcaacctcctcttctcttcctctcaatctgctcctcttctctgtcttgtcttcctcttggtctttttttctcgtcttcattcgcgagtcttccttcgacgctcctgctctcttctctcgttccgctcttttcgattctttctctctcttcttgcttgcgcggctgtctctgctctcttttgccagtggttcgccagggtgcacactgagaagacacgacgcggacgagcgcacggagtcgacggttgcgagcaacgcggggagggcgacgagaaccgagcgagaggagagagagacaaagaaggtcccctcctctggggagggagaagaaaaagtttttcttcgacggcgagaaaagcgcgccgaccagtgcagcagcgccgagcaaacctggaaaaagcgtcgcatgcagcgaactgaaaaaagagtcactggaaaaagagcgttccctccgaagagagcagagagggagagagagtccttcactttgataaagaagacaatcggcgatacagagaaacgcgcgttcgctcttttttcgaagaaaaactctcattctttggtttcgccgtcctctcttctcctcccccgcgccgaaacgatcgaagaacgatatcttcggagaccgtcgactttcctctcttctttcgtattttcgtatccgtcactcgtctctttctcccaagtttttgatttgcttctctctctcctttttcgcacattatctggaatctcgagaacgcgcgcgcctatcctcatttcacaccctcacttcaacttcttctgttctgtctcttcctgtctcggcttcgggcgtcgtctgtcgttgcttcccctctttcttcttctgcagcttccgatctccagcgtcttggcgctttccgtttctccggagagtctttctgcgtgctaggtgtcttttccgccgaaacttgcgcctcgtcgctgacgaacagcaactgtccatctttttcacttacgaatcttctgagaagcgacttcttcttgttctctgtgcctcgctgctatcttcggagcctctcttttgccaggagagaaaaacggcagagcagaagaactcgaagagaagaaggggaggagaaaagaagagcagcagaagagaaggagggaagaaggagagaaaagaccagagagaggtggagacggaggagaaaaagagaacaaagcggagatggagacgaggagtcggtggagagaagtatccgcgttggaagcagggactcttgcctgagagaacggtttctgctcccgttgcgacggaacga

SEQ ID NO: 1371 - DNA, 2622 bp, Toxoplasma gondii
  source 1..2622: mol_type = genomic DNA
aagcagagaacgacgaagcgacacaactgagcaccacagaaatgctcgtcgaagcgagcggcgtaaagggctgcgggttcgtgcttttgccctctgcccctgttactcccttcttctctttgttgtccgaacctctcgtgtgtcgcgacatcctttcgtctctcctttcctgtaaggacacgctcaacgtggacgaaatggtgcccaagcacatcatgcagggactggaggaagtggaagagtttcaaagggtgataaatgctccatatgaacagctcgataaactcgggatatcagtcactcccgaagccgaagacgagcttccggtgaactaggtttcaagcaggaggcgacggcggtcctgacaagcaccaccttgctgtgttgggaaccgccaaacccgaggaggcgaaccctggcaaagtgccacgctcgactggccctccgtagtgtcctgtatgtttgacgatgtttgtatatgattagctttttgtgtttagagcgtcagcagtgtcgcaacacatgtgtgagagttcaaagtgtaaaattacctgtcggaatgcaaaaggtaatgtaagcaaatgaagatgaaagcagcgcttgactgcatgtatttacgccgaaatctactcagtgtgtgagctcaggatccacaatcgggtggtagctctgagttcgatagtagccagcggcgttgtaatgtgttgacagaaatggcagaggctcgtgagataagactggagagacccggctggcagttatattaacgttcgtgtgtccgtgtgttgcggctatccggcctccccgtctccacctggcggtgatgtattcgcatcagactgctgaccggtttcgagaggcttaacttcgtctctaatcggtttcagttcccataactgacggtactagggtttcctaccactggatcgcttcccctcgtggcagcggattaatttttcttaatagtcggtgtatagtgctacagttcgtagaagtgtgtttgagagacgccacctgctgcggaaccagtctgcattgaaactgtgtcgcgttgcggtcttgtacatcagcgagtaactggatatacgagggcacaagtcacacgggtagttcggaagaacatgtccggagaggttgcgacctgtgtgcttcggatgaatgccccaatcaacccgctggcgtttcctttgtttggcataaccaagtatgaaaatcaacactatctggcagcaagcaagattagatggactaggttcaccattgccgctgccgcattaaataatgtccacgaagaggcaacagttgaggcgaaagcggggcactcggcttccgaggtaatggcccaatttccggaggaacctatcttgtgttcggctccatgaagtcccttgaactcttattggcactagctgcaatagccgacacagtggccagtgctgcgagcgaaaagcccagaaccagataaggttccaaatcctttcagttgctacgagccatgaagaccttctgagtcagtgaatcgagagagagcttgtgtgctgaagacaatcaagtattgctactctaaagtgagctgcttcgtggcccggtggtccgtgcgaaccacagcacagtgcgttgtggccgaagaggtttctccgtttttagttgacatgggaaagtgccacgtcctgcaacttccaatctgttcctggtctcctacactaagcattaccacatagaaacaaaatagagcacgaaatcttaaacgcatttccacgcaagccgcaggcatggtctgctcgcttctcttctgcctgcgctacttgactaagaagacagaagatagcgtaaccattcctgaagaatcttgatttgctgcagaattagaattaagttactttcacatgttcaggtgtttttctcctggaaagttccttttttttcctacacaccggacattttctgggtcacttgaccggctctcccggtctggtcgcctgtctgtttgtgtgatcatgcatcgtgccaagaaaacggatgtctctcgtgcgtctttttgggtagagggtcgcctacgaatgtgagaagcgtgtgtggacgtggtggcgtccacaaattatcgctgaacaggaaccctatcttttttaatggttaaaacggtagtgtaccaagcgcgatgacaaaggccgccgtccttttcggctggtgcacgaatcaatcatcataaatcgtatccaagggtgacagggtgacagcgcaactccggaatgcggcaatcagcgagttggcagccgcaaattttttttgccttgcttcctcggcaacgtacctgctgccgaatgcacgttttcctggcatgtgtacaactttttcttccacttcaaaagccttgaggcctcctaaaggaccactgtacatatgccgatcacgagaaacgtaggcagactcatactggatcagaggtactgataggatgagacagtaatgattcgtgtataaagggcgctgtcgagctgcgtgaaagatagccgtaggaggagaggggcagatgtcgttttggtgtctgcagttcttccaaggtttgattcacttgtgcacgtgttccaagtatttcaaacagaggggcgatcggtagtctca

SEQ ID NO: 1372 - DNA, 1850 bp, Toxoplasma gondii
  source 1..1850: mol_type = genomic DNA
aggtttctccaactgcacaacttttagccaagaacggtctcagattagtgccctgattgtcttggtgtgtttgtacacggggttcagtcctttctatttcagagaagcactttaaatcttggaacatttgaaagaaacggatttttcagggtctccttccacccagttacgcgtcatttgaaagaatggactcacagtttcgttgtctgtgcattcccagtgccttggtatttgctctggaggtgctgcagttgagcttggatgctgaatcggtcatatcctgccatcttttctccgctgtaacgaacactccaggaaagattctgaacgcaagtcccccgagacctcgcgtcggatcacagagctttttcgtctcgtcctccttcctcttcagtctcggacttgaaaaaaacgaaccgacgagtgagaaaaggcgcttcctgcagcttcagccttttctttctacgcagaagaggggagatgagacaacaactactcgagattagaaaagcaagtgcagaaacgagggatttgtagacgacagaaaggtgttgagcgagtaggaagccaacgtttcgaagacccgtgggaagcgcgttttgagaaaccggttgagaggaacgagaagagacgaaaggagctcgggagaagacgcaagtggaaatcgagcaaacaaagagttagacaaaatgtggcgtctatacggaggaacggagaaaaccggagcaaaaagatcaggaaaccaagcacgaagacggggcggccgcggcggaaccgtcacggaggtcgagaagtgaagcggtgtgcccttctgaactgtcaaagacgacagaggagttcttcaagcaatggaaagtctctaagatactttcacgcgtctcggctttcccaagaaaactggaaaacaaccgcctgattcaatcggtcgccctgaattcagtccctctctagacgcatgcaaggactcttggcgtcctagagtgttgcatcttcaagatcaacgtggaaagaaaagtccccgggggcaacaagctgtttgtcaaaacgactgacgaaaaggtcttgctgtttcctgcaaatgcagtgaaaacgcgcgccactgaaaaacgaagccgagaggtgacttttcttcgtcttttatccgcatgcttgcgccaccacccggcgtttcaaatcgagaaagcagctgttgttgtctcggcgtgtgcacggccggaaagatggaaagcggccggagtactgaggtaaattctcatgagacgaatgctcgattcatccattgtgaaatccggaagaaacgcggtgatttcggacacacacccaagacaaggacagtccgcgtccacgtccttggacgtacagtaatgttcgcgtatatgcgcgacactcgagtcacgcgaatttgctttaacgttgcgactttgcgtggggatctctgttgccgttgatccctctcctctggtttgctgcatttcgtttctagagcacagatttctccgacccgtccttgctggccgagttcagtttctcagagaccacgggcccacacgtacgatgccattttgacggtggttttgtcgctttttcaagggcttggaactgttccacatcgcgctgctgttccgagcgaatctttgctttgccttctccagaccacccctgattgtcagctccccaggaagctgccgcctccgtgtctcccgtgtctcaagcagaagcgagagatctggtttctgcacagttgacttctcacctgtggtggcctgccagagctctggactgtcgtgcaatttccacttttcttctacttctgtctcttctcgcgttctcttctttttctgcctaaaaga

SEQ ID NO: 1373 - DNA, 1785 bp, Toxoplasma gondii
  source 1..1785: mol_type = genomic DNA
ctggcggcttgttagtttcttcacgtagcggcaaagaaggccattccccgacatctctccgtcagtcgcgcgcatcagccccgcctctggggagcacacgtcctccccgctcccacctgtccctcgagtccagttgctgatgaggcgcagggtgcatacagctgaactcagatgccgagcgagcacagtgctcgaccgcttttcgtgacgagcccgcgacccgcgatgacgaaccagccgccaaccgccccttcgtcatcgcgctgtctctacaccctagctctcacctgcaatggtgtggatgcgcttgacaagttcggggtcggcgggagggcggacgggttgcggcagcccataccccacggtgtgctcgtaccccccggggtgactcgggtacgctccctgctgcgagtagaaattgtttgcaatcgaactcccgtctcggtaacccgcattgggtgggctgtagacgacgggcgcaggcggagtgccgtggtactgctggctgtagtccagacttccttgacctgtgccgtagtagccgcctccaggcgtctgcgagtaactggaacccgccgcagaagcttgctggccatagttcatgccttgctgagagaaatctctgccctgctgaccgtacggactcgccgagtgcgcgtaaggcgtctgcgacggcgtctgcatgtagtcgcacgcgttttgtgcgtacatctgatgctgctgattgtagttttgcgggtcgtagctcggctgtacgtactgcccagtactcccgccagccgaccccagggagtagccggcacttccagggggtgtctgctgcattcctgtgccgcacggagacggcgtggctggccacatggtgcacgaatggcgaggaagcagtaggagcggcaaaatgacaagaaacaccagactggctaaggatcgaaactcacgtcgcgcgtaggaagaaacgccgggaaaagaagacgcgctgcagcgccaacctattcgcgcaagcaccagagggaggaccgcagaccttcgtctgcccggaaaaatcctgtgatgccgccctccaaccgagagaaccgcggatcctagtcttgatgaaaaatgcggaaaagcagatgcgcgggatctaagagaaaaggggatgaagagaaacggtgccgggagcgaccacgactgcagtccgcatgcgacggacagcagcgaaggggcagaacatctggagggtcacggccgtccacaggaggaaagcgtggaaccaccgttgttggcttcccgagggaagaatctgacgaggcaatgaacatgaaaaggcacccgcaaaaacggcgctttggacgaacccactagaaaaggcagactttctcgcgagtcgatgttccgccggggcagcacatgcagccgctccccgctttttcgcgtcgacacattgcttagccaacagcttttccacagaccgcaccagtgttggtatcggaaacacgaccacggcgcatggccgccgcacagaacacgggccccccctgcgcatctccgtggctctcgaagaagtcgaccgcgaaagaacgcaattcaaggagaaaagaagcgagaggagtgtgtacgtttttctctctgaatcgcacttgattcttgagtgtctctctgtctctctcttctgtgtgcgccgtaccacgaaactccggttaacttgcttcgctcgagcttctgggtggatctctgtgcgtggcaggcggagacagcgaagccgcacggtggcgcacgcttcaactactcgctcccaagcagcaa

SEQ ID NO: 1374 - DNA, 1736 bp, Toxoplasma gondii
  source 1..1736: mol_type = genomic DNA
aagacatgaacgcctcccttacagacagagaagtgcgttgggttcaggctgaaagaagagacgcggggtgaaggtgatgtccaccgcggcagccgccaaggagagaccctgtgagaagccgaggcggtggtgacagcacggagaacgggccaaaggactacgccaggcgagagcggattgagcgacaactggcgctctggcggcttgtctgtccgttggtggggagaggaggaaacagaagactctgaggaacttggcagagctcttctccatttgaaacaatgaggcacgcgtacaacaggagaaggagagagagatctgtgagaggaagaagagagaaatctgtgagaagaaggagggggagatctatgagaggaagcagacagcagtccctgagagggaggagagatagtgctgtgagaggaaggagagaaaggcagggatggagacgcagcagagaggagggaggaccgacaccggaaagaaggcagacggcgagatgacgcaggtgaagaggaaagagaagagaagtgacggcgacagggaaaggtcggacgaacgaagcaagaaggggaggggagagagcgacgagatgtcgcaaaggcgaaagacgagagacaacgcgtaggcagggatcttcgtcgcctgaatctctcggtagtcttccagaagcggcagcacgagaggtccacagaggcgagcagggagaccgactctgtcgtgtaagcgaaaggggaacccattttgacacactacgaaggagctgttctccgacgacgagagaaagagacgaatcggggaagctggaaacgggaggaagccaacgacaagaaaacacaaatcaaacaagaaagtggaaggaaaagagtcagatgaccagatccacacgcgcccctcgaccaacgcccaatctgggtaaaggtgcgcccggaatttcgggtgtacatacaccccacgcgaaagcggacagacggacggaagaacaaatcgaagaagaacgtcgtctttctgccaagaactcagcagaagcggccacgcttttgagaggagacgaggaggaaagcctgaccttttcttgcatgcagtttgtgtcttccaagtttgcggggacgaggcgccggctcgaaacaccggctgcgattcacgatcacgtttcttcgattttcttttgcaggcgggatggcaactcaccggaagacttgtttcctttcagatgtgtcgctgttgactctccactttctctcctgatctggcttctcttgtctcccgcttctgaacagcatgcgatacactggggtggatatacttcgcaagctggcgtcgcgctttgacctgggtcgagacgtttttcgtcgacttgtgattcgcttcttccgggcttgtggagctccttgcctttattgtgtgtgcatttttgtccattttcagtttcttttcctcccagagatgcccaacgaattacctcgcgtctgagtctctccagccacagtcccgctgcagcccttcgtcttcagttctcttaaaaattcccggctttcgtattcaactttcttgttcacttgcctctctcttctttgtctctgcgcgtattcgtcctcgctactgatcgtttccccacctttacaaacagttgccgctcctcaattccgtctccttgatctccttatccctcgtcttctccgtctctgccaccgcctgcttcatctcattgtctgtttcttcttctctattcaaga

SEQ ID NO: 1375 - DNA, 2411 bp, Toxoplasma gondii
  source 1..2411: mol_type = genomic DNA
aaggaagagaagttgtaaacgaaggctcgatgacacgaaatgccacttgctttccctcggcgagagagaggagactctcgccgccggccgtgcgggagaagtgcggcaaagaagaaaggacgcagaagaaaaaaacgagagcagcgcgcaaggcgaagcgcagcgaggccgaccgcgagcgaggtggagacctccccgaggcgaaaaagtatttggaacgccccatgtttttatagagacaaaacagaggaaagatgccaagagaagagcgctagcaaagaggggcgcgaaagatgggggagaagccccgaaaggagaggataagcatgggaaagagatctgggaagacaattgcaggcaaaaagagaaagcgtaagagtaccaaacgcgaaatgagacgagaagacagagagagaatttggagagcaacaaccgagacgacggggaagacactcgaagaggagcgacaaagggaacaaaactgagaaggattcggtgtggaaggcaagatgataagaagagagtcgggtttgtccgagaacgagacacacgcgactttacacttgtcacgtttgctttctgacgacgcgttttctcttccgttcctcatcgagtgcatcgttccatgctgcttttatcccttctgcttctgcatcttacttggaacgcgaaagcacctgtggctgtgtcgaaatggatcgaaccgatcaccatgcattgacatcgaaataccacgaggcatacggggaaacagcaaaagggcacctggtacagcaaggaagcctctcagagtcatcccctctcccccaacaatgcggcctcgcttgttccctctcgagagtcgcaggccctcggcagtctttgtgcttccttccctccgtcgttcacacacgactctcaacagagagtcttcgatgagatgcagcgaaagactcagaaaaaacaagaaagtcctgcacacgcgggaccgaaggaaacgaagctcacgacagcgcaaaaaaagagatctgcggaaggtcgacgagacgaacttagggtctggacaggagcaagcgtcggactcaaggaaagacgcacccaatgctttcacaaggtggagaacctgtacccacgtgaaagagatttagagaatggtggaacatatccgaggagttcgagtcacctggtcaccaagagacagctcttctgctgccggaattatttccatggtcgccatattctgcataatcgacgcacgcctgtgtcgtgtctgagattagacggagagaaattgcagagaagaaacgggagactttctttcctagaaacaagggcaaaagaattggaactggacgaactggacgagaggagacagggcgcttcaaagcaacgcagtgcggccgccgcgtctcgtgcggatgaggtagtctcgacaaagaagggcgtctgttcgccctcctgaagacgataacggaaacaaactattcaacagatccattcctttgaatctgaagcggtgaaaaagagatctctggaacaacgcgtcggcgatggcgtacgtaatcgagcgaagacaaacgacgctgaagcttcgcatgcgcgctgaaacaccgctggcgggtgggtacatgcagtttagagactcgggtcttatccagaagccgaccggctcctgcacaagtctcctttcctctgaaatgtgttaagaatgaaagacagaatcaaaacaccacagggtcagctcggatgtcttctctgccaagaccagatccagcaaacgcatgcgggcgcagtcgtgtaccgtgagccagaagacgtggtgagaccagcacagcagaagactctagtgctcttggcagatttgcatcgggttgacaccaaggtcgaaagctgcgtcgagtgttcgcttgcttcgtgttaaaacggtgcgagtgtgcaccaggtgtcgggggccgatctctcgagcagccttccggcctccgagacgtccggggtttccggccggtttttcacggaaccgcttcgcgtccagcgcctccttaagtggccaaaactcgctcttcggtattccctcagggaattatgggcccttggaggtagagatgcggtattccccgtttcgtgagtggtttcctgctgcgctgcggccgccatgctgatcgccagtgcgccagacgccctgcgaaagcttgcgtcgttcaggtgtatgtccacttgcgcagaaccggttccttcatgaaacctgtcacacttttgcattccattgaaaatcgctttctccgaactcgcccgtggaaagtcccgttcgtcccgttccaatgacgacgcgggttcgccttggtgaccgcgtcttctgtttttgagccggttcggcgtcgtgccgcaggtgccgcgtccacttgcccaagcttccaagaccggggtggtcgtca

SEQ ID NO: 1376 - DNA, 1689 bp, Toxoplasma gondii
  source 1..1689: mol_type = genomic DNA
gaactgtttgccgcttcaaacacaggatcacttcaaccacacagttgtatatatatatatatatatatatatatatatatatatatatcaatatatatatatatatatctacatgtatatatatatatatatgttataaacatatatagttttctatagatatatgtttataaaagtggtgtgtatagtcatatatggacatttagctatggtgtgcactgtatgaacccgtatgcatatattgcctcgatgttggagagagacgcagtttcgtggcggtgcagttgagcgtgggttgttggtagcatctctctggaggaaggggtgcagagctcgtcgctttcgactggttgagttgggcactaaaagtgaaaacgaaacgtaaccgattttcgcgaacagtcgcgttcgaggaggctttttcggaactacagagggggctccatgtttctgggtttcaccacactggcctcttgatatatacacgggtctcctcactacacattccttataaaagtaggccaccagactacagcgtctttgcatgaatccaccccacggtacattctctctaccggtctacggtatcacactatacgctctacgcacgtctgagtgaccaaggaatactctttgtcaacctctaggtacgatgatgccatttacacttctggtttctgtaacggaccaccgttctatctcacatcccgaaactctctctgtgtgtctctacgcgagcagagggccctttttacttaaaggaagttggtagtgaggagacagagctctctcgaccatcttggttctgttttgtttccatcatgtctgggatcgatggcaatcgccgaggagacgctgaaaacgcggctgttccctggttcaaacgcagcgaggaagacatcgaatggattttcgcagacccccctaccactgaagaaggttccacagatcccgctctctttggcgcgttaaacgcttcactctgtcgtgtccaagtgcacccagaactcgtcgcctgttcaccaacaaaactcattttctctcgcgaaaagcacaagcgctcgcggcagctcccgctgcccttttcggccgagtcgggaggtgtatatacacaccggatcggccgagcattctcgggactgtttctgcggccgttccctcgattctgcagcattttctttgattgttccacgacgacatggagttcaagcgcctcacctccagacgaggcgattgacctcagcctccagtcaaaatcccggggtaaatgcatgcagggtgtcttttcgtatctcaaacctgtgccgcggtggagttatgctttggagaatagtgtgcaaagttcgttgcatcgagcttcaaggacctctccggcgaaggaatggcacactgcgagagaggggaagaaagctgaaaagataagagttcctgtttcaccaaccgcttctctctttggtggctgcgcgcccgcggggctttcccagccgactcatggacctgagtgactctcctccggatttttttcgtatgcggtcggcttgtctccctctggaatgtctccacttcctcgcgcgtgacttcttcgcccacacccgtctcacttctacttctctgaacaccaatcgtattcctcttcccctcgaagccttccgtctctcgctcttactcccagtgagtccgccttcacca

SEQ ID NO: 1377 - DNA, 3843 bp, Toxoplasma gondii
  source 1..3843: mol_type = genomic DNA
gtcgtcgtccaggaagcctgagttttgtccacctaatcttgccttctctcgctcggcttctccatcgtcgccctcctggtcacgctttctctttttcttcttctccttcttctccttcttctccttctttctcttcttcttttccttcttcagacggcgcgcctcctccctggacacctcgcgctccgtaccccccagttctatctcgtcgcgttcgtctccgaaaaggccactggggggttcgtggcttcgcgtctccacatcgccttctctctccgctctctcttcttgtaggtcttccggattgacgtcaccggtcggagtcttgttcaagaaatcttcttcgtcagttaggctctccatgccgccattggcactttctggaaatggtctgggtgactctcctgcatttgccctgagggcatctccctcgtctcccgcgtccgccatactcgagacgcgtcacgaacgcttagggcaagagattccggaaaaaaacgaggtccgaggagaagtgagagacacgccaacaaaaaaaacgccaccctaggaccgtttcaggtcactactggaaagtagaagaaaacacgtgcgcattcacatacctacatatatatatatatatatatatagggagagagagagagacagagttagctgcgcatctgtctgtttatacgtctgcagatgcgcagccaggcagaggtgtactttagcgtatcaatgtacgtgagagatgtaggacgagacgattgaattgaaaagtggataatatacatccgacacaactgtcctcctcccgctcggttgtggtttacagcttctcgggatcttttcgccagaacgctggtgaagaggcagtgaaagagttttgggggtagcttagagacgacaacatagcggatctggaacaatacgccgtgacaaaaattggtgagacaggcaagacgagaaattgggtgtctctgaagccgcgcagcgtctttcccaaagaacccccagagggatactttttcgtttggaaatcaggagccagacactttcgagaaaaaactcaaagaacttcgtcctccgaatccgaatgcccgacagagggaaaagcgatccttgcccggagacaaacggatcgaatgcacggccatacagaccgatgactggcgttggaaaaccgagagacgaaaaaaagagtgacagttacagcggcggtgaaggacaggtgagagttcttggttaaggacagcaccggttccactagttaaaaacagtaagaagcgaggaattcgcgtgtgtctgccgcggtgcatgcatgcatctcgtgcttcacctgaacgcagctgctcatgagtgtttagcggagagcgagaagccgctgcggtggaactgttggtccagtgaagcacgacagaaaaatgtatttcacgcccaagtatccttccattagcttcacccgcagacgcctgtactcctacaaacgaagaggatcagcgtttctacggagggcgccgattgaacgctcgttgcaagataagtccggaaaacgaccagttcccactggaaacgtctacagatataccattagctaacatttatatttatatatgtagatggtataaggtttataaatccatcgagttttctcggtcaaggtcttctcgcacctcgtaacaaagcaacgtcggcactctctttaggtagatacgctctctctctctctctcatatatatatatatatatatatatattgccctttcaacagagaactacgggatgttttggggcgtatcaaacaaaactcactagccactatactgtacgaaaagtatcagcttatagctcgtatgagcataaagtagaccagtggagacagagacacgccgatcaattgttcaaagcccccccttacagctggctacttcacctcagtacagatgtcagttcgccaactttcgttcggacaacaggtgcaacgggtcgttgacaattctttttcctgaaagagagcggctgcactgaaccccgactgggcacgacgcatttcttcgctctgatctcagcataattgacctcgtgcctgttacgtgttacagccaaaactggccccgaaaaaatgaatccaggattcagctggcatcgacgaagcgctgattcactcatcggtcctacttgaatgaaaatgatgagctcttcacactgctcaaatgaaacggtaatgatgtgctgacacctaacacgatgtcaacgattggcttaagttgccacaggaagtcgtcgagtgcactgtaagaggttctagcagtagagcagcatcgttggcgtcttgagtgcgcctctagccaccgcgatatacaatgtgatttgggatgtgggtcagcggattccaacctcaacttgtgaaatatgtgcggtggacatgtagcactgccgtaggccacatacagctccagtgaagctctcctgatatggtgagcgcgtttcgttgttatgcctagtcgccggaatatccctatgaagacgcatgttacggctgccaccacagtctttacggtcttagcatctgaagaaagacaaactacgtagtgtttctgcgtagattgccccatccgcacgttacgactgtcttactgccttgcaatcgaagtcgtctgcgcacagcaaataaccatctaagaggttttcattcatgcacaatgcccgtggatgaaacgaatgacaaaggatcggttacccgaaaccgaacgtcgtggctatgtggtttccagctgctcgtgtgggcaatcgcgttcgcgcggcttctacaatcacgttatctgcgtctcggtcgatccgacctgtttttgagcttttcagattttttgacgaatcgtcatcgtccgtggaattcgagtttttgaagaggatgaccgacaagagctcatttcttgttttactgcgacctttggctcaaacaaaacgacttagaaaagtgttgttgtgtgtttttctcttgctttttgcagcaaaaggtttgcaaaaggtttttatgtccatcagtttttcgacgtgttctcgtttttccactctatgaaacacgattcataaggctatcttggctggttctgtgttccgttttttcccgccgctgaagtgtggagagaaacacgccttttgtggttcgcttttcctcgcgtcaccattcacaaaaatagcaggcaggcttatttcaccgatgcttctgacgtttttcctacattatctgcagtcgcaggaataaacatattccacgcaacatacgcgtcccaagccgtgtgtggattccgctctgtactgcattatcgggctcatatgtgtgtgctcggccattatttcatttgctcgttcgaaaatattgcaacttttttcgctatctgaagacgcgtggccataagctttgagggtgagcgtatcccgtcttttaacttgcggtcttttggttgtgcatatatatatgtatatttgcttatccgacgtgcgaacatatcacagataccgaatattgttcttttcgttgaaagaagaagcagccagtctgcgttgcctcttcgggtggtctctgcttgccatcatttcgtcggcttagaacgaaacgtcctttagtcgcattcaccgcctgggtttagcactgacacattcggctcgcggtttcatctgcgttcgtattcgtgttccctttttgttctctgaagacagtcgaaaagccgtcaaagttttcttctgtcgcgttttccgcgtgtgtaaggttctgtcttttgttcgaaaatacctgccatgggaaaggcaggtgacgttctaactggccttttctttgaaagtgacggaaggagcaa

SEQ ID NO: 1378 - DNA, 2017 bp, Toxoplasma gondii
  source 1..2017: mol_type = genomic DNA
gagaagaaagaggagactgcattgttggagaggatgaagagagaggaagagagaaagtggagaagttcagagggagaacaaccgagaaacgcgtcgacgctcgccaggtgctcgcggctaaaggacggcgaccgatgcagaaagtacagaatcgagaagagcggatgaacgacgaagaagaacttgaagaagagacgaagtaaacgactgacggcagacagcaaaaacgaaaaccgtttgaacgatttgtgggagccatgtccacgggctgttgatcgggactggcctgaacggaaccgtagcaacgtcatggtgtctcgcaggaagaagaggaaacagaacttcgatctggtctataaaggcctgcttcaagctttagaccggaagaccgggtcgaatcgcagacttgcgagaaagagttccctgcgactgacgtccagaagatattcttcgaaatcgtcagtgacttggaaatcgcgctgagaaggaccggcacggactccaggaaaccacgtcagcaggttgctcagtgcagatgccaccgaagcaaagatctccatgtccagacgtttacgcagtcgagctgtcgacgaggagaagtgaagcgcagcagctgcgctctgggtgaggcgaaggcagaaaataccaagtgcaacaagtccagtttcgcgaaggtacaccagactcgaaaagccgggatttcaggcgtcgaagcctccgcaccgtgtggtgcatgaaacgagcgccccggacgctgccttcagtgagctcacatttcctggggaaacgttcgccttccgccaggagaatcgcggtccagaagagcgagaaaaaagtctgcttcgtcgaacggaagacacaacaacaccgtgcagacaagaacatcaaaaagacgtggaaggcgcgtgtgtcgcgtagaaggcactggagaggccgcgacgaaagaacatctgtgtcgagaatgccttccctgtcggcttcagtgcatgcaaaaaggcgggagttcgtgagtccgaaaaaaccaaaaacctgaagaagttcagtgtcaagaaaactcgcggtttgtgcacatcgtcctcagttctcacacaccgccgtagagtgctcgcccccctttcctttctctgtgtcttttcatcgggacaactctctgcaaaagacactctaatatgtgtgtttcaagtcaaatccggcgctcctgagaagccggagtttcctgattctaacagaaatggagttgcgatccgttcaaagccgcagtcgctagacatgtccacgaaacgtcgcactctcctttgtacgaaaacggcagcttggatcgccgtcactcactcagctgggatttcgcgctcgctgctgattgtgctttacccgatacgaaagaaacaccgaaaaacagacgcaggttcctttctcagacgatggaagttctcgttccctttttaaatttactgaagtcgctgttcgacgtcgcgtaacgcgtatccgtcacgcttcatttccggagtctgctccgaaacctcccgccgcggactgggcttcccgcgttgaaaactctgtgcggcgtaaccagcctcgaagtcacaagaaatgtacaggaaactgttcataggcgtggtttttctcctctgcctccaaattcgctctctcttttgaccggtgagctgagtccagtccctgctgtcaagacccagcatgcaaactgttcggcagaacatccgcgcagcccggctgcgtctgctgttcgtgtaaactagagtttctcttctcgtccaccctctcgaaggaatcaaagacctttggaacttcaagagtgcgagtccggcgcagaccgccggaagacaacacacgagaaactggtggactgacccaagcaaggtgtatgcggttctctgtttctccttgtcgtcttgggtggttcttttcatcgttttcgactgttgtccgttcccttctggagagcatgcagtttttcgccttctagctgtcgccgtgcgatcgctgtctctgtccacca

SEQ ID NO: 1379 - DNA, 2175 bp, Toxoplasma gondii
  source 1..2175: mol_type = genomic DNA
ttgttcgcgctgctcggaaacatttacaacctcatatctagatgttgttgaagcaatgtgaagaatggtccacgttacattctctaacggaattttaacggtgtgggatggacaagcaatgcatatgcgatgtcgaaccctcgaaaacccgtaatgtgcgaccacgtcctgggtgaagcaaacgcgtttccacatacagtcggtatcgatgtcacgcttgccagttcgtgtagggaagttggcgtgtttttttttccacggtggggattgaacagtgtcattgcccagaccatggcagtaccaagtctgctctgatgaagtgcgccaccagcattctgttttttcgctcccacgagggtggaacctctagcacacaacttctctcttctgaggttgccgaaaaactgtctgctaatttatcgagttatttgaactacgggaccaacgggcagagactgttttcactcggatgtcgtacagttgacgtcgcgacgaaaggcacatgaccaaggcgattttttttattttctggttcatccggctatccaccagtgttgcttcggtcgatcgaacgccagaaaccaaaacacctgttagtaacatctgaccagtgtcgaacctggaagaaacgcagcagtttgcttacaacgaaattttcattccaccggagacgagggtctgattcccgtggcaatcattgcaaggcatcccgtaggaaaggtaggcaatatcgaaatagatccagtcgtgctatgcagcgtgtccctcgacgttactacgcacatcctgtgaacaattgccaggcagctgaacgggtggtgtgctgaagacgtattccaagataacaaacctccctgcacggtcactgtttgcttcctggcgatcagatgtcgtgtgtacggatagcaggtgtcttctgcggtcatttctctctcggtgtacacagaaaagagagaaatgtagagcgtggcctgggtacgcgtgaaaacacgcaaccggaggttctgggaggtactccaaggaagcctgttccgctcaggattccgagtggcattctattttctgctacactgcatttcctcggcaaaagtgtaagcagagatttcggggaaaacgacagtcgttgcaaacaatcgattcaccacgaaaaccggtatataccatcaaacgactttttcaataactgttggctgccggcacagtcgttgagtccgggttggctgtagtgcctgaagagagccgcacatgcttccatacgtaacaagcttatagtcctgccgtctgctccacacagaaaagtacacaacgtgtgtgtcgttcctcccggcacagacggcctcagatgaaatcgcttttctcatgagaccactcttttgtcagcctccaagagaggacacgtgctgaaaaggttcgacgtcggcccttcccagaattttcctgtaaagcacagcggagagacgagaggaacacgtttccgttctagaagagccggcgcttcgacggggtctggctacatacagaagtacgcaccagcgcgtagcgggtgttgtcgtgtgtctttttccgagccttttcgcaagtgctgctcacagcaggaagagcgcaaacgcaccggcaggcgaatttgccgcgttctcgcgggaacgttgtttttttcatttagaaggtcgctagtaaacaaagttcagtgtatggttttctcacccgagcaagaacaacggtgtcctgccgtagggaattccccgtgtccccacacttctagagttagttggcgcccctctgctgagctgtggtgtgcgcacctgccaggtctacggggtcatctgttcttctttgtcggggattttctccgtctttccattctctatctttgggcaggggaattcggttttccgtctcttactctcgcccgcgatctcttccacaccaccgtgcatgcgttcacgttccgtcgtctcctttccgtcctgaaacaccgctgtctcgaccgcgtttttcccctcatttcctggtaggcttcgtgtcacttcgtgttcacagctggttttgtatgttctcgacgttttccgcgtgctcgcgctccgcctttccctcgaggaatcccccgcgcccccgcgctcgggtccgcgcccgtccccctttgtctcccgtttcagcgacttcttctctccaaca

SEQ ID NO: 1380 - DNA, 1882 bp, Toxoplasma gondii
  source 1..1882: mol_type = genomic DNA
ttgtgacaaaggctgttactagcagtggaattttacagcaactctaccagcggcttttttgttcatgaaagatgcgtgctctttcaggtattaggtaattctaattttcttccccgtatgtgtgtctgatcggggcgagtaccgcgtcgaatttctctctccgacctctagggtaacgagacgcaggtatacctcccctgtgaagagttcctccggggaaagatccataaagtagctcgtgcgttacaagtgttaagaggaatgacttttcgacacagagacacaatgcatttcacttttcatacccagagacccataaagcgccacgcgagcgtacgccactggattgaggcaaaatttctggctagtacagttcatctcatcaacacgtaaaggacaattaaagcatcactttggggaacagttaacaggagcacctcgttaggcccacttgcgcttaccacaatgatcccagtggctacatggggagaaaggtagaaaaggagcaatagatgatgcaagcgatggtcaagagatgtccagaaagcaaacttgagtgtcgacggcgacactgtaatatcagatgatggtgggtcccaccgccacaccattttctactcacacagctacagtttctgtgttctaccttttgcggtgagcaatatgtcgaatgggcgaccgtttacattcgaactaggaagcctgcgatggctcattgcacattccgctggcccgagaaagtgaaatgttctgaagtagcaagtcggggctgtctttgctgtctaaacgttgttcaagatactttcctaatttcaccagggaggccctggcaaaacggctcaccactcccgttgcaacagcgatccagattcttgtctagaagacttcttgccagtagaactcgcatcctgcttcttgcatgactgcgtaccgggcggcgtatctgcttgttcacttttgttcgcgtgacttcgcgagtcgatttgctgccagtccaacactgaacacctgcgttaataccgatggatcggagcgtcggtggaatctgaagcagcacgtttcctcgttcaaagagggtcatgattgttaaatctgcagcgatgatcctatcgtaacaaaggacagcaggcacgaaaatcgactgttctcaaagcattctgcttgacagacgactcggctacatgtggcgcaaggaaatccctgcaaatgtgctcccggatgatcgtgccaaaactgagtgaaccaggctacctacgttttgtaaaatgccgctcaatggtgtcttacacctctttctgttccattcttcccgcagaatccctgcagaatgaggaaccgatttcgaatgtgcatcagtggatgttgcatgcgtagtgccaaaaactgttgcatgcgtattgtgactggcaaggaacgacgtttgtggagtagtctccagacgttcctagacaagttcgtcttccattcgatggacgaccatgttctgtgtgtatgcgcattctcagtgttgttcctactgcagtgaccaccagtttcctgaaaggattgagaaagggcaggaacaaaccggcatatgcgcagaggacagacacgtcgagacgaatgttgatgcatgatgcattcacattggcaccaagtgtccttcatgtgtcgcgtctatgcaaagctgtgtacggtgcctttctcccgctagcactcaacagtcgaccctcctcctttacggcatccgtgctgcacccgcggaaagagtatctactgacgcctcaacgcgcgtcagattctaattttgaagtcggaatggttctcttgtcttctttgcaagcccataactaaaggaaagctgcgtggtcaacacaactgcttcttccgtccgttctcgcga

SEQ ID NO: 1381 - DNA, 2913 bp, Toxoplasma gondii
  source 1..2913: mol_type = genomic DNA
gaaaggcgtcgactagtcaaagaagatcgacgtgtcgcgttttcttcctcgactgcttggcttgcgggaggagtgcaagaaatccagaaagaacccgaaagtgaacgctgcggtgtatgtacacccggggtcccagctgcacgtgcgccagtttggaacacgaaactttgtctttctcggggtctgcagtctgcggctctttccgtgtcgcctggagtgcctgcgttgtgctgctttgcggatggagtagtagttcgtgtcttgccagcttgcccgaatataagccgaggcgtttttcctcgcgtgcctcttcttgtcaaactccttgttccacgttgttctcggctgcacgtctgccgggcctacccgccggcgccgtgttcggaacttttccgttcctctcttggctcaaaaaccaaggcattcgcggagcaagaatcgtcggagagaagacctcggtggcgaccggcactaaagatatcgagtttcacgtgtagaagggaagcactttcgaggggtcgcgttccttgtgcggaagtcggcttgtgtctccgacctctagcctgagaacgaactccccttattcgcggaaacactttcactttgtcggccgcagtctcgtccgctgcacacgatgctcgcatcgaaggacaactgtggagtcacctgaacacacaagtatcccaagttcaacagagtccgtcggccatcgaacgcggtactcggggatgtgtataggtcgctctgaggaaaacctgagaaaccgtttttcctctagcgccagtcgggagccacaacagttagatgggaggagtgtggaaggacggcatcgaatgccgcagcgcatttccacgctgggagaactctgtaacacgtctttcacctgctgcgcggaagcgaacagtcttccagctcatggatatatgtagacgccttccacgaaacgactgcggattgtcgaaatcgcactgggcatcactggaagcagcaatagtgagagttgagaagaaacacttcttacaggcagatcatgtatttccggtcgatcagctttacttttcctatgtcactatttacaacaatgcctgcatgtggagtgaggatgtgttaactagcttgttgtctcccttttgtgttcggcttgtcatctttgttcctcccactccgttgactttcgcatgtccgcaagtgcatcgataattacctcgcctgacccacatgcaaatcccgtgtctccacaacgtgtgactcagtttttccaacggacacgggcgtcgactaagaagcagtgagggtcaccgctgccagtccgggcgcctgaactcgggacgaatgtggactggcaggcaatccagctaaatcctttagaatcctttagaaaagccagccagtgttcagacatcttctttcgttcagcttggtcttctcggtactttgtgtttgaaacgctcaattaaaaagtgcagaacccgcctgttcactgcaagaacgtgcaggggtttgacgcttgcttctccagagattcagcctgcgccacaccgcgagccttgcctccctacgcatagacacacccatacacatgtgcgtgtatatatatatatatatgtatatatatattcgtaagcgcttttgttgcggacaggggaaagtctctgccgcgggcgtcccctatgctaagattgagtagtcctggcgccggtgccctgccatgcggatctgtcgactgcatccctgattctgtaccaaccgatctaaaatcgtgatgtcgttttgttgcgtgaggagccgtgtgtgtgtgtaagactgttcgttaactttctgcgtcaacaacccgaggagccatctttcgttgtctgcgggtctgcctcgtcgccaggaaaccccccgcgagggggtgtgtcgctttgcggtcggagaacgtgtagcagcgacgagatgtgaccagcccccgaacggctcttgacattgggatacgcagaaacaccgggctctctggcgcgccctctccacttccaagctttctgcgccacccggcgcaaaattccccttcgatattagctaaaaaccccgtcgcctggttgcccgcttcgcatgctcgctatcacgaagaaatgggtgacccgctgggggcagcacgaacagcgctctcgggggtgagtgcgcgaagcaggacgggttttctctgcattttacgtggtgaatttcaagcgtaagccgtgcgcggccgtgtcggctcggcggatttccagggatacaggcgttctggtcaaaaggtcccttcagcacgagcaacgcgcgtctccgcagtcccgtcgatagcagtatatgcacagctggcgctgcggtgcctgtggccacggtttcctgagcagcttgtcagcgagattctcaggttctgtctgcgttttctcggttcttctcccccgctgggcgcgtctgtacgtgcacagaagacgcgcagctgcgaactcttgtcgcgaactcttgtgcgcgagcacccctcttcgtccacggtgtgcctcttttttttgacccctggcagcggcgtggcacttgtggatcttccgctgtacatcctgtcgaaccagcacgcaactcttggcctttccgtttcggacggctcgggactcggactccccattcgcttgctggaactctcgcgcgttccccagccaggctcacgcgcccgaaccctgtgcgcgacccagccacagtctttgcgtcggtcgccactgtccgcaactccgtcgcgtttctcttcttcccctatcccttctgcggcgaacatccgcttctgctctgtcgcttttttcaggtggcgagcgtcacacccttctgcggttcaagcttttcgacggctcttccccccatcgctctagacctctcttccccccgttgccgctgacaccaaga

SEQ ID NO: 1382 - DNA, 2210 bp, Toxoplasma gondii
  source 1..2210: mol_type = genomic DNA
tccgctcgagacttctctgcctcgtctcaaaaggcgagaccaagaaagacgctccctgtctgcatggtcacggcactctccatctttccttcagcgttctcttgcaagctcgaagctgaagaatgacgagcctccaacgaccgccaagagactgtcagtgtgcattcgcaggaatccacgtgcacattccctgagggtgcttctcctttgctcttcctctctgtctcgactcttcgatctgtagttctccttcggtctctggctagctctctctcttcgtcactcttcctcgtcttcgctgccttcctgcatttctggtctcctccccctcctttgccgtttcggaatctcgcgccggcgtatcgatacacctgagcgacgtgtacatacaccgcggcggcgtctgcctcttcctcactcgcagcgtttttgcggcctcagtcctccatcttgtctttcatgttttctggctgttctcttggcaaaggcagcgcgcgagaccgtctcattttttctcggctggaaaaaaagctgagaaaccgcaggagacttcaaagtgaactggcagaaacgcggtggactctgctctcctctccaaactggtctgcaacggggaactcgctttttgtggagctctctaccgtctccggaattacctggaaaaccagaggggaagcgaagacaacagacacgacgaactcatggagcagagaagcctcgtgcctttgtggcttcctcagtctgtgctttgcctttgtgctgtgccttcgagacgagtcaacgtatacttcgcaacaaaggcctgcagaggcatcggagaaagaagggaggctgagaagaaacagaagcgcctgtttatcaccatttcttgacactcccagcgcggactcttcgagaggtcttctccatgtctctctcggatgggcagcttgtggcggcgggcagcgcggagagagaggaaagagacagagagagaaaagggagcagaagacttgaacagccgactcagggatctgtcgacttccttgagtttagaaacgagtgaagacggttggaggtttttcgagtgccgggtgtcttgcgttccggcccgagagaatgcgtttttaaatgactcttctcggtgtgcatgcaacgccgttccgcggcctcgacgcctctatatttcgacgcgtcggcgttgctcactttcctccgttttcctgataatgaaaacggagaggaggaatctcccgagtcgtctcggtcgccttcgtcgacaaagaaacacggagcaaagacgcaaagcagacaagagaaagagaagagaacgcgccgtcgagagaggggcaggtcgacaccgctgagctttacagccttacctgtgtcggggagccagacagctacgcagtcgcgcgctcttcctctctgtgtggttttcttctctcgaatacgaggggaacacagaggggagaaacgaagagacaaggatctgaaggagagagaatggcagcgtgagagcgagagagaggaagagaggaagaaacgcgacttcggcgacttcgtgctcctttcagagaactgtctcctctaggtcctttctgccggcgagaacaagacagaagccgacagactttgctttggcgagagaacaagacgacaatcaaaggagggcgttctcccggacaaagagatcccctgcgtccgaggccccgcgtctctctgtgtcggtcctgcggcagtgaaaagaacgagaacgaagtctcgctctctacacttcttgcttgtttctctcgagcggtatgttctcctggatatcttccgtttcttccaggtgaacagccttgtcagtccattcagtccatcttcgttttccccgctctcacagcttctcgaaacctctcttctcgcgcgtttttcaacgatctcgtcattttccccgtcccgtccaaaacagttaccttctcttcttctacgccatccacttccctgtctgctctctttcctcctccctttcctccttcctctccttcatcttcatcttcctcatcttcctcttcttcctcttcttcgttttcttctccgtctactccctcacctctctcttcttccccttccccctctcccggtttttcttctgcctgcgctctctactattcgtcgttttttccttctcccagggtatcgcaaggagcgccctcgggtgtctgtgcactcggcgtcgagaacga

SEQ ID NO: 1383 - DNA, 1679 bp, Toxoplasma gondii
  source 1..1679: mol_type = genomic DNA
ccacagttactttacacagaaggcgaagcagcgaagcctcgtggggtcgcaagccaggcagcgacagaccagaagccgaggctcgaatctgcgaaattcgcactggctgacccgtcagcgtcgatagcagtagacgctggcgcagaaacgcgctgccttcgtagcacaggtgcttcatggttgtcaggacgaaggagagagactgggagggagacgaagatgaagacaagcagcggatgagaggacaggggggggagtggaagaaggcgagacgcaggaacgctggaggaagggaagagaacgagaaagccagcacagcggaagagagaagagagacagagagccactagagaaacgagacagagcaaaataaggggaggagacgctccgaatcagtgggggagcagttgagaagaaagaggagaagaaaagaggaaatccaagacgcaaagagaccacgaacgggcgccgaagacggaaagggccggacagaacgggcagacgaaagagagttgacgccacaggacgaggactaggaacaggagtggagacgaccgagaagaaacggagaaaaagcgagggacatactcgcgtagagttcacggacgaaacaccatcttcttttcctggacaagagagattggtcgcgggcacatacctccgcgtacaaacggcgttcatgcgacagtggtgcgcatcgtcagagagggggcaggtagccccctccttggagccgtcgagcttgctctgtcagctacgcatgcttcgttctttcgccaagaactcgaaaaaagcgcgcgaaacctggagagaaacctggaaatcgacttccacgaaaagcttcacgcgggctagagaggcgggctacagaggcggcaggagcgccgccgatacaaagggtccagcgagccttgctcggactaacgaagggtttttccgttcttttcgagttcaaggaaggctgcaggaagatgaaagtgcggtggcaaaactgcaaggcccatatttctcgcgtcttgtggggcaagagagccctgctcgcagcttgcatgcgcgaccccgtcgcatgcacgctgtcgatacactcgaggattgattgggaaaacctgcagagtgcgacggagtttcgcctcatttcctcggatctttcgccccttcttccctcccacgttttccgcgcctgtgggtggttcctcccttgtctctctcgcctctcgccgccctctcttttgccgccgcaaaccgtttgaggggaaacgctggcagagggcaaagccgaaccgggcggccgtcagtcgtccgaaggcgggggacacgttcgcctctcgacttcgagcgagtcttctcgtcttccacgcttgtccctttcgtccacgacagcagctgctgccgtctcgtccgtggggtcgttgggaggctcgcgggcgccgctgctgcgtctgtgtggacaccggaagtccggctgcgtcctcgcgtttctttttcgcgacgagttcctgaacttttttcgccttcccaagcgggcgggagttgcagttcgtgcgcggcctctttgtcagacggcgcagcgaacccaagtgctcgctggaacgcccctctccgttggtcacacgggcgcggtctccttcttgcggcgccggaacgcggactccactgacgcggaaaagcgtcgaggaaga

SEQ ID NO: 1384 - DNA, 4459 bp, Toxoplasma gondii
  source 1..4459: mol_type = genomic DNA
gaaagaaaggactattctgagaagaataagtcgagcttgggtatccggcgagcgtggagagactccccggctgaggcaggcccggagcagccattctgtgctttcggaaggaaaacgagctcgtcagtcctctctctgcggctttgaaaggcgcgccgcgctctcaagtgctccatagaacacgcaggttcttcgccttcataaaactgagttcggtgtgctttgcattccgggcagagctgctctgtcgaacgaagccgctcgctgcagttccgcttccctcctcgaagccgcacgcacagagaggagaagtcgaccgacagcagatgaaggccacagaagaagagagcgaaaacagatctctacacaccaaaagaggagcaaacgaggggattcaggacctccggaggaggcggaaaaagagcgatcggataaagaccgagtgaggaagtcagtgaaatcgaagagaaaccagcggcgtctcaacaagaaccgcaaaaatgctgcgaggatgccctatctctagagcacatacgcgcatggatcctttgaagcgtgacggaagcctcgtgaaacgaaatgtacacttccgaatatggagttcacacccttgcggcggtagaaccacaagagctgttgttccagtacatcacaaaagcttcattcaaacgtatcgcacggagggaacataaagggaactggggagaagtgtgcatgtgtgagaagcttaggtgaagaaggagaagttgacaactgagaaaagaaagcagagagaaggaagttgaaggacggggggtgacgggaaggacgcaggagaagaggaagtctgaacgtggacgacagaaaaacggggtgaaaaaggaaggaagagaaagaagagagagaacagaggagacgcgttcgagtgtacgtacacccgacccctttaggtgtcgcttggagacagccagttgggctggggtgtacatacaccggagcgtgttggtgggcggcgcgagcgcagcggggcaggttcagacccagcagagttgagaattcctcgctttctgataggaatgctgaattggaaacgaagagtgaagtttaccgtgaaggatactctgttcctccgttcgagcaagtgtcgtgcatgtctgcttctggtcacatagcagagaggcgcgaagaaacacttggcgaacaagacagccgaaaaagggaagcgaggagcgcttcgtcttctccagtgttacagaagatgcgagggaattctttggcgtctcaggcgactctgtgcgtgttccttcaaaggaaaggagatagcgcttccacggaaaagaaatcaggaatcgcgagaggcagggagtgtcagccgcgagtctccggagggggcaggagcccggctgtcctcacatggttttgtggcatagtccgggtggaaaggaacgggtgaatgacacgaaaagtgtagagttcaaagcaacacacgtttagactaacgtcgatttctgtcaaggaactcgaagctggcgcgagtctcgcgggtgccctccacgaagccagacacactcgttggggggtgttgcatgcgcgttcacagaagcgttttttcgcgtgaatccaagaagcgttttgctcgttaaccttttttgcgtgccaaggagaagaagcgaagttgggggtttcctgactgttcgtttgttcggctttaggaaaaggggcaacgcctcctctcgttttttcccttccgaaagcctcggcacatcgctagaagacaccgcattccaacgaaacgcgtgcgttctctaccgttgctgctcgaccgagaaactggtgtttctgcagagacaacttggtgcgttccatgcaagtctgcgttgcgtcttcacttgcacagagacgaaggagttactcgaaagcgcgtggtgtctgcaacaaaggcacatgctgggggtttgttcgtgttttccttcgtaaaagcaggaagcggtttccggaacccacacggcacaaacgactggacgcggcagggatctctcgtctgtgtctctctcgcacccattgacttccaacttcttcgactgagcgtccgcgattcgtctgaaggctcgctttgcagacatgcttcgctcccgcgtttctatccgggggttcgcgcttgtgctcacagccgcgtttcataaaaagcgatacggcagtgctgcgggtgaggaaaacagacgcgcttctctctgcttttagaatgtgtcaaggtcgctcagtgcgaacactctgaactcacaactctttcgcctctcttgttgacgacgccgaatgctacgacttctcttccgccacatccgtttcatctgaggagcgcgccgcgacacgatttctgccgtgtgtgttgcctctgagtttttcgactcgcccctttcttcttcgaaacacagttttcatttttatgacaaaaatgcaaggtgtgtcgagcaacaaaaggtagcagcgcttgaaaagagagggtactcgcggtacaaacacctggatcgtctcactctggcagttgtctgtgcacctgtttgaagcctcctgagtcttccggacctgcgaggacccctccgcgcagtagttgcgcagagaggtcgccatacgttccaagcaaagccgtcattacgaacactgcagaaaacgcgcttgcaattcgcacacttcgttctggaccagcgaagcaacatcacgagagttccactcgtccacgtgggtgcgcacctgcaaacttgtcttcgccttttacacggtagtgttttagtgaagacggaagtctgcgacagtgcgaaatgcgcgccacagcgaggacagccgtttgtgtcgtttttaaaggaaactcgacgagggttgtcgctttccgacagaacagattcgcgccggcggtcctgaggagacagcgagttgttttctccagactacagaggcgagcaccctgcctttccagggacgcctccgtcgccagcgaccagatgcagacatccgaacagaagctcgtcggctactctctggagactcttttttcagagtctctggatgcgagacctcagcttcgcaggtgacttcttcttctaaaagcgagaggaaccgtgcatccggcgagagcagctctgtcgcaggtcgtgcctgatgtctttctgctttcaaggatttcacagtctactttgtctaggcagaaaactctagcatttcgggagcgcggaaggcatccccgttatctgagaagaacagggaggagatctgcgcattcgcgagagactcaccagattcgaggcggccagaaaaagtcacgaaagccatggcagtccagtgatcttacggtgctgctcgaacgagaacaggatatcttccatttttctctatcagaaacttcacacgttgccagacaagaaactcgaggagccccattcgagctatacacacacagacgcaccacagttgcaagtcggtttgtacaaactggtaaatcagagaccacgcaaagggtctaactagaagatagcatctccttgttctctgccgctgcgtcatatagtgatgctcgaaatccagtggaatttcacaaagcgactttctgggctcgtgcgtaggattctcgagtgcagtcgcgcgatcgcgtctagtgttcttgcgcaccctcagtgaaaacgtttttctactgtctctggcttgggaggtcgagaactctccagtacacagagaacgaactgcttttcgaagggagcaaccgggcgctgttgagtgtcgcttgcgtttcacgtcaaccgggtgagggactgatttttcctggagaaattccggcagaaaaaatagactttctggaacacgaaaaagacacggacgagtcacgttccgggccttgttcagaaagctacagtctgtttcgggaagcaaggcgcttgaggccttcccaaaaacagtcaaaaaaactccacccctctcagaagactcgacagcagtgaacagttgtaggcctttgcgcggagaacaagagaaatcgactgttcggtttttcttgtagcgatcgagagagctccacttttttcaggcgcttctcggaaaccacagagaaatcgactttcgcgcaactctcctacgaccgaggggaacctacttttttccagcttgtggagcgtgaaacagacatccactttcgaggccaagatcacaaagaacgtatagcctgaaaatgcttcgatggttggtctgcagccctcagccacacgaacgcatgcagaggaggctggcgcacatgcagtttggaaataaattctgtttttaccgccgagaggcaaagagcaagtgaaagactctgaggggtctggttctggaattcctttcatatctgtattcacacatttaccggcttcacgaaacacacacaatgaagcactgtgggtcggtgtacgcacaccgggggctcaccgtgtgagccgcgcgccaagaagggcgtgaa

SEQ ID NO: 1385 - DNA, 1151 bp, Toxoplasma gondii
  source 1..1151: mol_type = genomic DNA
ggagacacagcaaagttgtgtggcggttgttccggtggtagaaagggtgggagaagccgccacagatcggcccacaaaccgaagtacacgagctgagtcgattgaatagaacagtggcaggacatgaaaaatgagtcgagaaaatgagtcgagactaccaccgttgcagcttctgtcatttagttcagggctgacgacacttctgtgacagctgtggacgaggcactgaaattttgtctgcccgagatacaccggcatgaatcaaggaacccgaagtttctgtttacatgcgttgcttcaaaagcatttcccttgaaacagtaccctgtagttctcatgcagcaatattcatacatgtgtgcagacggtgatttttagagaccccattactttcgacggtcaaaaagcggctggtaatcccgttccgtctgttgagaaagaacgtaggtggccgaatggcatctatgaggcggaagtggaggctgagagggcgtgtcacgaacagttgccagcatcatttctcgaaacaagcaacacggtcgagcgtctggcacaaggccagcatcaactggggaggctgagcacacgcgttaaggacgaatgcatctcgtaacattcggtgagaggattactgggattctggaagctggagcattactacgctgtagcaacaagggctgatacgaccactgtgtacgcatctgtgcaaatttacgcctttcgtcgtaggctacacaacgagctgcgtagtgactatccttccataggacatcaggtgcttgcagaaagtagagcgcctttaggtgggatcacgacaaacgggaacaggaagaggaggacaaaaagagttgccgccgccgggtcgccttgcagcggaggttttgacgccagccggaccctggaaagcgtgttcggatccgtaaagctcccgcactacggtgaagcttttcccattcaatcataaaagaactaggttgtccagcagtccacaagctgcggcggacaatcgatgcggacgcattgctgtgagatcgtagtagcctttggccacgttttttgagttccggaaaagaaagattccagcgcatcggctacaggcgggaacctgattatcacaagtgtcttcgtgatctcagatcatctgcagtata

SEQ ID NO: 1386 - DNA, 1872 bp, Toxoplasma gondii
  source 1..1872: mol_type = genomic DNA
atttcaccgtcaaacagattccgaaatatgtcttccttccaggcacaccttgtgtgggactgagttgtccctttgttgaatgaaccatgaactacatactagaaagcacccctccaggaaacaagaggcataagagccacaaaagggggtcgcaagcaccgatgacaagcgtccccagaatatttagaagcttagtggttgcgaaatgttgacacgatcccgcgttggcaccaccggctctgtgtcacttcactagccgaccataacatccgagacatctgcagatacaatcgattctagatgctgtggaatgcacttgagcacggatgtctcatattgcctatatcttagagtcagatcggccactacgcatggcatcccatatctctcattcggaagattacgctcgtcacaaggaaacgtagacgacttgccgagtcgatggtgtccgtaccggatctattcgctcgaggcaacacatgcgatcttagtgtacagatccacagactaaccacagcagtagttgcaaacccgcggggtagatgaatgtctatcgcagcgccgtcaacagtgcggccgctgttacctcagccgaaacagtgaataccttggtatcaaacacgtgtctaatcgggaaacggaacctggctggtgggccttacacctcaagcatttcaagaaggcagactctcaacgcctcttgtcgagaagtgtggcctaccactgattgttcatcccatgtgcaggttctacagtgaggtagttgttcggcagagagtggctgcacacttctcagctcattccgacggtagcaagatgatattttaagtcctcttgtacgtcgcaacagataattccaaccaggaccgcataaggatgacgagttggacacgagcagctaccagacactcgtcgaggtacaacaatcgacagcctctccagccagcgccgtcccaatacggtgaaaggtggaaaagagcacgccgctgcgccgccgtgccacaaagactactcatgaaggctttcgtatatctggacaatccactggatcgtggctgggtatctgagagaaattcatttgtcagcctaaagtgtccattatcacgtggacgctgtctgcgaaaggtgccggcgcaaagtagcagccctgctcgcgccggcttttcccagcatgccttgtggctctgttgctagtgcctgtgtgtctccgcaacaaggcatcataagcctcgaccgaaaatcctctgaaacagccgttctttactcaagacaaaggatttttatgcggtatggggtttcacatcgtctgcttcttttccggtccatcgcagcagcgacgagacgaaaacatgctgctgtgctttgcaggcggcatcttggacaagacgccggaagtgacccagacgcttcccttgcattcttggtaaggtgtgtcccttttgctataacatctgcgcttttgtgtctgtccttcatttcagttgatttgctgggctagtgctcaggacagttgctgtttttttctcctgagccctctgtagagtccaaaaagccgttgccctgctgatgcctgctagtacgcgtctctgtgtttgggcccggtgaccaggccgggccctttccgttggcttattctttgcacgacgttcagtgtctgagtgtccacgtgtcgctgcgtcgtctgtgctctttagtatgaagcgactttcctgtctcttgctctgcagtacacgcgtcacgcacccgcgctcgcgaccaccggagatcgaggtgacgggctgtgtaggtgggtcacttcttcacacttcttactaatcttcccgcttcatctgatccgttcgttttccagcttcttccaggaccctgccagaa

SEQ ID NO: 1387 - DNA, 2256 bp, Toxoplasma gondii
  source 1..2256: mol_type = genomic DNA
aaagatactcctcttctctctaccgacgccctcattttctttgttctcttgcctccgcgcttctctcgccccgcgtcctagccaccggatgagggtgacgaccctctggggaaccttccccgaggaaggcgcggtgtctcccttgtttcccatcgtagaggttcctcagaagacgtaagggagaggacgccaagaagagctagaagagcaacttcatgtcgaacgcgtgcaactcccgacagctgcataggtgcaatgctgcacaccacctacgagggggaatggggcctggcaacttcagacgcgctatccaggagtccaacttgaccgggtgtgtagtaaatttgtttactccctagaaaacgccttccgagacagaagcaacagagaaactcgggatggacagaggcgccttctacgacgagcagcagccagatgggaaaagcggccgcaggtcctcgaacggggagccgcgggaatagatggccaagagatcgggaaaaaggcgacaggcgtggtgacaccggaacgaagccaaacttgtcacagagggagcttgttcgagcatgcataaaatcgcagacgaacagccgctttcatgcaagtcgatgccaggaagaaagagtagctttcttaagtatgcatataactttaccgaggcagacgaaaagccggggccagcgggtatggaaacgggaacacgtgtagagagcccttcccgtgaaaatgacatccccaagacatggagcataaaacgctgggtaggttgaaggcgtctcgcagtcgaggttcggataaagacgcggcttctacacactccggcactttccacggagcaaaaccaacggcgtcaagacggatctgcgcaatggttgggtgtacattcaccgaagtaagttggcaagtgttcagctcgatattgtcgagctgcaacacgaaagacagccaagtccacgggctcgaaggtgccagaacatctgttccggcgagtttaagtcgctgcgttaacgggccgtgaacacccttttaaaagcgcccgtggaacggtccgagtcagccggaaaatcgtgacaaacgaggggagaaacgcgaggcgggaagtgcctccggcatctgtcccgcctgccgtgcggtgtgccgcgttcggaggttctcgagctgcctttccctcgcactgcatacgagcgataccagcagtccatacagtaaggccggaatccaaacgctggaaaattcccttgcggtaggatagtgaaatcccgggctgtcgctgctgcctctagcgaaacatcaccccgaagaggctccgcgaagacgtcagctccagtcaagcaaaacactcagatattctgaaagtgacacatttgcggcggacttctgtatccgctgtacttgtgggattgagaccagcgcttgcttctagaacgtttttttcggtcgcagttcaccctccgcgctctacagggggaaggcaacgatccagcccccgcgacgagacgcacagctttcgacggggaggcgcccgtgtgctgttcgctgtttcagctgtttgagggtggaggaagaaaagtcaaggtcgcccttccttctgcaatgctcaaggccgtgaactgaagctacacacgttctattcagttgataaccacgaattgtctgtgcactgacacttacacgtagattcacactgcgaacagacagctcatcgacccgctttgcgggtgagtgaaatcacgggagaaaagggggagcttggagggtggctcgagcaccgcatgcgcctgtgaagaacgtgcaccgaaaaagcgacgttctgttgtttgacacctgcacaaattcacttttctccacttctgggtctccaaaagtggaatctcttccccgctttgtcagcccgtttgtgtctctttcccctgtctcttgctgcctctcttcaatcgccctgcattcgtcgtatgtcacaaaaagtcacactgcatgaggttctgcctcgtctttgcaaaaggccggagatttctgcagttgcatttttcactgcagcaaatggcgccggtctcactctctgtcctgttcgaagaactctgccttttcgcgtgtaaaagagtctctgctgccgtgtgtttccaaaggacgactccctgatgttctcttgagagttctgcggtccgctgtgagctttccgactcaacatttcccccgctttctcttctgacagagccccttccacgtctcactgtccaggtgtaccaacagcgaaaa

SEQ ID NO: 1388 - DNA, 2136 bp, Toxoplasma gondii
  source 1..2136: mol_type = genomic DNA
tccggcccatcaagagagctggacgtacagtgcacagcttttcgcaactccagagatgtcgacatgcgaatctgagaagtaacccttttttgcgccttgtgaatttcctagttgttcgtctcgtgttaccctggccattcactcgacggacgacagcggagttcgaatccggacgcggattgactccacggatgcaggggacgagattttgcatggaaaaaacgctctatccgttgttgtttcatttgcaccgacacctgagtcgaattcccggcattctcgggtgtacgtacacttcagagacagggcagcctctgccacctctgggtgatggatgtggtctgctgcgcggatcgagacagctccccgttgaggaatttctgaatgcgaaaagtttgaattctttctgcccagagcactcagcaccagtcgagaaggcgaagtctgtcgagttgtgttcatgctgtggaagggcaaaaggaacacgtcgcagctttttcgcatttgtgaaccgagtgactgcagagagatcgcgtcacattcccgtgagtctttcaggtgcctctacagctcagaaaaaagtggaatccccactcctttttcaactgaatctgagatctctttctagatgcagaagccaagctactgcggattgatcgggagaaacagagacagacaatcatctgtgaaattccccatggttcgcgtacactcacctacaaatatacatatatctatgcatagtgcagtacgaaacacatatctatgataaatatgtgaacagacgggagtggccgttgaacagctagaaacaactactcctcaattctctgaggctactagacagcccaaagagatgtgcgcgcatgtttcgaccaaatgcgttttgtgtggatgtggacttgtgtagcggcagagcagctactgagttatgaaggaactgtttctctcgttctgtgctgcaattgcctctacatttcgtctctggaactgataccggtgtcgccgtctcaaaccaacggaatgcagacacgcaaacgcccaagaaaggcagatgaaaacggaggagaaggtcaacaaaggcgtgaagaagaaagaagagagagagggggagatgcaagagagggcctgctaataaagacaaaagaagaaggagacggaagagacacgaacagagtgaagctgctttctgtccagtttttcgctgcatgcatgcttctcgtcgttctcttttcgctgaatcaacggaagatgttccttctttccactgttttcactctcctcttttttcttctggaaacgttttttacatgggtttccatttcaagaagaacagaggtcaattcgcttaaagacgcacgaccacgtgctctcctcaccacttcttccttatctgctgttctctcattttctctctttcttcgcttctctttcttctttctcccttcttttcgtcctcggtctgtttgtggttcgcgctgctgtctcaagaagccttcgccgcgagtctgcgaaactggaatcgagcaagccagcagcttgcttcgagtgtctcttctcgctcctctctctactcctcttttttggccctcgtttttctcttacactcttcccgcgtttctctgtcttgagtttccacgtcgtctaacctctgcaaagggccgctgccgtcgctcgaagaaaaacgaggactgtccgtttcttccgtggaaaaggggatttgttagggaagacatctgtctctgtcaaagcgtgctttttcatctcccacaggcctacagaggggggaaggacgagacaagtggtgacaaaacgagcgagggtgtttctacgcccaactcttccatcttttttaaacgaaagggtttctcttctcgcccatgacttctcctgttctttctcccgcgctctccgtcaacgcaaaaaagcttcagttttgccgctcacatcttcctgcctgatctctggtgtcgcgtgtccgcgttcctttcccagggatggtttcacagcgtctctttcgccctctgatgctcctcagttgcccagcgtctcgcttcctctgggagaaataaggcctccttctgcctctcctgagagtcccccgcgtggttgcttgcttgatttgaggggacaaaa

SEQ ID NO: 1389 - DNA, 4890 bp, Toxoplasma gondii
  source 1..4890: mol_type = genomic DNA
agaaggagtcgcgctgaagttgttcacgccttcactgacacatttcgtttctgtttcttgctgcgtcatctcaaagtcaacagctcccacagagaccccacagctcgcctcgccttcctcttgcccggaaggagaagacccgcatgcagtctgatcagagacacctgtctctccatgtggggatccacccagacagcgcccgtcgccacttgggcctgaagcgatcccgcgggccgccacacccccgagggtcagcgcccgtgggtttcgccctgcctctgctggagctggaagatttgtttcgtccattgtggcgaggagacgagagagatcccggcgcgttgtttatacttgaaacgaactctgacgcgagacctgctggaagattggatgcagacagaaaaaggagaagacgcgatttctgcgtctcctgagtttgcctgtttggggacttcagaccgcgctcacagagagccgaaggaaggcggcaggggacaggagacacacacagcgagaggtcgacgaggctggcagagaggagagatcatcgagaacgagaaagagagacaaggagaaaagatgcaggactggaggactgaagacgagaaggggggattcaagacagtggagggagaacaacgaaggagaaaaatctctgctttcgagcagcacactccgtttctgggttccttagaggtagcccggaagagaaggaaaacgctaagaaaggacgcgcatgggaaaaacaagaaatgatacgtaagaggaagagatagagattcgtcctgctgcatgcgcagatcctttggacaaggcgacagaggaggtgttcaagaagactgagagggacacacaaacaagaggtgcagaccggaaatcgaaacctccacgcttcaaagaagcgacagtggacctaagaaaggcaccccgcatgcctactgaagaagttaaccatccattttctctgcattttcgacctgtgtctgccacccacccaaaggtttttcgccgttctccgcggctggcgcccgtcttgcgtgtctttggtctccagatctctcgttttcagatgtttttcgcctggttcctcaagatttcacgagcgctttgccgaggaggaagcagcaccacagcgacgcagaaaaagctgtcttctgcagaaaaggacgagaaccggaccccagggctgtgccggctcaacgaagagcacaggctgagtttgaactatacggatgacgacagcggagattcgacccttcacccccggcgcagcgaaaaacgtagaaaaaagagagaagaaacgggcgagctccgaattaagaaaaggaagggagacagctgaaacaaaggggacagcgagggcggggttgacggcatgcatggattccgaaaaagtgtgttctcagttacggaggagcgcactggcgccggagtggttggtgaaatgtacgggggaaaggtgagattcgcagaagcgaaggaaaaggaaagaagagacgaatatcaaaggaaatgagaggaagggccggagagaagtcgtcccagtacgacgtgcatgctccagcaaaaataaacgaaattggcaagatacggccgaacaaggagggaaaaacagaattgacgggagagcgacaaagtgggaaggaaacgaacaagaaatggcatgtttaagattgaaaaaacggaacttttcgcgatagaaaacggagaagcagagctgcgggtggccggcgagaaacagcagacctgcgacaacctgctaccacactctcgcgcctgctgacaatcgagacctcatgcagtgtagctctacggtattcgtgtgttttgcataaactggtaagacatatcggaagaaaaaggacacaacaaaatgacagaatggagaaggaaggaaaaacaatcttgtcgctcctgcatgcacacggcattgtgcacacccattcgcgttagttatttcagagatgttcgcctgctctcctttccgttcttcgcaggaaaaaaagtgacggatcactcgataccttttaaccttaaacaggagaagagagtgttgcacgcgttcacatcacaacacacaatgagagaccgcggtagtgggtcatcatcctttttacaatccaagttttcaggacagcgctccctttcggaatcataaaaccacgcctctggtcataacttttaaaaaatgcaacatatccagtgcagcgacttgcagctttgacagaatagatccagacagtttattacctaggggactgaataggactcgagttatggggtacaaacaaagaagttctccatgagtgccaaggaatcttgagaaaacggaaaaggggtaacgctctcgtgaatcatggccggcaaatcttgtaagttgcaagcattcttgagagagaaggaagtgtcaaaccttacaagaatacgtggtccgttactcttaacatggcaacgccaaagaaatacgaacggcctcaaatagggaattcgtggtgccagctttcgcatagcagcaacctgctcagcgacctctgctgctggaaaaaatgctgaagcatcgatttagggggaaaacgaccgacgtcatgtaggcatttgtgtcttcttgtgttggtttcgcttctgtgaattattccactgcagattttgaggccgtcagagcgaacgaagagaaaaaacacagaaaaatgcatggattctacattctgaggtggtctctatctgttgaataaccgattttttgggtttggattggacatcgagatcagtggaccctcggcggtgccaaaacggcacactgggttaacggttgtaccttgtcggaagacagtttgatcttctcattgtttgtgttttgctgctcccacatgaacttcaatcactctgggcaccttgtcgtcaagtgtcgcagtttgatttgcgatacgagtgcaaatggaaaaagattcatcgagtgaaacaaccctttcttcctgtgttccttgtcgaaatcataccgcctctcactgtctacagtgactctctaaagcaagatcgaatgcaacaacggggggtcaaggcgatcattaagaggtcagactgcactgagacagagatgaagagcagacaacgttggttttggtgccgcaatctcgagttgtttttttgcgattcacatacagacatcatgcttgaaggagccacggggccccacggtatgcctggctgtctgaaggacacattcgcaagcagacttcactgttttttccgagatatctaaaagttagcaattgtatcaagactccttttcttgtcttgattagttgccgaagcctgagctgtcgtatctaaaacgatggaaagtagccgacacgtggcgagactgcaaactagaattgcagactcagattggaaaacaaaccaacaagtagcaatttaatgataagcttcccactagcttccgtttgtcaatgaggcattgatgctatcctgcattgagtatagccaaccgaaactggcaaatgcatattggacacgcagcatcacgttgattatgaaagctggatcagttcagtggctgcatgtttgctgttcagataaagtggtgaggtacagatcaaaagtgttaggtgccttcctggatgagaagggaagcttatgcttcccatctgccactagggaccagcccagtgcatacctgaagcattcgctcagaagaatcactgagacgcgtttgtttcatttgtgttttacaccataggggaatccagataatcagcattacatgcagctgcgactcccttaagtgaacttgaacttcatcgcaacatgtcaaggttacaacaactgacatgggcacagacttcatcttgcgtgtactttcgagcacatggaactccctttttctgtttgcgaattcgcttgtaccttgtcatgaaatcgattcttacagcgttctcactgctggggagccgcacctgtcttccattgtgttttccgtctcggcctttactttttgcctctctgctatatggttgacagccggtttgttcctaacaagtgcttctcagacatcagtgcatgcggtaccatccgggaaactttctctgaattgaacggtctctgcatgtagttgccttagtttttctgttttatgtagtttacatgtcttggtcgtctcgagcactcactaagcatagtcagtctcaccgcaggcaagactgaaggccagtccgtagccctccgttgtccgagcaatcagaattttttaaactactgataagcgccgatgcaaatcgccaccgcttggttagtagtgtggaacttgcctttctgacctggaactcacaaacagcagggttcacacgttaattgtgaaatgagctaggttcccctcgaaagaattgagcactgtcatttcatctgcataattattctcctcatccaaccactatcggtgcaattgaaatagagtttgaaaagacattgtagaaaatgataagctacgctgtcgcctttgcgctctgccactttgactgatgccgagaataggaaacaaaaaaaactagtgaagtgtcaggatcctagctgtattatgttagcagagcgtttgctcagtttattcccctgtcgtgagatttgcttgcctccactactaccccgccactatcgattatcgatggtggtgtggtgagggggggaagggggcagcaagcccgagcctctacgtgtcggttgtcttgcaagacatcttgatgatcgtccgccccggcatgaggcacaagaaacacacgccaaccaacgccatacacgccagtgttcttactgctttggcaatcctggttcttccgccacctcctaacttgtttggttttttcgtttctagtcaatttgtctacagcatctgcacca

SEQ ID NO: 1390 - DNA, 3224 bp, Toxoplasma gondii
  source 1..3224: mol_type = genomic DNA
atacgagccgtaaggtgccgcagaagctcgccacgtttgagattcgtgtcccagatggtcgagataaagtcgaacggtgaagggaagctgtgtgagaacctacgcccgcctgaaatgacccaggtgagggggctctccgcagcgcggcagaacggaaacagaaaaagggtgtgcccgcaaaagaggcgcgcgcttcagcgctgcggccgaaagttgaaaaaccgatacaattccaaaaagtaccgcctctgagtgtctaaacctagacggggacacgttcacgcatacatggacgcacacgcacgaaaggcaaccggcgtgtctaaggacgtgctattacatcatcttgtatggtgtagatatgcaaacatactctatgctcaccgagaaataatccttatctgaattttcacgttcacacagagctacgttctgcatcgggcagagatgggagacggggttgggaccgcgacggcctcaagaggtcggacctacagaatatactttttctggtgcgacatgaagcagcgccgcccgtatatgagctgtggaactgtcacacaagggtgaaccaaagtgaaaatgcgatcaacggtcgtccctggaccaccaaacagcgtacgaatacaagatgcctctgcggttgaacacgtgatgacgtctgtctgaggaagtatcgacggcaggaacggctgtgctgactgccgacgatgatccgagtgcaaatcctttcttgtcgacggcctagacagcggattgttctgcacaagattcccgctcacgagaattttcgaaactggagagatgctgtgcagaacggacgcggcaacagcggcttgtggtgtacgcacagcacaaaatcaaggcggtgcaacaaacggtcgacgcgcagggagctgcgggactgaggcgtttcctgcaaggaaaggatatgaagagaaagacggtatttccgatcgagcaaagaagggaaaaagctgtgcatgcgattgcgactttttctagcgcagcgagatatgctgtcaggtagaggaaacagtagaaaactttcgcaaaactcaggagaggtccgcctagcgacatggccacacggtagcgaagagaaacaactcagaagccttgccaggaaaggcatctctgccatggagaaaatgtgacaggacggtgaacgtgcttgcccgttgctcggggcaaagcgcgagaatcgacgcagcgctcgacgcggctacgcgtcccgatcgaggtcgagcttcgaagctcgttgaccagatgtcaggcacggcggacggcaattcgtcctccttgttcctgaagtggcactctgtaacaaaacaattccggaaagcatctctgccgaagaaaaaacaggcacagaaaaacgggaattcgtccatgcgaacgagaaagccgtagctcggagggcaacatctggcacgggcgcctaggtgcagcgccgaaaccgcgatacagcagcccgatattttccgttttgtgcctctctcctcgtttttctttgctactgtctggtgtgcagaatccgctgtgtctgatggcgatgctttaaattgtcgaaatcgaaagatgaagatgaaaacagtagtgccgttgctcatggagcacgcctctgcacataacctgtcgctggctgcctctcgcacaagcacacagaaggctgcattaacttgctgccttttcccggtccttctcgccacggctacttgtatccattgcccagaacttttcagttcgacccgagggtaggaatttttgattctcatgaaggcgaatcaccaatttcctcacgcgattccccataacgcaacagaggcaggaggtgtctcattctttgtgcagagagcactaccgacggcaataggttttgagagtgagcagctccaggcctgcctgtcgccgcctgcaaccggataatctcagaaaaaaaggggggcaaaggaaaagcaaagctgagtagtgctgtatccacccgtcactccagtgtgggagaagacacgcgaacccgagtcaggaaagctgccgcaagacaggcaaaaacacgccttgaccagggccgctgaagcaggaacgcaagggtgggggaaccacacctcgcaagtatatttctttgtcacagaggtgtaatacctagggagaacgttatgctgaggcgacgaaaagtgcaaaaaggttgaaaacgtgtttctgcaggagttgtcagaggggaccgtggcgcgatccaagcagcaacagatttacgcgttcccacagataattaatgagtattagtcagtaatagacctcttcccataacgtcaaggatatcgtcctaacaataaacagcctcgcttgacatttgtttctcaagcaacagctcaatttctgtctgcgtttggcttcgccacggcgtgtcgtcccgagggcgcgtcacgccagcgcacaccgtctagggcttgccgagaagcagcagcaagagggacccaggagacgtgctccagttgatttcttgtgttttccatttttgcggtctatctctttggaacaaaggaattttcttgaggatggaaaagtgcgtgcaacagcagatttccgtgggacgagacgagcacagccatttccccaactgttcacgattgccgggaagcgatttcaccacatgcatgaacacaagacggctccgttcgaatggccggaacgttcaccgtcgccatctgtatttttaaaaagaaaatgctttaacaattcgtgaatgttcgcgtactccatcggagtcgtcgatgtggaggcctgagggggtgcttctaatatgacgacactcgtcggctctcttgtctaccagtctttctcggcgtttccgtcagtctgtctctgcgtcttcgcttcccctccgtttcctcaccatcgatcttccttgcctcgctctgctcccaccccggttccgccttctcacatctgatcttttacttccctctctcacccgtccttctatatgctttctcagtacctgtccgtttgctcttccccgctgtcaacatggtttcagttattattctgagttgtatcccaccaccttccctgttgcacgcggctgtcgttattcgaattgcctgaggtctcgcactggtctcgtacagtgagccaccgacacacggccgttcgtttttctatttcaagagtttctttgtgcacatcgtcacccgttttctccgctttttctgagcgaagggcga

SEQ ID NO: 1391 - DNA, 1198 bp, Toxoplasma gondii
  source 1..1198: mol_type = genomic DNA
taacaagggagtaatgagccgacatggaggtgctcctgaatgtaacggtacaagctgtaaacaaaggactccttaacttaaactgaggagtcaagtaggtacaaaccgtacaaggattaattatgtccatctgtgcatctaagttgatactcggttatatatgttagacgctaacttcccggctaaacatcccttttctttgaaacacacttcccttctcgccgttagtatgatctcaaagtaccagaagccatgtgatctatatagtataacgggacattagaccgaacctgcgatagataaatatatcttggatgattgtatattagcggctaaatgtcaatcaaacatgcgaattttaggtttccatgaaatctatttggaagaagaggcttgatagtactaccgtaagtacataatatacagtcccagcagtagcggttaaactatagaagagtcgagtattatccatacataccaggcgtaaaaagcgttcatccagttactaaacaggtgccaggccaacaagaatccgatccgtgtattccgtacagactaacattaggaaggagactaccaaagtgaatatcatgatatttgtacagcggaggatactcgacgaatcttcaggcgcgcaggcctgctcgagagaaacgaccgcgtctaggattcataaaacataacggaatcaccgcagaaaggcgctgagctcgtgtcagtgggtgctggcgcagcttgccgtctcattttcgctgtttttcgcgggtgaagaagcggacagaaacagaacgttctgcgaaaagagcgtacactcggtgcatgcagaacggtctgtcttgcgaattcgcacactcccctgtcgtgtcgcaccacgtgcacacgcagcgggcgggactcgacttttttcgcgttttttcgcgtgtctccgagttcgtttgaatccattttcctctggccctttccccaatccttcgtctctggttttccacccttttctggcggccagtttctgctttttgccgcaagtttcttcactttcgcggctctcctccaccttggcgagtcccgccgctctgccgtctcccgtcttgcctctcaagtgtacatacaccctgtgcggtgtctgcgtacgcgccagaggtcgcttttctccgaactttctttttccgcctgctctttcttgcgaagtccggcatca

SEQ ID NO: 1392 - DNA, 2264 bp, Toxoplasma gondii
  source 1..2264: mol_type = genomic DNA
atcgaaactctgagcactcgcactcctgccacctgcgtgcggttcttggaaaggaagcaactcctcccagaggcaagcctcgtcgcgatgctgtctccttcggtctgcgcttgaggcaggcacacttcggctcggcccccgaacgcgtctggagcccaacgtgcccgtaggcacctgcgggctcctcgggccccgaggccccgcgccccacccctcgaacccgcgaagcccgacgagccccgcccccaggggcttcccgtccagctcgcgaagcaggtgaaacacttccttcttctccctccgaacttcttgcagtctctgccagagccgcagctgctgctcgcgtctgcgcgccgcagctcgggccgccagcgacgaacaggagacactggagacgtgggtggaacagacagctgagtcgggcaccaggtgcatgtgtggagaggttccgggaggaaggacgagaggcgcgtaggggaaaaagtcggaggggcctgctgtaggatgtgcgtggaagaacttcgcatgtatgtccgaatggccttcaaaagctgcacagcaaggacagaaggcagcgctcctatagcatccgtctgagcagggaagagcacacggaggcggggccttttcaaagttgacagaggactggagaaactcgtctctttctggatacgcagcagcggcggtttcgagaggctctggagccaggggcggaggagacagcaccggaaaacagctgcacgtttcctgtggagaggccgagacaccccgagggagacaagacgacgcctcagacgcactctcttggggctcttcactcatggcgcatctctccgcacacaacgaatgcggtctctcgtccagcagacgaggagattcgccagccccggtgtctccttcgcaaaagccgaaacctgagcctcgcgtctcctcgaagatgtctgcctcctttgcacgggaagaactcgtgtgggagtgcgaactgaggcggtcgctgccctcctgtagagactctcgaggcatcatcgtggtctcatttacggtgacgaccccgttttccgtgaaagccccgtcgtcaacaactcctttctcctccatttcgtcctcggtggcccgcgttttcacacacaaagaatgcgtttcataaaactgctcgaccttgtccatcggcgaacatgcaccacctccggtgcctccttcagatgcccagggcccgcgccgcggcttgggtatacgtacacctcagagggcggggcgcaactgcgagaagggcgttcggatgaatttctctctcgacagaagttagaattcgagctcggcaatcgaaagaagggaaactttgcgcggcaagaagtgacgcgcggcaatggtagactggaggcactgcgtgcgaaaaatgcttgaagaagtttcgcgtcggtcgtcgagtgttgattcttggggaaacgcctccgtagttcccactgcagatgggtgccgagaagtcggtttgcgcatccaaacgtggatccaacaattcaggcttcgaaaggaagtcagaagatgacgacgtaggcataactagtgtgaccctcgagagctgtacatacaccccgattcaaggaccccaagaggcacccctgacatgactgaaaacgcgtgtacacgtaggtgaaaaaattaatcagaccgccaccgaattttgttcgtttctcgacgacacatgcgctcgcgcgcggactttttctcttgaaccgaagcgagttgcttcccttcgcgagtgagaaacgcattcgtgtgtttctgctttgtgtgaagaaagccaggggagaatctcgagaaagagggaaaaagcccaggcaatttcggcccgcaatcttggaggaagggagaaaacgagaatgccggcacctacaaagggacaaaaaacgcgttacattcatgaagcgttgtgagttcgcctagccagcaggatctcgatgcgcgggaggcattcccctacgtgaaagagacgcatgtgcttcagtgagtgagtcggcaagacgcccaagccatctgagtgagcttctgaaaaactggcggcgttctctcgcaggaaggcagctgtcaggaggcgacgagactctcgcgtcggccaacctctgtctgtgttcttgtcggtttcttatctcccggggagaagaacctcgcgtattctccaagtgagacttctttcttcgactcgttgttcctcgagtctccgctttctcttctcccggctgtcctccccctcgtctgacgtgaga

SEQ ID NO: 1393 - DNA, 1960 bp, Toxoplasma gondii
  source 1..1960: mol_type = genomic DNA
ggagagggagagataagaggcgaagaactgcaacgatttctgcttcattaacgtcttggccttgaggttgctctcgagtactagcggagcatacaagtcgggatgtcataatcaagcaacggaacagtgttgagaaacaggcgcttccacacgcacgttctaggcatattacatggattactgttgtccatcgttttaccggcgagagaaatctgctgtgtttattccgaggcgaacagtgccatcatactgtaaatggtagtctttgggccacgacactccgtagggagcttgacagagtccccttttgttcggatccatcggtctagcacacactcgatcccttgatgtatttattcattgcggtcaccattctggatctcgaatagggtgccgcgttttaaaagttcgggcagtaggactcgcttcttaaatacggaatttcgagctgacacggcttcgactgggatatagcgcgcatttccacttactcctgaaatcaaggctgaagctgccttctgcaattcattgaaaggccggcacgttcaccactactatagggtggcacacgctgatgagagaagggcaagactacgcagactcccagggtatgcgagttccggtcgagggtggctcttgtcgctgtagatatgtgtacgtttcaagaacctgtggacagaggaaatactcaaagtgtcttttgtttctcctttgcccagccgtgattcaatgacgtgttggtgatgacccgtctgagtgcagacattgaaagaccaacacatgagtggcggaaaggagaacttttacgctgctcagcatatgtgtaaagccacaatgaaatcaagggttggatatctagctcacggaatcgatgatctattcatcttctatctctctggattgtttgacgtacccagcatcgtggcaggcctgcgcggcctcagtgtagaactgtgatacttgccagacgccaacagagacacgttgaagcacctgcgaagtgttttttcttttttccaggaactttgttggcaccaatgatctctttccttccttttcttcctgcgtgtgtcgtattctcgtcgccgtcgtaggctgcggccagccaggattgcctgggtgcggcccgcgcatgcagtctcccagctgcatgcaacgcatggcgatatcgcgttggggggggttttcgaagtgtgtttgctgtttccgccaaatctggcgcatgttcacctctctttatgctcccagtttaggcttgcacggccaaaactgccataactgcgtagcgtcgtgccggacgattctgccgtgtctctggcttgcgaactctatggtcctccatttactgccgtttccatggcgccacttgatcaggcctcgccattctctgtggccttcctctctcttaatcaatcacgagaaactcttcagcagccgttgtcgtgtccataaaaactgactttgacgctttttgcacgcttgcacaggagtttctttgtaaggtgtgccggcggactgcgtgttgctgatctcgctctgcagaaaagttcgcctttgtgccgtcttatgttgtcagctctgcagcactcaggggacttattccccactttttcccttcgcgttttgccgccttgcttgtcctctctccagtttacaccctgactttcctcgacgatgcggggtcgcgtctctcctctgagaggcctttgactccgctataataaaccaggccgggacttgtcgcttgaaccagaatttccgaactatgtatcctctccacgaacgactttgtgtatcgacatgcatatgcatagattgcgtttggcgagctgaatatggttgtgtgggtaacgcggcgtttgtttgattcttttgtcgagtcgcgagggctctcacgtcagcctttcgtccaaagagctttcgcggaaaacctccgagtcgtggtccagctccaaaacca

SEQ ID NO: 1394 - DNA, 4918 bp, Toxoplasma gondii
  source 1..4918: mol_type = genomic DNA
acagaaaaagggagagcgagagacagtcggtgaaacaggaatcaaaaaagttgaggtggaaagggaaagacatgcgcagtgtggagaagaggaaactggtgcgcgtgtcaattgaaaacaacagcagcagaaagagatccttgtcaagcgacgagttccccacaaggcacaggcatccctatgcatccaaaggcaggaggaaatgccctcccacacttcggccaagagagtgaacctagagatgcagacacaaggaaacgagagagaggcggtacaacggtgtagagatgccttttttagaaccgtgcggagaggtccgactgacgcgaccctgaatccgctactcggcgggtgtcttgacgcgccgaaagagaatcacgcgcgtacggaacaaagtggagagggagtccataaagaggagaaggcgctttcgtaatcaaagccagactggaagccgaagtgtctcctttgtcgagaggaaactccgggagtcctcgcgctccggttgcgtcgtgtctgcggcagcagtccagcgggagcggatttcccgtcagcaaaagcggaaatacggagagtttcatagaagcgaatggcagtggcagacgaaaaagaaacagagaggtgccgtggacagagaaaagcgaagggaactgatggtggcgggccaagcgcgtaaggtaaggagggaaagtaactcgtgcaagacacacacgccgtccgagagaccagtgttgacgacaagggcccaaaagtcgcgaaggacgcgaaaaaagccgatgcagctttgacacaagcaaaaaaaaacgacaggtttgcgtgttttctgctcgaagtctcccggagaaactacgtgaacaagacacaggacagtagcgcagatccctgcgagcaaagccgtgccacaactaactcctccggttcgacctcaagtttttgacaagaagacgacggaaacagcaacaaaaacgaagaaggaataattgacaaaggtcagcgaaggaggtcgtgtttccttttcacttcgtcccgtttgaggtcatgttgcctccgtcgggagccccttggctgtcctcacagcccttgtggaccggcagcgttcctcccctcttcaccttggaacggtgaacgtgagattgctttacccctctagctctttcgttttctctaaataattccaattagccaatccaggcgaaaggattgcgagagcagagaggcacagatacagtcgcctctcttcccttggccgcgcatgccgtcggcttgcacggcggtttcggtttcccccaatataagccgagttcggggaatctcgactattaagaagggaaatatttagggatccggcattcagtgacgttcaatttccagcaagtgtgcacgtttgcgagaaacggtcgaaatcgtgaggttgtgaaatgcacagtggagacctcgctcggcttcggtggcccctgccgctactctcgaagtgagatcccctctgttccaccgcagaagtcagcaacatccatccaaaggaactttttcccacctaacagggatctggcaaacaaagaccctcaagatctagcgaacacgatcacgttgtgtgggaacatttacttatctttgctcatgctttggttaagctgaggaccggtccaggaagaatcagggtcgcatcttttcaacctctcctgtttgactagttttgtttctccgagagtcaagagcgaaaaaaaagacgaacagattcgcgcgcgcctcatggttgccttaccgctacactgcgaaactacagagacagtttgttcctttttttcgcgtcagctactgagaaggcgccgccgaacccctaatgtagagtgagacaaagaagtcattgtatccgccctgcgaagccggtattcagggtcaggacacgtcctagcaaactgcttgcgtggaattgctgccaacacagtatcttacgatttcccacctttcctgtttcttcctcttaagtgtttcgactcccttcgttctttttggccctctggatgcttcctcgcaaactgacgaaggcgcggttgcaagcacagggagggccctcagaggcaaggcaatcaggtgaggatttatgttttacagtaaagatgtgtcaaaagatactctgaatatgttccatgtgaatacacgttcttcctcttattcaacaatccaatcgagtgcggtaggcatttatcatccgtcgtcaacctatacggaggaaggaaagctttttaacacggcatcgacacctgcaggatccctagaactatagatgtgacgttttatgttcgtagtgccggcagaaaagattctccctcttgttgcgggtcgaaccagttcctcacttgcctctccactcttaagaaaaagggaatgctgcattgaaaaagaaccgatcaaagaggcggacaaggcgaaaagggggtgacggtgcgatcacgaaaggagggaaagcttccagcagatgtgcccggtccttgcccgcggaacacagtgctgctctaagtttattttctacttttcgagttgcttgaatctcaggttaggtgcatactcgtaggaaggccagtaacactcgttcgatcgattcactctgtgagatgcctgttgaggaaatccgttgtgatggtatggtgggaccggagcgggtgggagttgacgttttacagaaagacgaccagaagccgtccgatgcagaaaagtgtgacagaggcaaagaaaatcgtgagaggaagattcttgaagtcgacagcgctgacaaaacggttcgcccctgcttttctcctttgccccgtcttatcttgtgaacatgtggttctctcgccccaccgtcatatcctttccatgttaaagatagcgacttccttctttcaggcgcgaccagcctttctctgaggacatttgcgagattttctgtggccagtgccacaagagaatgtattggtgattttcgttgttttgccatcagtgagctagcatctcacatgctgcaggaataaacagaaggatcagaaacggagagggcgaacgttcacttgcttctccttcacacactgtcacttgttcttcctcgacagttgttgttcctctacatttctggatttgtgtgccgaacactctgcatcgtattcaaggactcctcatccgtgggactctgtctctgggatagcgatgtatcagcatttgcaggggcagaagcgaaggggggacaccggacaagcgccgctgatctcgcagcgaattccgcactctttcgcgagtcacgttcccgtccgccaagcacttcttgtccacacctgccagtcctgcggtggaatctgtcattcatcagtggtgtataattccttcgtctgaaagtaaggaaacaaggcatcaaagactttttatcaaaaagattgtacagagcaggatcacgtgccgatttgcctgcgacgatcggtgtcctttctccgccgttgccgattgcctacgtgcaggcagacggcaattctgtgcagtcgttctcaagaaaagcttctctattggggcagagatgctgccatgactcccctgcccctgggagaagcaaatcgacgcctgtgtctctttgtcgaatcgaacgggccgtctctgtggacccgacatctttccgttagactcaggagaaagacatatcatgagaaagtgaggaaaaattccacggagtcagtgtgtatcccctctttcagtgttgtgcttttcctcatcatcccaaattgcacacgatggaactaaagaagggtcaacagctgtctgtttagtgcggcagatttcttccaaaacgggtaaggaggcgaactcgagaagagattcaggtaacaaaatcggggatcctcgccgtacatgagaaggatttttttgtgccacatggtctgtctatagaactactgcagagggtttttcgaaacggctgagatatggaaaacctgtttcctgtgctgctcccaaatcagtgttgctggaccttctgagttcttgtctaatttacgtttcactaaaacatacatgtacttgggtacaggagttccacccacactcggtttcctttctgctgacactaccacgctattgcccggcgaaacattaacttctttaactagcctcgggccataaaagtagaaccgcaaggttgagcctaaactactgagtgcagcaatgcgctacaacgcgagtctaagcctaataatcactggaactccctcccggtggatctattaggatttcatccgatttaagtgaaaacacacagttctaccttttacggatcgtaacaaacctcgaggcagagaactcgacattccgttctcacatcccgtggtaagcattaagcgtatagcggaaggagcatgcatatgttgcgcaggaaccctaaacgcccgaagagtataaacagcccgttgccaggaaatagacactggggacaaggcagacccccgtcacggcaacaaggacttttccagatgggctccctagggtaaacattgctggattacagtaccgcgaagcattcagaccattccactccgcttgtgttctaggcatcatctatatggattactgtcatcaaaactcgtattaacacggagacaaagcgaccactctggtgcgagtatcatcagcaccgtcaagggaacccagcccgtcgcgctgcaaagggcatgcaaactccgaatgattgatcgcctgcgtcgatgccgcgcgggttgactcaagggtaccgtgtcatctgtcgccggcgcgtgcatttcgagactgtattcaaaatcctcttttgtcgccagcatccgcaaatccggcaaatcctcgcaggaaagaaacaccttccactgtctgacccctcggtcgcctcaagtccccggagtgtcgcctcgggctggtacgagcacca

SEQ ID NO: 1395 - DNA, 4924 bp, Toxoplasma gondii
  source 1..4924: mol_type = genomic DNA
tctttgataacgatatgcttacagtacgagagctggcgtagcataccctcttcgtccactgttttaacagatgtacatgcgcctgacggacaactataccacgtgtcactattacgtcactagacattcatcgaattaacaagaatgctattcgcgggagaatacctcgcagcctcttccgttcctttggggcgtcctttggcggacgatcctcctctcccgatggcgttatgctgggctgttccgttgtatcggctacttcggatggttcgttgacagacgaaccttggtcttctgaaaatgagaataacaggcaggtcacataagaagaaaggatgtctctctggttgggagtttccactcccgtcccctttcaaatgcatcatactgcacaacgagtacacctcccctgaccatcgaacattacaggatgcacatcattcgtgcgtcccgtgtggaaactacctacaaacctacgagcacgcagatcctacaatgtacagcagcagccgtgctgatgcaaaaaagagaacgccttggtcagcagccaagtggagtcaccggaaacatgaactcgcatctgaaaagatccgactgccttgcatgggtattattccttaaacataccttggtcagcgcaaggcccgtcgtgtaacaggccgacgccgtggcactcccggatgcagtggtttgcgtaggtcacgtgatccccaccgcagtttaattcgagattgcgcggacaagaacaaactgaagcaaagcacgcctccacaaggcaagagctaataaaatcgactagtcttcttggtttgaatgattcaaacgtctatgtgataaactgtgcccccacatttgacgttttgagtcgcggtctactacttacgtccccccgttgatgctaataacaggtcataagatggcacatcgcagacatcccaaaaattcctcttttgatggaaaaaacacaggcagctagcgacattcagatacagcaaccaagtacaaaaactagtctcatcgagcagtcactactgataaacgtctgattcgtggtgtacctttcgtttcgggcgaagcaaacacagctacgctgaacgaacaaaccagaactccggcaagaaacaaaagaggattctttcccatttttacgacgggttagcactaaccgaagccgtaaattcgtacgactacaagagacgcagtaactgggacaaaattcgcaacagcaactgaatacagaatgtgatgtacaggcgaaagagaaataggggaaatgacagcttgtttaacaacgtaacttcggtgcataaactaacccatcaaacttcttcgcgcgtctctgttgacatgtatgggggggccagccagcttacccgggcgctgcttccctgcatcggtggtgagtcgtcccatcgattcggcgtcgggttaaatagctatatcgctttttgcctcttgtcttagtccgaaaggcgttcaggatccgaacttctaagatccgaactccttgctgttaagccgctttcactgcgctaaggatgtctggctgatagcgtcgcaggagaactgacatcgaaaacaggaatgcggatgcccctaagcaagagagtaccagattccactacgtgtctgtggcctgacatgtaagtgtacttctagaacactcgttctcagaaggaaagatgatccctgtagagaggcaaagggcatacgacgctctcgagtttaaacgaatggatcgtttaccaacctcttcagctttgtcaccttttggtcttggaaaacacagtagaacgtgactccgataaacaaagaccttcaagagttaaactagtagtccatctagtagtacatactctctagaaaagcttggttgaacgcgtagagcccctgaagcggtcagagcctttgaagatttttatgaggccttatacactgaaaccaatccgtcgaaaaaaattcatgtcatgccggtccggagctggggctccactggcagacctcggaagacggcggttcggttttcgaccgtcgcagcgtgtctgcctactgagtgtcctgatcctacctcttgtctgataatgccatctcagcccagaatcagatacactggcaagttatgtcgtgttgcagtgccgtccaagcaacccagtctgtccgagttgtttcaagcacacatgtgtttaccacactctgtgtagaacttcagggagcacagcaagcagcatgccaagggacagtgagagggtcccaagtgctgtagagaggattttcttttcctggtgagccccacgaattctggaaatatgccgataccaccttcatgagagtttactaccaaaggctcttacgggacgtggaccctccagtctattagacagagcaggtgcctccacacgcctcacaattgccgcttttggtggctgcgagttagtcgttggcaatatcactgcagcaagctctattttaagggccaccgctagacaagcaacgcgctcgctgaaacaacttctgccgaatggttgtgagcagctgtagtatatagttctaaaggatgagacaagatacaaaaatgtctcgaataaattatcagagagcggggggatctggggcggagatgctacggttgagaacctgttcttatgtgacagaagaagccatatagaagcgtttcacctgttattgacggttgtagaccattgctgcccacgtaagtttgttggtcataatgaaacctatagccgtgtcttccacctaccacagctattcgtccttagcagctgcctgtgtggccccctcctgaacaactacagcgctatggccgctcttatgctgtgactatcaaaggttcccttttgttagcagctgaagaaccaattcttcaggtgctaacacgggcaagatcgcagcctggcacaagtgtgtgaacctagtaggatattctgcccagtttgacaaggcgatgacgaacacgaggcggggattcccagatccaaaaagctcatcaaacatcacagcgtagtgcagcaaaaccgcgagggtcgactatgaccgacttcgtgatccagaagaaaacattcgatgtcacagagaggtcagccatgaccaagaagggaccgtgcgcctcagaacctccctctttttttcttcgtgttctgtgcgatattcgcgcacgacattcgtcattgcttaggacgaaactaactccacaccacctgtgacaacgaatgtcgcttacgcaggcatcagacagaacaaaagctctcttatcatcgatgccgttgaaaccatcaaagcaacaagtagttcctgaccgcgtacgctgtacagcacatcactttggtcgacacttcattcacccagtaactttgtgcattgaaagcgtcttcttgtgtctggtgcgagcttaacagttgtgcgaaactgttcgtcttcgttggctttttttttccgaagcagcaatctagccacgatgtttcaaacccaagccttgcccgagcgttgctcgtggtagctggtgactcagcgatagtgcgacatgcataaacaatacttgaacaatccttcgggggacactgttttgacacgagtgagagtgcacccaaaaagttccttggacggaccggggatcgatcccgggacctcctgaatgcaaatcaggcgtgataccactacaccatccgcccattgtttaaagtgccagttagcgttgtaatcgatttctatgtcccagtcaccggagacatctgctttccgccatcgcacaactaatacagcccagacgtccccagtttgatcaccactttcgcaatgaaaaagacgcttcacttcaattttcttcagtgcacgggtaggaggtgttctacgtcccggtcactgtcatatcggattgagtgcggtaatacagttctcccttggagaaccacagacatgcggaacagctacaaaacgaatgtggcacccgcacttattcgtgcaaatatatcgtttgtggctcatcggcacgagacagaatcccccaaacatcttgacctccctcgctctcaactttcgtccagggatcgcaaaactctgtgaccgtgccattttatgcagaaattgatgtcgctgtggtcgttcattgactcacctgtgagacacattacagcgatgtcctgatttgctgtgtgtggtagcagatttgtctcaagtaaggatgagtggctcaacaagccttttttagcaacagtgcgaccacagagaggtgctactaccgatttcccaaacgataagagaaaacagttgttgaatgaatatccctcacgagcgtccacgcaaaacgtgaagttcacgatgcctctgtttctacagtattctccggcaagcagtagcatgggtgtatggaagaacgaagctccctgttgcttgacacctattctcctgacgctgttcccgatctctagagcgatgctgcatggaacagagcaacaggggaccgagactctgtacataaccgaaatagggacttagttacatatggccttgactatacatgcgcttgcctgactgttgatccttgctcgcacgtatgacacagacttgggaattgccgccgacctttgtgttgcagacaattttaggatgtggctcgacactttactaaattcatttcgagagacttgacgactagccatagttttcatggctgtgaccgaaaaggagcggtcacgatttgacgacacacgccaccgacaagctgggcgctggagcagccagcattttgaagaacatcgtctgccctgacatctcctcatgcctcaacatctccctcaaaagatgaaagaatcaacggatgtgtacatgccacatatcaaaaccgagtatgacgacaggcagctttcgttcctcacacacgctattgcacagaaaatcccgagtcactgcc

SEQ ID NO: 1396 - DNA, 1450 bp, Toxoplasma gondii
  source 1..1450: mol_type = genomic DNA
ttttttgtgccggcgtctgtgtttcactttttaacctctaaagggatgagctatgtgatctgtgggtttctagcagtagaacagatctcgatgctctacggccgagagtcacgctgatgttttgtgtaaaacagggactctgttgtctcgtgttgacaactttctgctgagacggcgctttgtgtctgctggttcggtgagaccggtacatacggaaagacgatgtgacatttcagtttcaggcttctgaggaactgtgcgtatcaccgcagaggatccgacgcagaagcagcggttaacactgctgcgcggcgcctctagacgctgaaggctattgtgccgctcttctttcgaacttcgctggttttctggcatctacaaggctaggcgttctgctgctttcgagggagaaacgcaactaggcagtggacagcagttccgttgtgtcgacatgagtcagcaaaagtgcatgtgccacacttggggctccgtaacgcaatgcggggagtttacctttcatatctgtgaataagtcgatgtgaatccagcgtgtaaaagtacagacgtgaatggatcaagatgtttaggacactctgcgtgagtctccagccaagggacaacagagctgcacttgagtgttttgtttcgcacgcttggactcttggttttgatcttcagtgtctattttcaaattttcacggtctgtgtcagcagcgtgcctctccgtcggcctttagcacggggaagtcgaacagaatctcgaagtcttgccacgaggtttctaggttttgtttttgaacaggtgaaggcgtggagcatgattcgtgtccctttcttcgaagtttgtgttcgcgttcagaagaatcgagtactccgtattcttgtggatacgcccgaacacgagatgtgcttggcatgttcttcatggtgtatgtggcgcctctactctttgttaaggcaagtcaagatggaagaaagaacctccagactgtatccgaacgaagaaaggaatgcagaagtgatatcgggttccagtggcgagtcatttattcctcgtacgatctggactcaccagaaaagaaagccattctcacttgtgttctggctacaagtttcgggacaacggcaaaacgtggtcacgaatgtcgacttaactgttcatgtttaacattcgtgttcatctggagacgaagccgttcaagggagctggcagtggctctcgtacaagcctcaactttgctgccatgttcgctatagcctcctcacgcaagcgcctgccacctcctttctacctcctctttcgcgtgcctaagtgcgccgtgttatgcgtgataaaacggcatctaattcactacaatcgcgcaagcaacacgctggaaagaagcaaattttcgcatggttttagccaccttcacagaccatcactcattgcagaaattcccgctcttta

SEQ ID NO: 1397 - DNA, 2624 bp, Toxoplasma gondii
  source 1..2624: mol_type = genomic DNA
gccttcaaataaaatgtggcgagagaatttactcagtcaagaggtcccaacgttgcagcttggaccgccacattcaactatcaataaaaacaggcgcgcccgagacgacgcatgcaacagcgcctgcagactcactggggtactgggggctccactcggagagaatgtattcaattttctccaccgtctcaggtttcaaatactcctttgccactgccgccacgagcatatgcccctgcggcaaacaaaggtgagaggagacaaaaaaaatcaagaacgaagagagcgccgttgagtgcaaagcagaaacgcaactgaatgctctctagggttggttatggagcggggaactagatttcacacaaccgtggttcagacgcagtcaaaggcacaaacagatcgggagcctcgcctctggtatggagaagccaaagtacttaggagaagctggtggaaacagcacgggggtagacaggaagcggcaaggatggagggaatgtgccgttggctaagctgcaagtgaggcggtggtgttggaaacaactgaaacgactagtaacgtctcagagtcaaaaacggtacagaaaagagtgacatgcttacctcgtcgtgccaggccttcactctgttcacgctccccgccccaaatgtcaccaccgagagccagagccaccagtgcctgaggcacaccatgttgcactcttgaatttcaccggaaaacgaaggcaagattgaaaggaaatttccggcacctagagcctattctggtaaagcaaatacctgaatatcatgggataggcaccggagaaaaacgggtaatctaccgacaggcaccgtccactagaaaaggaacgactcaagcagtcagaccggacgcgcacctcaagagagcagcaaattgcggcgcagatgtctgagctcagtgtctcatgggatgcaacaagcggagaagtttagaaaacacgggaaacatccgaggaaaactcgaagaagtgtggacacttgaaagaggaactcgcatgcaggcatcgactcgtgagagacaaacgtggaggccacacgcttgcctcacgaaaaaaaaacacggaaatacaacaggtcacagaacaggcgaccaggatttgtcatgtcttgatagagatgaaacttccgttttagaaaacggacacgaaacgccaaacgtgtcaagtccgcgactgccggactgcgaagcggtttgacggccaacacgcagctgctgaccgatcgggatgagaaccgaccgagagagaacacgcaaaacgaggaggtaagaccgtgcctccgtgtaaatagcgctcgcgaaagagcgtctagtgagggaagaaggaagctgacaaaaagagtcgagaaaagacctcataccgcctccacttctctcgagcttgatcgcgagagacagctatttgcacagtgtctgtaaactgcactcttgtccaggagcctggcggccacaacccaatcactaaaaggaaaggaccctaccatcggagtcggcgccacggaatgatttctttgtgcctcactgccgcagtggctaagtgagcagagaagccacgtgaaccagctcgctgggttaagcacttctttgcgaaaagaatgcgaaaaaagttcctgcctgagcagtttgccactgtaaggcagtgtcatctgatggggggttccaacagcggggatgtgcagtcctacatgcaggcatgtggtgcatttacctctattcttgtaccaggacacactggaaaaaacagcactgcatgttcacgccttgcaacttcaactattctgtttttttttgtccccgtctccttcaatgcttctaggacaccgcattttctttgttcaggaagaaaccctccgtcgtcgtgccattcgcgacacgcggaccggccacatttggtctgcgtcgaaaaaagagcatctttcgaccacccacccgtcactttgtgtgctttaagagaaagaaggtagcgcgtttttccagcacgagaagaggacgagaggcgaatcaaaaaggcagagccagcttcccagctgacccttgggcgtgggtcccccaggtcgaccttgagccactgcagtcagcgtcgctgtcgctgttttccgattttttctcctatttctgcgcttaccattggctatcaacccttacgcgatgctgcgttacgtctgtttctgtcgcagagcgcagaaccctctggtccgcagcaagagttgagattcgcgagcagcgccttagtggcaacaccacaacacacgggacaagtttgttgacctactggccaaaaccgactgagcatacactgcagcggcgtggagctcttcgaaaccaactgcggactgtcagcgtcttccgcagtttcatttcttcgtttaccaggaccaaggtatattatggttggcgttagcggaaaggagtatccggacatgtgccaggattacctagcgcgagttttctccgcactacagtagcagacctttctcggcttaccgagttccgctctgacgtttcaggaactacatctgggttctggtccggcggcgtctgcaggagtgcagccagttcgcggcctgtctggctcctctcttcgtcattcccgacaaggaaa

SEQ ID NO: 1398 - DNA, 817 bp, Toxoplasma gondii
  source 1..817: mol_type = genomic DNA
gggaattagaggatatgtggctcgcgacaggaacttgaataggttctggagcttcctggttcccagatccagggtgggaacccccagtggacgcaaaggtcgatctggcagcatgcagacggccagttggcagcgtcgcggaactggaagccgagagccgggaacctaccccgtcggcagggctgttttccgcgagtccagtgcgttcttgcgcttccggattcggccgtatttgcaagccgttctggacaggcgctccgggtgacttctgcggacgaaacggaggagcttttcccacgatctgcggtgttccggcattcctcgctggatccgcgaggcggcaggcgggcggcgtcgcttgctggccgacctgcgcgtcagctgccccgcatgcagcgcttggagacaacagaggctcgcggagagcgcgtccattgttttccccgctctccggagcccccgaagacgaaatcagctggggaggaggaacaaagggaacgtcggagcgagactgcacgcccgcaagcgccacggagaggccagacttcgacatggagacgccgtgagacagagtgcctccgcctagcgaattagacgaggaattgcggagtggggcaccagggacaggagaagcgtcaatgccttggaagccatgtgcagagggattgccggtcggcggtcccgcgactttgggcgagactgccgagggacgcacggcgtcggagagaacctgaggtcggagagggacctgggcgcgagctgaaaggtggagcggcggatccgccatgtctcggaacctaaaatgctggagaaaaca

SEQ ID NO: 1399 - DNA, 887 bp, Toxoplasma gondii
  source 1..887: mol_type = genomic DNA
aacttcttgcgcccttcgagaatcttgtagtaccgctgcgaatacggcgccccggtgtacggattgatgccttcggggacttctccgttcgggtacagaggcgccgcggcgacggacgccgcgccgaccgttccaggcaaggccgcctgcgcaggaggcaggccacccggaaacgcgaagccgggggctcggtccgagaagcctgacgcctgaggcagcggtcccgaggagaagttcgatggcttggcctctgtgccatctgagaaacctgtccggcgccgtgcagagtcgccacgaggatcttcgtcgaaacccgtcgcgcccaaggcccgcttggagcccaagtccaacttgggcgcgggaccgtccatctcgagaggggggaaagagagaggagagagggagatataaaaaaaaactgaaggaagaagagaaggagagaagcgacgacacagagagacggcgaagaagacaccaacaggtagaggaagagacgagaagatacttgaggggaaaaaaaggacaggctaatggaacggaagaagagaagaacaggcggaagcaaaagtggatgtgagacaagagtggcggaagagagaggagctgcgtggacgaaagatctaaaagtgagggggtccgcggtaaagaaaaaagagaaactgagaacaagaatgcggagaaccggacggaggctcggagggaaggagccagagaaggaaagcgttgaaaagaaatcgcacgaaaactgggagtggcgaagaggaacacgaaacctgatgtttgtcttcgaaactccgagccaagtgcaagggaaacgcaaaggaacacctgggagagaggaggccgaaaaaacttttttagaaaggtggaaaaccgaaggaagaaaa

SEQ ID NO: 1400 - DNA, 4354 bp, Toxoplasma gondii
  source 1..4354: mol_type = genomic DNA
aaaaaaggaagtgtcctttatggacgagaaacaactccgacgatctactcatcaggatgaagacgttttatgagcgccgatgcagttccgcttggagttttgttaaacacagagattcacaaaaaacgttcagtggcactaaggaaaacaactttggaagtgtttctacgtacgctgggaccgacgaacaaaccatatcgcgagacgctggtggaatgtggcaaaacaaagcatcctgtcacatcgacttccagcagaagtgcagcggcgtgaatcagacagtgcggcggacaggagcgttatccaaaactgctctgcttagacatgagacgttccgtcgccagttctcaccaaaatggaaccgccaagggttacgacggcgtcagacttgaaccggagaaagggaacgtggcaaggcaatcaggaccaagcagaaagggcaccgacgctgaaaatggaactacaacatgcttccggtatgacaacaacgcgcacctagagggtgccttttgaactcaagaactgggcgcgacagacgatctgaagccaaaatagagaccccactcccacaatctagtttccgcaaggcaaacttaactaatgaatcaactgtccgcatgtccctgtttcgatcgctcccgggaactccagaaaaagtcgctttagaaagggaaccggccccctacacgattcaaaaaagtcatttggcagacatgtactgaatccgagaaagcagcgactctgatctctgaccgctgacgtgtgtaaaacagatcttcgacgacgcaacgaaggcactgtgaaaccgttgcagtcgggcacacatgcaccacaactctcacacgcgctatgtcgaaaacataaaaagccagcatctgcttttccagtggacggcgacggcaattccgacgccgtgagtttggagaagccagtaatttttgtttccgcagacgatgaggactgatacgatcgtgagactttgaactggcagcgaaggcacgatgcctcgtccggcaacgaagtgtcaaaatggcacgtggtggatggagggaggactcgataaacacgcacaaaaaattacagcggggagcaagagcagcaatgaaaaactaacgcgcaacaagcagtagtgaaagccatcggagaaaataagtttgctacgactagacaggaaggtcccgctgtgctgcggcgtgggagctgctggacaaacagctacataaaattcaagaagagggcacaccacaggctcgcgaatctggaacagcatcccagatccagcagaacgaggacataaacagagtgtacctgtaccaggccaaaaaagcatttccactcgtgaaatcgttggtttatcaacggcggaacactttccctgttgcccaccttgcaccgccggagcaaccgtctacaccctgtgctacttaaatggaaactaaggagcggcacatactgcatgttcacctccttagctgtcggcagcccgagactacgaaaaaaaagcgtggccgcaacaaacagactcaacaggcgtacttacatatcgcccgcccagtcaggccgctcgcaaagcgcgaagggctgaagccggcaacgagctcgctgaagtgctcacccacgcactgtgaatcacgccgttgctcgttgctgagtgcgcgctgtgacgctctcttcgtttaaatgccgaaactcgggattcctgcctgcgtgtgcgagcaaggaagtgatcatttgcattgattttctcaaggcaagagtcctaacaagctcaccaacccttcctggaagaacactgagctgtgatttctttctgtttcccttggggtgaccagccgcccgccgcgcatgtacaaagcgcggacagcacagcagcgtcatgtgacacccctcgagtggaaccaggccgaagtctcctctgagcctgagcgaggctgcaagcttctaccaggtttgactcgtgagcattcagtgaaagtgaactgaccaatctgagtatgccgcagcgactagttagcctaggtgaagggcatacacgtgaatgatctaaaaagtgccacggagccgccactatgcctagctcgatcatgcgagggacagccgcgtttgtcttccacatcgcgcagcggatccacagagcgccctcgtacgcgcctacccgccgccgacatgagtagccaggagggcgcgaattcgaccgtgttaccacgcgaagagcgaaaccaatacgaagggttctgtctggcaagatagggccctacgcggctagaggcaggccacaaagaatgcacttttcaactagtcaatcccacaaaaccagtttcacgtttactgccgtgacatgtgcttgggaacaccgaatagtctgagctgacactttatggaaatccgtccccccacgacactcatacccggatcggggccctggctctcctgcacggtcgattgcccggggtcaactccgatggcgaccggaaatcacaggcgcagcgccgttgtttgaaggaacaagtaaatgacacaattcctgtgatggtgtcgtacaaatagtactatcaatgcatcttggatgcagacgtgttctttctcgtttttttttctgtacgggttctttccaataccccagcactcgaccgggccaatcgttttctgtgtgcctggaggcttgtcgacgggttctaatgaaatccccatgcctgaccgagttgcgtcaggaggctccactcattcgtttttttgagttacaggagaccatctagcttgccctctgatgccgtttcagtgcgtggccatcttacgggcttcagcagcaccctttcgtggctcatgagcatgtaggtatcgcactctacctatcaaagatccgtcgacgttcatggctttgatcaacccgagatgatattccacctcactctgcattcagcccctcgggaaactctctgttacgttggcatgacccccttcattctcactatattcgctgaaagttcgctgtcagcttccctttgttttgacgtgaaaaggcgaggtaccacggcgaggtgaacgaaccttgcttcggccttcaggaaaagttccgttccaacgacaggaaaatcctagcgattttccattgaagacgtccgtgtttgtcgtgcctcttcaagctgttggagttcgtcgaccgccagagtatccggtccctttctggacccagggggcttccctgtagagacacacgataaagacaagttgctgtagaccaaggcaaaatcggaataagccattgcgaagtgaggctttcatcgctgcaacatccggcaagacgtgctgcgagctcgtgcagaggagtcaaattctgtagagttttgggacctcagctcgtcgaaggggcatccgcggtacgctgaagaacaacggagctgccggcattacgatacgatttagctggtagactgttacccccagcgttacagcatcatcgttgttcagtcctttccgacttaggaccgttctctcaacggggatgggcgacggtgcacatcaccgcgcagccgagacgtgcaaccgtatcgctttactgagtctctcgtgtttcaacaaaagtatttgtgtgttcggagtatcccctacaaagcatctgcgatgagagtgtctctttgactctaaaaaagcgagttgaggccaaaaatattcgctctggttccacgtggattacacaagacattgagtgtctgaaccgcttcttctgggtgcaatccactattccctgtacaccgcggccgtagccaattgtgacctgaagaacgatgtacaagtgtgatgcgttgacaggctgattttttccattttgaagatcaagagtgccaaaacatggcaagcatcctcatgcgtatcccgacaactattatcggtcacgctcgcatattcctctgtcggtgtttcgggatcactttcggcagccgctggaggattagcgcactggagatttcacgaagtgtatacttgctggtatcgagctcttgtttgctttttcggtggctttatcggcggaggatcgttcaggctctaagtcaatacagtctcatctggaggtcgagcatgccgcgttaaacctgtgcctgactggaattgaattcctaccgatactgtaaaggaccaaccgtgttttgctttgcattcgagttttgtcgatactgtacatagttagaaggcatatactcgattattgaattcctggcattgtccctaccacaggtatgttactacatcatcaaggaaaccattccaaataaccgtcctctacaaagagacgtggtccactcgctgcactggcttccatgaaacaacgcggatacgtggagagacaagacaaaca

SEQ ID NO: 1401 - DNA, 3514 bp, Toxoplasma gondii
  source 1..3514: mol_type = genomic DNA
gagacactgagagctacatcgcttcgcctacttctccgacgaatcgtccgggtggaatcctccgaagccaagatccttgcaaaaaggcacgtcgctgacttgttcttcgcgtcgccacccggcgcggaattcttccgcagtggttggagcataacgaagttcatcctccgtgacgtctttgccacgatgctttttcttcctagttttcacaactgacatgttgccgacgaaagatatcccctgtggtgcgtgcataaagtggctcgaagctgccggactccctgcgtccggactctgactgacgcctttttctctaatcaaggcagccaattcgcgtcttcttccgcgttcctccgctgcgggtgcggtatcctggcggcgaaggcggggtaatgtaatggatgatgctcccaagcctttgcctgatggtgaatcgatgaggccatgcgactccttgaaagagtcggtcctcgttacagcatcggcgtgaaggaaaggacttagagtcgcttccctcggcaggtccctctctgtccccaaaggcctcactgcagaaaacgtgccgccatttgtcctgtggacgtcagatatcgcattactcagcgtttcactggagacatgaagactcgatgcgccacaaaccaccaacagagcgaacacgcagaccgacagcggtctactgccactggaggttgtgcccctttgaaaaacatattttgagcttcctcccatcactgcgctgagctccctggtacgacggtagcacaggaaaacgttcatagcacctccacgcatacacctgagtaaatgctgagccattttctttgaaacattttccagaccatgcacgacgtgaacagtaagccaccagggtcaccggccgtcagacaacagtccgcatctgctgtgcatcatcttcgtaacggatggtcgagtccagaccctttgaagcagaggtacacgagagtggcttgcaaaaaactcaactgaaattgtttctcttttcaacctgatggatgcaaggagtttgtgtgggatccgcatgtgacgtcgatagagcccccaagtattgctagattgttgcaactccgcggcatcctgttgcagaaacgcaatggcgacgaagccagttacgaaacatcctccagatggcagagcgcgctacatggaacttgtggaggaagtcagggatgttcgcggtgccagaaggcgaagagtaaacgtgcgactggaggcgacggaacgtcttggaacgggacaccagctttatgaagagggcaacttcaactggagtttccagcgtcactcccgtcctttggttgaaaaacttggtcctctttaaaagtgaacctggaacaaattcattcacatatacgtatgcatatggtttgtttccctacaaaagatttacggcgacttggccacttgactcgagcaagacagttaacgacgcagacaccgtcaccgcatgtacggctagcctccatggttgcccgttgccagttgtcgacgaaattaaccaaggcttttcggtgaggattcgaaaaagccatgtttccagcctactagtatacaatgccagtttcctttactggcgttgccgagcttcgtcttgtccaaagaaacgtcatgattgtcggttaattcgactgggctgtgtcgcacatcaccattcgctaacggcggcccatagcaggttcgagaaccatgttttaaccggtctttcttttcatttctagtcaaatctctatgatcttacataatgtcaggcgcttcgctgttacggaatgttcagtcacgatgtttcgcccgtcggtgttggagacagaggagatctagtgtctacagtttcactgcgctcctggaaggctcatcctcgggattccgcaacaaagaaggagaaaagagctgccagtcgtagctggtttgatatttccgccgttcggtaaatctcagacaacacattatggtttcactgggtgagtgggtattttgtaacggtacgctgccaacgttcacagccagagcgtgatatcgaggtgtcattcgtgtcagttttcgagaggcgggtcacccggacggcacgtaacgacgtcttaccttggcctcttttgctagttcttcggcttacttggttttttcgcctacaaatgtcaattccatgtcgatgacatccatgagggcacaactttacctgcgactgaaatttctgtacaaatgatccgcgatccagaactgtgtgacacaggaagaatatacagacacaaagaacgtagcagaaggcttgacagtccagttggttggacggtcgtcaaaacataagcacaagcatcgcggaggatgagtgttttctttaaatgtcacctgcttcttttaggccagaatcagttttctacagttcgttttgctgcgctttttaggctgctggtttcttcgcatcactacagtgcattagtcgccttgtgcctttgatgtaacgcgggtgtctactaccattcattgttttagtggagctttatgtcttgatcgcagcaggcacagatacaccgagtaagaagtactcgtctggatgtgaaatccatttacctttaagttgcaacagagacaattattattgttggcacccacaacggctgcatcggtacttctgcatctgtatgtgagtcaatacacgcggcatccatgcctgcattcatcctctcaaacctgttgcctactcggaagtacagcaccaaagaagcacttctacgcctgaatccatagcaacggtccagggaaaagaaaaacccgtggcgtgtgacacaataccgcgtccctgcgcatcgctgtctttgccgacgtctttgtaaaagaacaaaactttttcattcctctctccttgctagcgaaggattaaaattcgcctcgcagccgtggcattaactcttacgtgttttctctgcaggagtctgatgctcgtgaatcctccacttttgtggatctcgtttaacgttcctgctatcgcactttatctgaccccaccaactgtgcaaggctatccaaggtgcggaaagaatcaggcctgaattctctgtgaaatacaccaccagacacggtatagctgatgactacgtcggttctttgtaacggcctgcatgctacaaatgagtgattccggggaaccaactacaagctttaggaagctcaaaatgcaggtgacgtgacatggtgtcgacctcaggggcaagaattggccttaccaaatgcagtaatagagtggaacacgcacttgatgaacgggtgagaggcaggaggaatcagcgcttggttttttccctaaggtgacccattgcgctgcattaagatctcagtgattccgcgctcgcataggcaacagagagggtgcatgcctcctggctttgcggtagacgctgacagttctttagccattccagggacagtacaaggattaatgatgtccacatgtacagcgcaaacaaggacgtgtcccttatcgctggtgcaactatttaaa

SEQ ID NO: 1402 - DNA, 1943 bp, Toxoplasma gondii
  source 1..1943: mol_type = genomic DNA
agagatactttctagcagtttttcgggctattcttgggtagaaatggcgagacgaccgacggccgcgccgccgaggtgactgttcgttgatgagaatcttttgtctcaacggttgccaacgcatttctgcaaaactgtgcccaggagaacagctacgaaggccgatccttgctttctagtttttccgcacttcgtgttaagcccattaaacatcgtggtatccagcgtgcgtttgggaatccactgctcctaaatgtaatggtacacgctgtaagcaaaaagctccataatataaaatttttgttgcggtttgagttccagattttagtagaaaacagcatagacttttcccagcaacactgcatgacagaacgtaaaattccagagaacggcgacagatacacattgcttttacgcagacacgcctcaagcgtgtcaaagagtttagcagtgcggcatcactccagtggctcttcaccggcaatcaaccctgcacccgttggtggcttgtctacatacagtcgccttcaagaaaacgcgatgggtgcagggactgttgcttgaagattgccttttcttctgctacgtccgtttcaaagagtgcaacgaaaggctgtctttcacgtgcaagagttttcctttcctggtaacgagccgtttgtcgaaatcgaatagcacggaaagtctgaaagtgctaggggtatcgagagtttcacggtgaaaacgtacactgtgctcgcgcgacaattccagcactgtatcagttcatcgtgtttttgatttcgcaagtcactattcaggccaaatgttcatgataagttcgttaaggaaagacagaggcccggtagagaaacacattaagtggatgctgttctgcttgttgggatgtttggggcgggcatgcgttaagtttaagaggttgtctccccgagaaaagaaatggggtctctgcctccaagtaaagcgtgcactcggtttagtagttgaagtctgtggctgtgatcagaaaggaacattcatgttggcattcacggagcaactcgagtgcctgtcctgccctgttgaaaagcactattcactgctctgtaacttgtgaaaaaagtggagcacactgcctcttctaacccctcattctacacggtggttcaggttgaagaggaattgtgcttctcagtttcaaaagggaaatgtttccgctaaaagtgtggccttctgcaacttgttgtgttgtcgcatgcatgctgtgtggcagcgccgacttctcgcgggaaaagtctgcataccgtcgcgttttggcaagactcgaaagcgagacttccggtctccgtgttctgcgtttctacctgtgaaggggagagaaaaaacgaacgacggtggcgtcttctccttgtcgtgatggccgaacctgcgcggaaatcctctcttgctgcttcccgtttccctctcgtgactagtcgatttttctggggctttggccccgttgaatcacgggcccgtgtccactgtcttgccttctgtgcgcctctttatgcgcctctgtatcgtcgcctgtcgctcgtttccctcgttttgtgatccactggtagtcgcttctccactgacttcagacacagcggcttctacggggctctcggttgctcagagtctcgacgcagtgaacctgcgatcccaggttctgctcgcttcagcctatgcgagttcgtatttatctccttctccattgctaccttatgtaatcgtttctcaccgcacgtagatgccttctcaattcacaagagtgtggagccaagaaatgcgctccaagacaggcagagatgcacataaacaagcatatacaaatgtatgtgtacaaaactgtatgcgtggtttctaaagcatccgcgagagtttctctccaggtggatgcttttgaacgggttctgccctgaataagaattccacga

SEQ ID NO: 1403 - DNA, 3648 bp, Toxoplasma gondii
  source 1..3648: mol_type = genomic DNA
gggatgaattgggaccactaagtcgcaggccgtcggtgctgttcgttgagccccagtttccacacagcccgcttcttgtattgactggtggtaaaccgtgcgactgcatgggttttgcatcgttttgtgcttgatgagctctattgccacctggttgcaatacatcatccgaccgaagtaagtccaacatggagctgaggagacggccctgctgttgagcggcctgttgggctgcagctgcctggcttgcagtgtgagaatcgagacccatgctctgaagctcgtccttgagtcgtgtaaactcggcgactcggagatcatttactgcgctacgagcacatccgcatctattgcaagccctacgcctgggataatttatattgctgcagttattgcacctccagttgccaccctctcccatacgtggtggttcacgggcattccctcgaaatgccatcgtggaaccaccgtgcggtgtgccaggcatgcacggcgtttggcttctgggaccgctcgtccccgccgcacctgaagccaccacatcagatgaatggaaaggacccgtcccaccgacggtggccggtgtgccgttcagcgacgggatcataagggaggtgagatcctgcaatcctgcgtatccaaggccgatgggtgaatctctcaacagggaagatccattagaactcgccccagaaaacgtattggtcgatccaatgttacctccaactgagtcattgcccgaagatgcagccgaaatagcaagaggaatcaagttcatagccaaattgtcgtacaacatcgaagactgctccagttgatctaccccgctgtcaccacgactatctgaagagggagccatacacgtttcgctggtgcccccaagggcggggtgaaacgatggcgctccagataacgtctgtggtgtgcttattcctgataaaaagtcgccgggactttctgcctcctgtcgagcatgctcggaggttttttcagaatttactgttgccaacaccgtggcaccaggggcctgagaacgccctccataaccttcctcagccacttctggggacattttggacgggatttcacttcagaacgaaatgagcctgtttcctagggagggtgaacctgaacctataaacgggcacacttgtgctgggaaaaggttatctgtcttcaacagacttcaagacgaggcgcggaaacaacgatcaccgagttcatagtacgcttgcggcaatcacacggggtctgcggggaggagggggcactgccgacgcgaatacaagtatagccttccctcttgccacgggttacttagggtcagcaacctacacagtgtattcgttgtaaataacgctccgcacacgacaaggaggcataacaattaacagggacctggatgagcggctggcataactcgagtaccacttcagcatcggcacaagtccagaagcttcccgacaccgaccacatacaacataaacctgttacaggctgtgaaacacacgattacgctgtttgtaccagactcttgctcagaagcagcaaacattagcaaacgagcaaccacggtctaccagaaaggacgaccctatgctagtcacttgcgctgaacaggctccagctgcaaccatacgtaacgcgcacgatgacctaagatatccgtttgaacggccggtcgcgcacgctataccggtgatatacctgttggtaagacagcgccgtcgcctgtgcccacgaacaatagaatgccaacaatcgaagcacggttttctccccccgcggaaagaggactgcaatggagctgcagtccaaacgcaggatttgcggtcgaagagacaacgcgacaatcgaccgaatttgcccagaaaaaacaggcacgaactacacgacaactttattccctagtcttctggccagggatacgagatcggtgaacggagacccactcagaatcacctacggtgtagtaagtgcggggcgcgcctgcgggacgggtactgagggatgtagattcaccaaattaaagagggccgatcccggtctttccaaacccaacacgaacgctgatcaaggaatatgcagcaggtgcaacttccacttgaggaataatgatagagccacgggttacgcctgacgtgcttgggtcatttatctcgtacctgcaccagccagcaaaatggcgccttcccatcatcccgcgcgtctgtgcgctggtgacaaaacaagaagtgcgatcggcaatgccatccacccttctgtcacacttccattgcctcgatgcccatagaactcgatatttacttggagaaaaaaccattccatgccccgggcgaaaagaatcatcacgcaacacaaatagatggcgttccgtccctccggcctcggcgtgtctccagaggcaggtaacctgtagtaccgctagtccgacacaggagtcgactttctcgttttcagaaatgccgacacaatttgttttcacccgatttcatcacttcccactgcttacttgacaaacacgacccttctggcaggcatgcactttcggacgggacccggctgcgcctgctcggcccgtccttgcttccataaagccggcctcacgaacgactaacatccgaagaatggcgttcagctgtataagcatggtgcagccggaccgccacccgacgtcggtcttcgtggagcaaatttacactccctagtagtccactatgccggagggtgagacaaattcctcacatatttgcctcatttgtccttctcgtacacgctgcccagaggggctgcgaccgccttgacggagcctcctcaggttggtggacagcgaggcaagttgaccacgcgcgcagcggccggccggcagcatttggtggtggtagccagccgtcttctggcaggggctgctgcttgattggtcttgcatgttgcgcgggagcatcgctccacgagagacccgccgatggggtccagcgagcggggtttctatatcaaccttaccttgaaagattacagggctatcccgttcccacatgtcggccgtttgacgccttcttttgatacaagccgtctccgccatgcgtgaaacccacgcagatggtttagccggggcggacaagcttcgatgtagatcacacggggaaacccgcagccgtcatgccattccttctgtagcatgtatagcaggcactagagactcgtgaagcctcctcccgcggcgccatgagcggggtcacaagtagctagcatgctgcgagcgaagcgatgagcaatactttcctgcgcgttcgagccatgtatcgtgtgcttcacttccctttcgtgctcacggcggagtcgaccgcgcttggcggagggccagaaaaaagcagctttttccctctgtgctcaggaaactgatttgtcatattcaggtagaagtgcactatgttccggccaggatgagagacaagtatgagtccgcgttttcatcgagaagctgtgagatactcgcatctctcgacgtcgttgcttccccttttcactttcctgacttccaagactaggtcgctcagtgggatttcaacttgatttgcccgaacgaaccaattaactaggcggggggaatctacaatttgagatcggcattacctgtggctggcagta

SEQ ID NO: 1404 - DNA, 4076 bp, Toxoplasma gondii
  source 1..4076: mol_type = genomic DNA
gctccatctagaaaacgcgtataataaattcagtgaagattacgtggatatgctgtaccaccatatgtaaagtcgtcacgcctccacgaatgccaagaagcatggagaaaaaaagcaaaaagacacttggagggacggggtagaacggagttgcgaaagatgacgcaccttgtatgggagaagtgtgtggcgatccggtcgtatacagcgccaacgaactctctttcgagctcttcggtcttgccttctttgagaagctgatcggccactgggtcgcaaactttctccctcggcggcattttcacacgttccttcttcttcttctccttcttccttctcggcggttcgcttgtggtcgtcctccctttttcgatgtcttcgtttcgtcccccttcgccttgctctttgtcgtttccccgaccaccgccgacacccggtgactcggcactcgagtgtacagacgctgaccgctcttgcatcgccgctggaagctgtgtcatctcggtgcggttccttgttgatgttttcgcactcgcccatcgatagttccacgaccggtttaggggtcgacaacaagatgacctttggaaggcggatagaggacaaggccgaagcttacggcggcagccgttcagcgctcccagtatcctctagacgccgaaagttaagggcttcgtttcgtcattgtatatgtctagccgtgccgtttcagaatcggtcgcagctgttctctgcttacaccgcacagagccaagcgagactcactcaggacgtggcagagtcgacgaggtctttcccgtcgccagaaactttagaaacttttgcgcaatctaatggctcctacagatcaattgagtgaggatgttcagcggaatgaaggtcgctcgctcgcaaagctcatttcgggagtgtccattgttgtggaaagatgcgctgcatgcgcgacgtccagcaaagaatgcggggagacgtagacgtgaagtgagcctccaggaaaagaaccatttggaaaagccgtcgcgtggaatgggaaaaccaagaggggtatgttctccgaggtgtctgcaattcgatagacgttagccgttgcccaaggacttgcaatttttttccatctgcatgcttgtctcgatgagtttcaagcatgcagttctagcggagaaacgacccgggtcaacagcgagttcctttgctaaaccgacgtaccgcagttttttccggtcctcctggtaaggatctgccattgacactgcgggtgattcgagctgggtagacgacaggtttaacgtctaattcttcgctgcacaagagactgtcgcttctattggttctggtggccgtgctgtgtttaaggaaaggttaacgtttcgctttcgcactccacaaggtttacaataccaatctggtagcgcgcagcattcagcttgctcagtactcgctgcagttcacaccgcttttacttcttcgtaggtgagtgatgcgctactacaagaatggcaaggttatctgttcagacacgaagagggaaacactctgtctcggaacactaatttgcggctgaggacggcaggcttaccgagtttgcagattggaccctctcccccatgtgagtcgatctctatgcggggacagcgtgacgcgtgacaaagccgtgtacacacgcttgaccaaatgctgtgagggtggtaggcgatgagcgttgactggcgacagcttttgccatgaaaaatatcgcttgtaaagggcctgagttcgtgcgtacccaccaggcagaaacttcaatgcaggaatccatctgaggtatctgccgcttgaaagagttttgcatcgaactacaggatgaaatagggtcatcgttttcagtcgcgtgaatctcagttcagaaatcggtgcccgttaccggtttttgtatcaggacttgccgcgtatggcatcccaccatatgtttgtaaccgttctcagaacatgctggatatgtatgcgttaaaaagatgcccaactaaggcacacttcaatctgcactaacgactggaatgatatctttgaatccattcaagtatttataccgttccttcttttatgcactgctctacatccaaacactcctttaagggtcaaagatcagctagggttgcggcagtacggtgcgttcacggtgacttttttactagccgtcataggacgtgacggttggtcttttctgtggcaggtgcgggcggataccgcctgcaagagacagtcgttgtgacgacatcaaacacactgggccattttggttcactcttatgaataacgtctctgcagaattacggccgcttacttcttgttctcacggcagccgggtgaccgagaaagttttcatcacccttagtctttgagtgtatatattcaggcgaacactggcttcaataatcgatacgctcctgtgtttcgaggaggctggaaaagcaagttagcctaatagactgtgttgaggaagcatgttgttttttcgctgagtctcttgctgttagtctacaatgtgcttgtagaatctaggtgacagtcacacagtcacaggctgataaagctcaggaggcgtcggcttttaggatgcccttccaaaaagccccaaaagcgtcaccgttcagcgcactgccttcaaggtgaagccgcgcaagctcctctaactgatgtgtgtgccggggaaaactcgcgtgttgcctccgcggccactcgacttctcgttatttccaaatcgggcagtccgctacaatcacactcgcttaccagctactgtttccactgcagatcacatttgtttcatcttactacctgccgggcgtcgctcccgtctcagccgcgctatctatttcgaacgacggcgctgctttgtgaacgtgtcatgtagtcacagtgatgggcctgcaacgggacattagaccgaacctgcgatagattgaaatggtgcaaccgctaagcctctctttcttgcgtcggtaaaacggctgtttgtcaatatcccttcaatggcaggaattaggttttgagaacccagtaagaacgccctgcgcacatccatatggcctttaaaatccgaacgagagaagcatttggctgtgcagggcacaacgtcttcaatatcagttgtcttttgggaagacggggatcgagtttgtagatatgttttgtagaattcgtagagtcgcaacgtagacccgtactcgtccacttcagagccgcctctcaacgttcaaagaagtgttccgtggttttctgttcattccttagtcacaaaaggcagaaaatcgtgcaatgtgtccagtgcggttgcatcaaaaatatcaaatttctggtgtgggggacaaccgtgtagtgttctgtgttttttcatgcatgtgcagcatgccacagtggtacgcaccacctctgcgcgtttccgcggcggtagtcgtgcaagaacctggcaggcgaccataaaaagaaagtgaggcccctcacaaaatgcctacgatcctacagcatgacatacattatctccatatctgtttcgcattacgtggaaacaaatttcctttgccctccgctgtattccacctagaggaagcagagacgtacatcgaattgtacagacgctggaactactttctcgaacctctaggggtaccagtgggcgtacgtattccggaatttgagtagctttcagaattcaataacgtctgattggcggtcaaattccacggaggttaaactgaaacagcaatcaaagtacagttcgcagaaccgattattcaacacaactacggtttttctgaaaggagacaaggccgcatctgtcaccgattccggttgtccaagtcctgcataacctatttagtgtagacatctcgtcccttaatagattcaaacgattctacggaccagaaaaaagaacgtcgccttcagcatgcatgaggacaatctatcgggcgaggaagggctcgcaggccccgtctcgtccgtttttagcggatcccgtgaaaccctttgtgctcgtgaacacacaacaactgactctgacagtcaggcaacatcaagtaaccaaccattcgtagaaa

SEQ ID NO: 1405 - DNA, 1828 bp, Toxoplasma gondii
  source 1..1828: mol_type = genomic DNA
caagattttgaaagagcagatcctgacgtagagtgtgttttgcgaacgtactttcaaacccctgcctttagacgaagccacgagttctctttaaaagttttagaaaaaccgtttgacactcgaatttccgcggctgtcgatgttcatagtgtcgaagaatgcgagagaggctgtctcttctatctagggggcgctccgcccgtagaataagggcaggagaaacgaggagggtgagaacgaactctctggaagcagaaaacagtttttcggactctttcgtctggaaggaaacatatccgagacgacgaccctctcagcgtgaagtctcagaggccgagccgagtgagtgctgcttaatggaatgtcgccgtgaaaaactcggatccattggaaacaacactgtgacacatttgaactttttctgtggacagttttattctctgcgactggaacgacaccctggttggcatcttggacgcctcctttaccgggatcaagttccttgtttctcggcaagctcgggaacctcggcagagactactcgacccctctgaggaaggctactcaggacttgacacactgatggccatatagtgagatccttctttcttcccttccccagtcgtatcgctttggcccagcagacaagaatcctcgtcggtgtttgcgcttgaacctcccttccgttgtctcaagcagtccactctggggtctggtgtattacagcaaacataaaaaaagacgttgttgtctgtacctctctcaacaggagttgtgctcaataccgtaggcggtccgacgtctctgttcggtcggtggagttgcctgttctgaagcgttcgagtgtttaaaaaacgaagacgactcaccgaagcgctttactggggttcctggtcttttcgttcaagcgacatttccatgcttcgcaggcaggccgggacagaccacccgacgaagccgagatcaggagcgtagaggaagcgttttcccccgaaccaaaagagagtggaaagtctccgttttctccactgtcaatccaagcaggagaactttccacctcgttgaaaactcgggagcactagaattttctttttttccgaatttttcagcgaaaacgggtgcttgatataactgcagagcgactgcgcgagcaggaaactttctgcttttcactttagcgaaaagcggagcatttcgcttctctcgaccctttttattcatgcgcctcgagcttcttggaaagtgaagagcctcgaaagattcatgaaagatgcatgcttccgtcaacagggagcgcttgcatgcagcagcttttctcctcgttccgcgtttgctctctctgtggggctggaccgtcgattcattttctctcggtcgacacggttggttcctttcttctctttttttcaggcggaagcaagtctcttctttcctgttgcgtcttgacgtcgagaagacctctttctcgactctgttgtctcttcactcctcgttcctccccttcctcgccgctcttcttgtctccgctacctcaaatgctgcaagctcgctgctacacaaacgcaagacgctcccttccttcgttgtcttttgtcaaagtgcgtctaaagtcttcttaccacatcctctctgcctctccctcgagagctgttagagcactccgagcttgttttttcctccgcttgtcacttgcgcttttcttttcctcacctctgctgcctcgtctgcgtttcctgtctcctttgtttcgctttcttccacctccttcctttgattctttcctttctgtctctgtctccgcttcctcttctcccctgtagatccaaga

SEQ ID NO: 1406 - DNA, 3906 bp, Toxoplasma gondii
  source 1..3906: mol_type = genomic DNA
atacaaaagagaatgcctcgcggcaagcagagacaagacaagtggcacgtcaggctgacgagcagaaagcagcaggaaatactgacagacatttcgaagacgagggggacacggcaaactctacttgtaataaaaagtgtaggaaggagaactcacagcgtgaggggtccttttcgaaaggcaatgcagcaaagtcggaggccgataatgctatgtcaaagacaaaagcgaaaggaggtaccagactgtcaaatcaaacgttaatcagttcgttttttcgaaagaaacactgagtgtgtaactcctctagtgcgttttttggaagattcggtatgtggattgatgggcagtggctgggcgggcattcagaaactgagtaccgagcaactgtggcaggatggcatagggaatcttactcggtgcttcgtgtttgccgagacctgtgaaaagttgatgctcctgttatggcgtacacatgatcagaaccttgcacctttgctttggtgcttgctcgcgtgttcggtaggaacaccacgtgtgtaagccgtggacttgttcttgtatcatgagaattgtgttgaaaaaggttttgatatacgatgatggactatagggggaacggcgtggagcgccggcgcgcgacgagtgttttcagatataacctaatgtaaaagggttcattttctgttggaggtctcctcgtgcgtaggagaccgatggacgaagttttgacgccgagtgtgttactgcgcttgtttggcgcgcgctgcatggaatgcagttctgctcacgctttttctgcatggaatgctgccgcgttgcaaatttgaaactactcgaacgatgggaggaactgcgttctcatctgcacaccccatctagtacgaaaagaacggttacaatcgtaacttgttacatactgaatttgttgcggaaagcccgaaacatgaaatgaattgcggtcggtccacatacgactgccacggtgcgatggaccggttctagaaacggcagggttcgttctatcaagacacaggaaaccgtcaccagtcatccgtagcagcgcgacacagtggttggttggagacgtttgtgatattgggactgtgttacaatgtgagaaaaccaaaaagaaaaacaatgatgatgtgtaacgatgatgcctctattgtcagccaccgtgaagattgaaaaaagcagactgccaccagccgagtacggtagactacagaattgctgtgatcgcatcgacataaaaaactcgcgtatacgtagatgaaagaaacctgtgatttgttgaagacatgcggctcttctccttgcgcccacctcaagatacttcatcgaagtgatacggacggttgccgagtttcctgccacggctcgtaccacaaaagaaacagattaataatgccatcctagagattttgaactcgctgtcctcttgcactgctatggctaaacctgtgccgtgctctggcctccgcttcagtttgtgtttgccacgtattccagtgtcatggagtagaacatggcattcgtttgagttacttcggacagagccgaacaaccgtctcctcatgcgccccccaaaaactcgagatgaaacgcttggttctggtgcgctctgttgaagaaggtgctggaggccacccaattaccaccatcaatagcgaaagcttccgtcagaacatcgaacgcttcatctgcttctcgggaggcgacgtagccaccaccacggtcacaattgttcaaggggttagtcgttatcattcgtccgttcgtccgtggttgctagaagatgtgtcgcctcactgaccgacggtctccgaagccgccgcagggcgagttctggctgcacccgaatcgcggaacaacagcctgcatctctgtacccgtgtgacgcgggcgcctctaggttgaacccagcattggttcggcgaagcgactgtaaggaacaaggctggcagtcagggaaagggtgtcttgcgctgaatgctggatcttcggaacacgatgtgctgaacaatcgtgaagttctcgcactgcttggctctcttgttccctgtcactaccgtttctgttgttgttgttcctgaagacgtttcgccttctccctcttgcgcttgtcttccggactttcttcgtccgcaccaagaaacggtgtgtcctcaggcatatgtccagcatatgcttctttctccatgcgcacgagcttctgttgaagacgttggagtttctttttgtaacggcgtcgttgcaactgggtgaggccgacaccgattgcgcctgcaagactactagcgatgaggcccatgttattccgcttgtgcactttacggtcctctcgctcgagaaattcgccctttttgtttgccatccaatacactagcatacctgcggatgccaacgccatgctgacaatggacgcagccccagcaaagctttttttcttctgcagattcttgaacttctgtaagtctttgataactgcaggacaacgtcgcatccgatcaagcacattccacatttgacaataggtaaaagagcacgaacagtctgtgacatcgggcggtttttcggcttctttgcctcgaacacgtggcggacgacttgtaatttgcagccctgggtggccagatcgtcctttatacctactcttgggcagttgaagcatcaacagagaaagcgaagaggcagcaacacctactttacaaagaaactccacagcggcattcccattgtcaagcgagtactggaacacttacatgcgggcgattcttctgggtccaagtcatcatcttccgattggtactgttgcagaagtttttttctctctctgtcagctgcacacacaccagacccgcgcatatccaatttcacatcgaaggctctaagacacaatttttagcaagcggcttcttggcgtccgacctccgtgctactaaacgtgtccacagcagaagcgtgctcgaacatttgaatgtttctaccgcagacgcaatcacccagttgctttcaccagctggacacaggaccaccactgttactggctccagagttcaggcaaggataaaggtcactaggatgctaaattccagcacctttcacctgtcttacgcagtccagtgtggtggtggtgcagagacccaagagaactgggctgtctgtatcccgtatgtggaaccgcatttgcgcctacgtttcgttcaccacgaagaaacgacctcccgtgcctcccgtactttgcccccaaagtactctccgttcgatccctacctttcatcttgcggtattcgcggttctccgaaagaagctcgttcatcgtctcgagaagctttgtctgctgctctttgcgcatcttgcttcttgtagttttctgtgcattttcttctccatcctttgcgtcgtcattgtcggccgttgtttccactgattgctgattctttttcgtatttgctgcctctctccggtccttaataacagaggggccgttatcagtcaagtcgagttcttcactgcctcctgcgccttgctctgtagcgacatgcgctccggaagaaggaggtcgcgcagctgccacactaagaaacaagattccgagagcaacaaggattgcagctctacggagtaccgcacaccgcacccgatacagtgcccagatgttgggttttgagccgttcggggcctccatggcggcaagggctgaaccggaaaatgaggatgtatagaggtagtggcgatgatggagtcctgtccagctgtgtggagatcatattccgcagttgggtgtgcactgattcttaaaaactagaggcagacatgcaggcgggcgcgagtggagccacagttttcttttgcccgaaatatcgaggcgtccctgcccgccggaagtgctagctctca

SEQ ID NO: 1407 - DNA, 3819 bp, Toxoplasma gondii
  source 1..3819: mol_type = genomic DNA
tctctctcttgtgtgtgtgttcgatttcactgtctatgtgacttttacttccatcatttctacgaacgtctccctcagattcctgtatctgaacaaactttttcttctcgtccctcgagccaggtgtctctcccacggcctgtctccgagagtctcgaagccggcaggcgaactcggaagcgaattcagcgacttgtcttgcgacttctggagagaagtctggacgcatcggagccacgaggctttcaacgaattgactcagatcctcttcctcgcgtctctgtcgctctttttcagggtcgtctaggtcgcggaaccttccttctctgccgcggccgctgtctccagaaatgaaagagacgagctcctccaccaagtaggcgtctgcatcttcgaactgaagcagagctctcagcttcttcagagcccaagcggccagctcaggcggcagagacggttgttctgtcatctgaacaggaagcggagagcgagaaaacttgagacgaatgcgtcgagaagactcggagagacgcctcagacccgctgcgacacacaggcctgttccggacagcggaaggagcagagagaagagagaagggaaacaggcggttgacgcagagaacggaagagcgagaatggaaggaagagagagaaccaacatacagagagaaggaggtaatcaacacagagaggaaaggctcaaagaagaaataagcgatacacggggaagtgaggagacggcgagcgccggaccgactgccgagaaatgaccgtgtgttcgctgtagagtcggcactgactgtgagtttcgcttctcagtttaaatcgagaaacaaagaagtccctttctcgactgacgaaaagccgaagtccctcttttgtgccgggtcaagcgccagcgggcaacgcgactttcgctcgacatcgagatcgccgctctctggcgatacgaaagaaagacagttcttcgttttcagactcgagaacgcagaacgaaaacggtacgaagtctcaaacagttaaaatgagtaaacggcgcttcagaagacgcgtttcgagctgtgacaacgcctctccaatgtgtatgtttatcactgcatgcacccggtcaatgaaaacgcacacctgtggttcagagggtctgtcaaacccaccggcacattttctctgtcagaaggactttttttgtctgctttctcaaggcaggaagtctgtgcatcgtcaacgcaatctggaaaagaggtttgccatcgtgctgcacacgggaagacacagacgagtagcggggtcgcggctgcaggctgaactgtatttgaggcggaaatctacgcgtcgaaatttatgtagaaacatagatttgtgcgcaggtgtgaagtcgattctcctaagaagcgcttgcatcgatgtaatggagtcgggcgacgcctcgtatgtacggcagagagattccgatccagtgaacgtcgtgacaaacatatcggcacatagccacaaagtcaagcgaaaacgtccggcgttttcgataattcgagtaacgtttgttccacgaagaatatgtttttcttcgggaagcgagcctcatgcgtctgtgcacctcgtgtacaacaggctcaagaatctgcatagggggggttagcgtgtgtgctgcatctctcgtcgtttttcacgtacacataagtaaactaaataccgccacagacatgcaggaagttaagttacttataaatatcagtacatgtggacaaactgtgtctctgagaagtttttggtagacatatgtacacatatttactattatatatatatatatatatatatacctagatatatatgtatatatagcttacaaaaatatacagatattcatttaaatacctatgcatatttatgtatacctacacctatatatgtacgaatatatatatatatatattaactgcaaaggtcctcagattccccgctgttcaatgaccgtatagacccgtatttgcgttgtttgtagtgtcgtttctttctcgatgaggaactcgaggcagacaacgcatgtgtagtgaagtgtatcactgcacaaacggtgcacattcgacagctcggtccatctgtccgattgccgatggcttttgtaagacccttatcactcttgatcacgggggaacgatgtcgcaacctcacgacgctcaagtgctcctatctctcgacatcatagaataataccatttacatatagatatatacagatacacatttgtacgtgtgtatatgaggctaaaagtgggaggatgttttgccatctgtagtgggttccaaggtggtttttaccggagtgaacatgaacgatttcgcgaccgtccgtagcgtgttgactctctgaagtggtgtggcgaacggcggccctggttggctttttcgtctgagagaggttcttttaaatatcgcacgactttgtctcagttcagcactgcgtgcaagatcccgtactgctacacctcggcattcacttgtccggcattgcactcttcttgctgtcttgaagttccatggacgtccccgctttcactttctcgacgaaacgcgcaaaccctacttggttgtctggtgagtcagttgaggccctccggcatttctcttcttgagattccccgtcggcacacgcgaaaggcggtgcttggtttgctcacggcctgccggacgggagttttttccggcagaactggctgccgtttagcactgggcaagatcttttctttgctgcactctacttcgttgactgtggatcggatgttggactgcgtcccctgcccagatttgagcggtggaaaggccagaagcgtctgttttttggaatgttttcaggaaaagcactccgccaggaaactctgcaggcaccccgaagaagacacgacagaggcaaggaactatttgcgtccacgtccgcttcagatgccccgcggagtgcgccgtcgcgcgcgatttctttacgtgggaatgcgacacaggctacttcttttctcagggtggtgggtaccgctcttgaatcttccgcattcggtcttttatgaagcttttgccgtacagagaaatggttgtttcggctaaacgggtacactggtgtttcctcctttctcgcgcggcgtccgtccgtgtccggttcttcttcgatcctgtttccctttttacgctcctctgccacacgaaccgaaagaatcgggttcgcgcaagccttcgtcgtgcgttttctgcctgagtaaaaggagaaacatccatgcaaagcaccgcgcgccaaagtcactcggctcccgttcttccctctttttcgtgagcgtcccagcgcgcagccaaaagacaagcccccgcgaactgtccattgtatcctttcccttttctgtgttttttttcgcacgatatcggcctcggttttcctttgtgcctgcgagggtgcacaaaaccccggcctcgcaggtgtgcaaccttctgcgcggttatcgcacagaatgaagttgctctttttttgacacgtttctcccgacctttcctgcccaattcttccttttcctgccttttcggcgctggactgggacaagactgcaaaggcgcgcgagctacgggtgtgtgcgttctgtgctccacgtgaggtgcgttctgtttatgctccgtggaagcggcctacattctgcgttgtccagtttctgtagtccttgtggcggagaatccttgctttttctcacgcagccagatctgtgcacaggcaaaaaactgggcttcgctcgcgaggcagctcggtgcggctggtcgtgggtttccccggtggatcgcaatgta

SEQ ID NO: 1408 - DNA, 2901 bp, Toxoplasma gondii
  source 1..2901: mol_type = genomic DNA
ggcttcttctgcggtggaatagtcatcctttatcggagatcttcaatgtataagcagggccttccctcacacagcgcagtccagtgtctgcatacccttggtgtcgcttaacagatgggcagcggacgggttgggaggaatttcttccttaagatctttgatttcagtctttttcatcacctttccagatgcattccagttaacgcaagtgaggaaacgggtttatcttcggtgccttgttaggcgtcaacggaaattacatataggaaacatctacgtttctcaatattcatctttcacaccacacatatttcggccgttgcaggcggcctctccatatattttctgctgttgttttcctttaaacatgctctgttggcctcacttgttctgctgactgtgttgtccctttgtcgtctgcaaaccagtggccagatcctccctctcaagaaagctggcgtggtggacgacgattcacgtgaaacacgatattcctcgaggtattcactgccaagcagagaatgttaatcccttttgctcctttaactgtttacatgtgctgctgtagagacgaataaaagggaacagcacttcttttgtgtatttagaactctggcgcatttcccttgataccttgcgtgttctcacaggctcttctgtttgtcaccaacacttccacaacaaagttgtggtcatttggacatcttcagcctccccaattttcttcggagaggacggaaagttgctacattggtcgatacagatcaggaatggcgaattttttcatatctagtggcagaaagtatcaacgactggcagtaatgtacacagggagcgacaggcgatctcctatttgctactaacattagtgaactcttttggtgtgcctttccgagtacgcagtgagataaatagatacaaaaatcttgacaatctctgctagattcttaacagcagaagccatcccgttttcagatcggccgatacagaacatcaatcccaatactagttaaccgagttgactactacagggttgacctgtgtccatcacgctcgagcgaattgttcttcttataagtggctttaggtttctcgggctcctttcgccactcgttgactgtgtttaccagggggaaagggaaaaagaacagaatacccaggtgtttgacgagggctcagcggtgcggaggattgcagcaattgtaaaggacccggttgtctgtatctcgtaattggaatcctgctcactaccataggtaccataatgtctcttttattcgagttgactgtatttgtccagaaacagtagctccttgtcacgagacgcttatagtacgtcgtctagctacggcctcgatgctcttcgtgctggatttttacagcgggtatattttaacttcgttgttcccatctctattggttcagaaatgggaacacgcacttcggcctccaacgttttctctcgagtgcggagagtaggcgtgatttcgcaaaagttgaaactaagttgtcctgtcttgttggactgccgatctttgagcagcgttgcttcgctgctctccgtcaagacttgtgtgtcttttctctctttcagtgcttgtcactgctccatccttcagtcgttctacctttttctcaatttctaactcgaaccaaagagcaaacaaaaacaacggcgggctctccatccaaccttttccgctatccctctgactccacagctctctttgaggatgccaagcaacgtccaaagaacaaagaccttctctccagccctctctgcggtcgattagaagcgctatgtctagctccaaacgtgatttgtttcgtactgggttcctcggaagcagaaagtcttttgaaaagctcccacctgtcctgctaaaaaaccactctctccaagaagcaggctcaggcgttgcgatcgtagtttcaagtggttcgaactcgtgttccctttcggtttcgatgtggatccaacccagcccacggtctaccgcagcacacacaggttttccctgattcttgaagcagactccagaaacggattctcctgtcgctcgactgtcaccgcacaaaaactcgactgacgaaatccgttttaccccggggggtgcagtcgcagcatgtgcggtagaaggcgattgcggctctgatttcgttggacatttctgcattggtaggtcaaccctgtgagttttactcgacggaaacgaagaggaaaggactaatttggtaagaaaggaaaaacgatagagcagaaccaccagcacaggaggctgctcgcaaggcatgcctcacagaagaccctcgtccaccctcgcttttctcgcggttgtcctgacgcgctccctcagcaaagtggaaaaagagttgaacgcatttgatacattttcctcttttccgctgtcgtttcccccgtcgattgagtggagagagcaacttgactggagaatctttgcccttctttcctgggaaaggacatcgtgcttccgcgtttcgctgcgtgtttgctcgctgttcaacgagttcagagaggagcccagccactttttcccactcagcggagacacagaaacggctcatgcaacctcgaacgcggttacatcctttcttccgatgtgtacgctgttttaaagccaagaagactgcccggacgccattcgagccgctagatgccgcaccccgggcgactcctcaataatcgttcgtccacgcaagagaaattctcactgctccttgcatgcacgcgccattcttaaggcagaaaaacgctcgttttacccgtgcctctgcgttttttttcctccgggtttgtttcgacctttggtggacgactggactccccaagactcttctccacactcagcacctgccccgttaatccagcacgaccagata

SEQ ID NO: 1409 - DNA, 4627 bp, Toxoplasma gondii
  source 1..4627: mol_type = genomic DNA
atctccgcagacatatgtatctctgtgttgggacatataaaaacgtatgtacactatatatatatagatatagatatatatatatatatgtacataaacacatataaatatatataaataaatacctaaatatatatgtatagatgagaaagagggaaactgacagaagaaagcgggtgctgcaggagtttcaactttgttgatcacgaggcctgccgagtgtttcacaaaaagttaaggatgttgttttcgtttgccgtcttcttcacctgcctttgctctccgccctgtttctttctcgtaccagttgcatgcagcggtgcaccgtccgcgccgacgtgtttgccgttgacccagagaccttgaatgactcctcccgagaagttgagggagatgccgttggcaagagcgcgagaaactccggaaggtttcagatgaaattccacaaggatttcgccagcatagacacatcggccactgttcagaccgctagctgaaggcgccgtagtcgcggcagagggcacaaacgttgacccgcctacgagatgaatgagaagtgagtagtccacgctcctgacaatttcgctgcgtccacgagcctctgagtgttcttgaacgtctgggacactcagctgcaccagcgaaggaaagagtcaccggaaacataacgctagcagtcccgtgcagaggaaagaggtggaactgactcatgtacgaagaccgagtcacgagagctacgtcgagatctggacacgagagggccagactcctggatgaaaagaatgctaggatgaaaagcgaattagccaaaaaaggagcgtcacaatatttcttaacataaattcaagccggttcactagagagtcaagcatacgtgttgaaatacgtacgtgtgcaactggagaaagtgttacgtctgccctactgtctccaactaccgggctgcctctacggccgtatatatttccatagattacatgcgttccctcatacttatatattcagggcagtagaattgcagacccagacagctggatgggtagtcatgcattgtccgctgtctatgggtttgagtttgacagttgtgtttttttaggaatgacaagtagttttgttgtgggcgctgaaaacgaagcgaggcactttatctctgccaccagtgcaactcgcgatgttccctagtctgcaactcccggagagcggaagactctttttgtgtgaatggcagctcgttacacaagcaaaaggagttcgtcgtgtttcactgacttctttgtcatgcaaccacataggctccatgcgttccttcgtcctcctcgcttctgcaatccaactgtttagccaccatctgccggcgtagagagctacgccaagcaaaccaagaaggaccgcctggatgttcccgcctccgccgccttcatggaaatcacccatttttgatttgaaaaagaagagtgacagggcacagtctggagtgaagcatcctaatacgacggagaagatctattcagctcccgttcgcatggaggaaacaccggcgaaaaacgtgttagagaagacggaaccagctgctctgaaacatcagcctgatgctgaataatatatcctctatcacaggtgatgtccgaggcggctccagtgtgcctgcttgttgaccatgaggaaaagcgtggaagatacgcgcgccctctctcgaagcgaagtgatcagactcgcggaagttgcattcgcccgaagctttttaggatttggtggaaacgcgtgtaggatacactgaatatgatttgcacgtaagccgccacacaaacctacaaactcgtgtttacacggccgttgcgtcaaaggagtgtttcttccctatggattggctgtttgctacccaattgagttccggtcgaattcatcaaagaaccacgtctatcggtgggcctgtatccgtgaaatggtactaatccaaccgcagagattcgagtgaattatcgactcaggacaacgtctttgtctcacgtggggaaaagtgctgttccaccctgcatgaatccctgcttccatgtataagcgccaagaaatcctagattcgatgcgtttgcgaaggcaagagcagcaggaaaagaggaccgatcgaattcaaccgtttccaagtactgatcagatatggtgtaccagcagcagaatctcttgagtccgcgttgcactacacacgctcctttacacttttcggtgacagtcaagaacaaaagaggggttgcacaggcacaatgtgagtctgggaaacgcggagaatgataaaacagcaagaaaaggaaccattctcaacgccaaactcggacacacctcgaagcgtccgtggaccgacggcgttcctgcgtggacgagaacgactttttaggtggatcggaagcgggagaaccaattaaaggacgaaaatcctcaaaaacaaagatttaattaggttgcccgcatgcgtcagctcgtttgccgtatgtaagttagacatgatccaaacagtgcagttcctcattctttttggtctcgcgaagacggacggcgaaaacgcactgccacttttgccctacgggacgagagcgcaaaatgtggcttagcgtcgaagcaaccaaccacatctgccttgcgcttttgctctactacggcaacattgtgttttccagtctgactgcttctgagctctccgcggcagaatctcgaacacaggtggcaaggaactacagtcacctagaagatgcctcagaagaccgttgcctctatgggttgtgtggtctgcaatctgaaaccgaagtgaatggtacatcttgcacctagagacacatttgagtttgatgagcactgaaactgaagcggtaaatcgtgctcggaagaccctctggaggtttgctggtcagtcatagctacgtagtctcatgacaggaactcgtaggttaactcgaaatgcaagtaatacgaataccatcatactgttgtgtccagctgctttatctatgatacgctgttctagatccgaagttgtaaatcgtaggtcgccagtccagtacagatccacaaaatgccgttgagctgcattagccatataccactttgttacaccaccgctccactggggaatgcctaagacaggcataggtttggacttccacatcatgcgatatgatgtagtaggacagggcactcgaccaaatttacgacagatgaaaatatcgcggatgactgtatattagcggcaaaataccgaatatggacatttaaggttttccatgctccctgtttagaaaaagaggatagataatagtaccgtaagtacataaactattaatggatttgattatgggcaatctatactgcctggcatgcattccagtcatttcattgtcggtgctatctcgggattcttttatcagtgtgtgtatagctctctactggcagccctcaagccagctgactctgcagctggaccatttaccagcttgcataccttctgtgtcaactgcagcctcagtgactcctggcaacattcattttagaaagcattctttagagaggtatgtagaccagctcttgtagccgtctcgaaaaaggaagtcaagtttttttcataaattccaagcaaacgaagagtttcttcagtgatcaaccgcgtgtcaggacaacaagaatcccacccgtttatctcgtatagactagcgtcaggtaaagaggctgcggaagtgaatatcatgaaatctgtaccgctgttgtgaataagtaatagtggcacctcggcgagtcccggccacagacaaccacttggaactcacctgctagcattcgtcttcggggacagcggttcctctgaaacaaaccgactatattccagaatatactcatatataaatatatgttcgtatatgtttgttattttctaatcaatttagtgtgtgctacaaatgcttctagggggaaggtgtccggcttcggcactgttggagcgctgccgaacagggaccaaacaccttacatctctgcgcagcaagagatgcacagttcatggtacctttatatttccaccgcaggagtacggaaacacgtttttctgtctttagagtctcgtctttgtcaacagaagtcgaggacactgacgttgacagaagcgcgtctgtcgtgttagttgtgtccgcgtttgtgctctctgcagagcgtctgtgcctcttgaaccagcaaagggttctaaacggttgcaggacggaacggcagacggaaaatgcagacggatcaccagaatggtgcactttcaacctgtcttcttgtgcccttgcgactgtcaaggctcgcctgtagacgctattccacagaacattacgcgtattcaccgtctttcaggtgtctgtgttgtcagtaaaaagagcaggccgcgttgacgtggcacagagcaggcacgatacccatgtacgatgtgtcgtcgatcttggcgctgatccagactgtaacgacctgggttgttgcggagggggtccgtcccttcgtccagcaatacaaaagtcaattgaagggggaaagcaagctcaacagttgcaaaacggaaacggaaagatactttttcttatccgtggcggcacccttgcaacacgtcccaaca

SEQ ID NO: 1410 - DNA, 3462 bp, Toxoplasma gondii
  source 1..3462: mol_type = genomic DNA
cgctatcagaaggaccttcaatctctgaaagacgttcggaagtactgcgaagaaacgggttgccggcgcgcgtgcattctgaagtttttcggcgagaccgtggtgcgtcggtgtggtttcgcgaaaccgtcaggcagacgagaaagcagcaaaggtccttcaaagaagagacacagagacgcagcagaggagtcagaagcaacgtcctgccgcagtttcaatcgagcgaaaacggaagagaaactgagcgttcacagtggtaacgccgacactacatttgtctctccaggaaatcggaacctctcagaaggaaactctctgtgggcgtgtgctagggaaggggctcctagctgctctgaccgcggtgccggcgtcagtgaagtgaatcttggaaacagccaaaacgcggaagacgtgaaaacgaacctgtgttcagatgaatccaatagaggcgcccgccttgatgcctggcgatgttgcgacttatgtgaggaaagcaaggaagggaaaaccaacggaggcggccttcccgggaagggccacttaacctcagcgccatcggcttccgttctggcatctctgaattcgcgaggatgcacccgcgtttcctctgcttcccgtcgggctccccggagtttcgctggcggtggcatggcagctgtggctggtgaagacgatgggggggttctggcgcgtggaactttggaattcgagaaagatgactcttcaggcgaagagactggtggcgattcacggtggtatggatctgagaaaagcttcacagcggccacaaccctccggacggggtcctcgtggtatacaggcacctccgtcatgtcgagaggactgatggcgtctctgcgaggaaagagcagtgagtattgtagaagcgctggaaccggcgcttcaggcgggggccgggtggtttatcacaaaagtgttggaagcgctttttgtcggcaatccgaggtgacgaaaggacagggaattccatcgttgaagagtggaatggtgaccgacgcggttcgcgccaaaggtcttcgggctgttatggaagagctggagaggcaagaacagttggccgaggaagcagaggacgaagggaaaaaaactcgcttcttccgacagcaatttaccgcgatgaggcgctcatcctcagaggtggacactcctggttctcggtcctgtcaccttccattccgtcggccacgcccgccgtcgctgggacctgcaagtcgagaaaccgcatgcggaatgactctttcaaatcagccagcgcattcgctggcttttgttagagcttctgctcttccaagagatcctacaaagtccggtgccgttgcagcggcccaacagttaaagtctggtctgtaccatcctcgtggaaagggttaatctagcggggctgtgatgtggaagaagcaccatagagaattctttgtaaatgggcgcttcgaaaacggtgtcaacgggcaaagttttgactcgagcaacactagatttcttcaatgtcagtgaaactctattactcttggagcatccagcagcccaccggcacgaactgacgagtagcaagaggattggacggcccctaaggaacaccgctgggcttctacatgaattcctgtttagattaaaagaaagccaggacggttaatgtgcctgttagtatgggcacatcttgtgctgccgtgtctaatgtcatatttatcgtgttcataaaaaacagcctgactcaacgcactgctcctgtcttcaaaatggttttttctgtggcacgatgggctgtaaagggggacttgagtgcatgcaaccaaacgagtagcatcagccgctgggtggcacctgccccttgcactagagtaggaatttcaaacgaagcaaggcatgtacccgtggactgcctagcgctgagaacgtgaacactgccctggcaacacagaacggttgcttttctgtgttagaggggatattgactgcaggtatgagctgttatcagttggtgtcaaatccagtagtctcgcaaatggcagaagattccacacgatggatgccaggccgctgctacatccacaagaacagctcccacatgcagtaaattgataacatttgttggcattacgtgcggtcccagacatagacatgagaagagcctcccggtagagctgaatttggaaggcgttattgccactacaacggccgcacgcttcacgagagtttcgtgaaggacttgccaagcggtttgttttgttcgcggtggagccaacatacgtcagcaggccgatgacgagaagagcccgtaagaactgcacggtttttgtcaaattcgaaaaaaatatgttaatgcagcgtccgttatcactgctttgctctgttcacggagttacgcctgtccacaattaaagaacaggtgctgtcggtggacagtcaaaggttaccaacccgttaggatgtgtacagtatctgaaggaaatctgtcgtagacaccgtggtggctgtatttcggaacaaccatgaaaccatcgaccaaattgcagcgtcgagtcgatttttcgtccgaacacaatcgtgtgcatggcccatcggtcttggcattcgttgtgtgaagccccgtttcggcagatggggtcgagagtcataatgcgtgagtcttaaatgtaaagataaagaaggaaataggcgagacaaggcggcagccggagaagctccgtggccaccgacggacacgggagacacgtgtagtcgcgcaccgccctcacgggacatctgcagtgtcaagggaaggagcgctggaggagaccttgaagatatgccgaagcaacaaaagaaaaaagggtacttcctgctcgcggctggggatgggagaggcaacactgctacaaaggcaacatctatgaagtggatggtagaaagttcgaattctcacgcacgcaagctttccacggcgtcaggtgtgtggcgctgcgttccaacgccactgtagatacacccctcggcacgtctcgaaaattggtggtgacagcatgtctgggatgctcagtgatacgactctaaaggtcattccgtactagaatgtctttctcttttttctcagtttcccgagcggttctttaatttgtctctcggtcgtgtctcagtaaacattcgtgttgtatggtaccgttccactttaccgttgtgctgcccgcgtcgtccgaggacctagggccgagtagcgatttggaatttctcgacgcggcattgagttttatcggcctttcggaatctccgcgtcggcattcggctgaaatcctcatgcgtcccttacgccaacgacgctgagggcccgcatgctctaggtcttgcgcaggttccaaggcaagcggataatcgtttcaccggtcgcttcacaatttccgctagtcttcgtgtcgcaggtgagacagccgacagcggcgcgctgaagttttctcttcgaccaca

SEQ ID NO: 1411 - DNA, 2388 bp, Toxoplasma gondii
  source 1..2388: mol_type = genomic DNA
gtttttagtgggtgtagcgtttttgtttcttggacgtttcggtggctgcccagctcgatgctctttcgtgacgtttcaaagtcttttctgggagctcgaaaaaagtcgttttttcagcatcccctttcagcagaaaaagcgagtgcatggagggagcgtttgtgtttttggcgtcaagcaaatttgcccgtttactttggccctgtagggcgcagtgggacggcattcttggattcgaagtttttttgtcacttctgtacaccattatatgtggatttctttgcatgcatgcacgcatttatcttcggattgaagggttttttcgagcaaagtttttatgtgccaagacatcacgagtgagtaccacgcgagggagccgaaaaatgaagaagggagaaagtcctccgacacacctttctccactgcacgagacaaaactcaaggtctagaaggtttgcctccacaacatacatctctgaaacatcgagaacgtacattctgagcgtgtctcgagacgaacgcgcgttaggatagttgactgcgtcgacagaatgtagacggcagtatttatggttccaagaccttaatgcacctttgcacaactattccgagttacacacttttgcttgttccaccatcgttaatctaaatggacagcctaaaaagtcttccgtgtgcgactttgcctaaaaccctcagacataaaacaggtgcgaggaacacagaaaacccacgcgttccacgacggagacactcgcgcgatgcacaagttatgttgtagggaaaatgtgtaggaaaaacgcgagcttctgtttgccgctgcgtcagcgtagggtgttcggaagagtctctcgtccgcaacatcggcaaacacagtcgttcttcactgcgtcctgtgtgatcaagaaataccattttatatgtgtatgcatttaaactcaccatgtgtgaataatgttcctttgtgtgcgatagttgctgggtacgctgttcggttgcccgttactctgccccacgtaccctgaggtctccggcgctagagggtatcatcggcagtgcttttagaaacaatagtagagcagttcgattcgatgctttcgagctcattttagaaatgattcatttgcaggttttgtcgaatggaaaaacggtggctctcgacagggctgtagttcacccggcatccgcgcgttcatagtgccttttcaaccctgtttccctgccgtgtgcgtcagtgagttatctccagaaactgaaataagaattgatttgaagaacaaaagacgttcaatactggggctgcatgcacacgtgagagtgtgtatttcgtggggccgcctcgagccagactgggaacagccgcattgttcggtagaaaacagtgatggcgacaggagtaagtgcaggtggggggtcaaacgaagtgtggaagtaattgagctgattgggggacaaaaccagacacagagaaaaacagacagggggctggcgagcgtttttctctcccagaagagtttgtcgccagagacacctcagccagccctccagaaggaacgcttcttatattgacatggacgctaatgccgacttcgcttttgcgatcgtttccaatcttcaacgcaggtgctttcccttttttgtgaggacaactcccgaagggaaaggaaatttctaggcagagctttgcggctctttacgtgtgaacagagacacgcaagaccgggacacgacagatactgtgactcttttcgggtgcttctccttcgtgattgaagactgctctatgttgtctctgtttcttcgcccgcgattgtgggaggtccagactagtttaagagaccaccgtttcctttccgggatcttttgcctcatcgttccctagaacgggcttcttactttccgttaaatcacgcctttcaacagccaataacgaacgcactgtttcaggcaaattcaacatttgtatatagatatgtaactggcgaactgctctccttcacttaggcgaaattgtgttgggattgaaggaaggcggtctagggatggaaaccattctgacaagtgtgaaactgcaacgaggccttttctgaagatatgctgttccttccatctaacaattcgtctgcatcgcagcatcgacggctacttccaagagaaaagagagtcaaccagccgttatcaatgaacatacgtagtcttacattgagtacagtcgtctgagttggtagcgatacaagtggccgcaaatgttgatttccaaccgatccgtggctatgtgcgaaaataggttacacacatagagcattgtgcatgtgaaaccccttgaagggatttctcgccaagcgtcgtttcggagccttctgtgcacgttgaaaaagacggggaaaa

SEQ ID NO: 1412 - DNA, 3621 bp, Toxoplasma gondii
  source 1..3621: mol_type = genomic DNA
aaatgtttgccgtaataacgagactgtgtgcacggtctacggtgtagaggttgtacgggcaggtgcgtaacaaaaaacggctttctcactttctgttgtcgccaggaacaacgcgttcctggggtggccgcgaagaagccattggtaaggtaataaacaggaaagttccctttcccaacaggggtcgaaaggcttgaccgaagacagggctgaagatcatgccagcggtctatcggttaccagacgcacagcttcaggtgagacagaagatgagtggtaggggagagagacgattcaggtgacgaatagacaagcgtgtattttccaagcggggccggaaatgacagccagagcagaaagcaggcggattctttgctcccaggattctgcaaaggaatggacacccaacacggaactaagtctcgctcctccgttccttctgtcttttcacagagtttcttccatttctctcttcctctcttgctgtccctggcccttcggctgtgcaagagctgctgaagaagacgaaagaatggaaagactgttggctcctgatgtcgaagggagaggcagcagagctttagaagacgcctcctctcctgtgtcgacagaagcaacgcagaaaagccgcatctttcgacggggaagagaggcctctcttttcagaaagacttgtgcagccgcgaaagaacgggagtgcgatcgcaagcgaaaaagctcgagtgtccagtccagtcgttgcaggtccgggtcgaagagactttccccggtagccgaacccggtgtgtgctatcagggagctattttgctgtgcacatgcgcaaggaaagctgaaaagaggggaagtgtaaaaagacggcacacggcaaagacgatcgacacaggggaacaacgagagaagacagtcgcgtcttgcgaagctcggattctttgcccaactcacagcttacggagatggagggagacaagaggatccgaagtggtcccccaccgggaaagagaaggggacagaagaccgcactacatctccttcaaaaaccgcaaggcacgaggcgaaaaagcggctggtaaaaacactctgcaggaatcttgcattacgtgagagactcgcgtagttatcgaggggggcacgggcgcgcggcaagcttgcacagcgtgccgctttgcgtctggaaaaagaacttgtcttctagtaaaagccgttgccaataacaaattattattccgtggataaagctagtccgaccgacatgaactagaagcagggtgatagatttttcatcattcctatttacaatgagggaaagggtgccaacggcgcccagggcggagtccccgtcggcaatcgatggcgtgacctggccggagtgggcttgctggaagatgtgtcagcagtcgcgtctctcttacgcaagctgctaacccaatcatcgctcgtttcgtcagtcatcgcattcttttattctatcgaacgagagtagatacgaaacacctgccttgagccccggttgtctcatgccggcgcgcctttgccttttgacaaccgctttttactgtcttacattcaatagtctaccacctgctgagtgatccttgtaggagaggtgtcccatgcacgcaaccgctggttatgtaaaccttgctattggtggcattcaaaagacgaggatgagagaagctgaagcccgcccacggttgtttgtcttttcgtcactacactgtgtcaactacgtctgttatccttgcttgtatgcaattcccaccattctccgacagctttttatgcgggtggggcgatgctgcgacaatgtttcttgatttctcgttttgccacccccacgacaaaaagtacgacgacaagaggatacgtcattttggttcatcaggctggagagtgtgacaccgccgccgcttcagtgtgtcgcggtacgtatcaacttactgcttcgactgcctccgggaaacgtgtagagctgcatttgtcgccatgaacgggatatcctgttgagtgaaaccgcctccaagtggctgtgatgctcgtgcccgtaacagcttcccatttggtcgaatcgagggatcgctaccccgtcgtggtacagcccaggacaagtgcaagggataacagccaatcccctgaaagcagtcgccacagaaggcagatgcagcagaatgctcaacgcgggcagcacttttcctcccatatatatttacttcaggagttaacagttcccttgtggctggtcgaaaacattttttccgttaagcgtaggtgtgtgtcttcatctatggaacaagccgtgtgtcgatagcgaatacatcttttgtttgcgtcctgcactcgacttgacgaggcggctacagtggaaacgaaaaaaaagggtttcaggagagtgtgcagatttggcgtagctgatttcgtacacagacagatcccgctgaaacctctaaacacgagagataactgatctcatggggtgtgagcatgtaggtggaacgcgcagatggtcacacttactgttcccatgattggaaggccagtgaccttcattcggacacatttcagcaactatacgccaagggtttcgtcgtagcgcagtcccataatcccctgggatcactgtaaaccccaagtccaagtcaatatgttatgttactgaaaagtatagtcaagccttcacagtagtttccagtgtctgccacagtatccacttgcctccacgagtatcaacgctacgctgcagtcttaatcatttccacatagtttttgttcccccagactaacaatcctggctgagccccccatgtacgcgttccacctgccagtgcatatgggtttgcatatttttgctgaagtccgaaagaggggccacgcaaaacgttaccggtttgctgcaggcagccaggtaggtggaacagatctccagcgagtacgaccactgtgcgtgtacttcgccaaaaggaaaatacacctgcaccgctattaagcggcagtcgtctacctgaatcgtctccccggcctcatcattttgttcgacacaagtttccattaggactttgtgacagtcgtctgctctcgacctttccaaccgtctcgtaggcgaaaaatcctcgggtgacttgccgtggacgaacgcctcccgtttgcttcatcaagtagctatgcgataggttccgcagtgcagccaggcttgcgaaaaacaagttcgtcgcaaaaggttaattacctacgcaccacgaaggaaaacgcgtatcacgtcagtccttacggtcaatatacaaatacttgggccgtccagtggaggcaacgtgcccgtcgcacggtgatactgactggtgacttgcacgtacgtctctcgccggcgtccaaaccaaattgacccggggcagcctactccctgtcgtcccttaggctaagtgcgagcaacatctctacacagagacgacgccagagacgcaaaatgaacagcggaacctgcgtcgctgtctgtcctgcgaactgatgacagaaagggtcattaaacgatttcttttgcaattcgcgtcgttatcgcacgttgtttctcgtcccacgaatagttgttttgattagatattgcttcttctccacatatcgcctcacaa

SEQ ID NO: 1413 - DNA, 2227 bp, Toxoplasma gondii
  source 1..2227: mol_type = genomic DNA
acgaaaagaaagaacatcctcactagatccctcacattcacaggctcgctgaacttccacagccgagtcgacgcactacgatacctcacgacagaagcggccaacgtggtctccaccataacacacttacatacaccgtcaagcgcgagaccgcctatccacccatctgtacacctatctacaccataaatacgcacatacgcgtatacgtatatatatatatatatatatatttatatatatatatatatatatatttatacatatatattatatatatatatatgtgaacgccgaggacaccttatgtgaggaagaagcgcagtgtgggcattggcaagatgttctggcggagacagcttccttctcacctgtggggtgttccagtttccctcagtgacttcctcctcgggattgaagttgtcttcttcctccttggtggcctgcgtcgcctccgcgggctgcgcgggcttgggctctgtagcagcgtcagacatggtgaagactgaaagacgaaaaacgcggaaaacgccaaagggcaggagaagcgaaaagcggagaggaagacggcaacaaagcagaaggcagtgagaggaaggacgaatccgctggagagttcgaagcgggctcgcagacgtcaccggcgaacttcgtccaaggtgtgcagaggtttctctctgattctcctcagctgaggcgagaggaaagaagaggggagaaaggagagaagaaggagctgtgtgtagaaaaggaccgaaatccgccgcagcacacgcgagaaccacccgggttgccaacaagaaatcctctctcctccgcctgggaagtagtcgctgacttttggggtgtatgtacaccgcaggacaaccgttcgtgcggtcagttaactggttcctccgaagagtgcagagagacagaaagaaagtcttcccaggaaaagaagcgttttccgcgggcagcggctgcagcgaagagcgaaaaaggagggagagcgttcagagtgcgcgcgattgtgggacggagttcgtgacgcaagcgacaactcgcggagagaagggggaaaagcgaaggagagagttcctgagagaagacctgagaaacgagagaggaaacgctggagaagaagtctttttgggtcacatagaccccaggaacaagagaggagagagaagagggccggcctgtgtcctgtagcatctgcgcccggtagagcgacgcctgttgctgtgcttgcgcccatgtctcggcgtatatacggagacatccgcccgcctttctcgcgccttggcaacgcccagctgtaagtacaccgcagaaaaggtcttcgacgcggctcgaggcaagcctgcacggcagacggcaagcaagcgcttgcgtttttcgcaaggtgtgtctttccgctgttttccttcccccttttgaggactacggcgttctcctgttgggaggaaaatacttgttctgtcgcttcttctgtggaaagagagttccacgagcgggcaaactgagagcgaggacgcagcaagaacggagtgagttcctggctggaaaacgaccgaggaacttgacttagatcgcgaggaagtctctcaccttcctcatttcacttcttcctttgctattggatgagtccgttagcacatgcgtggagagacgaagcgaaaaagcgcatgtgttccgttctttcttcttgtgagcataacaagagagaaacgagaaaacccgaaaaaagactgtggcagaagtcaaagagcgtcgatacaccgtcccgctcttcgcagctgtccacctgaggcctcgtaagtctgggtttcgctgcctccgggagctgagtctgtcagaggcttgtcgcgtttctcagcttcaaagtccctgttttgtgtgcctcgtcgccatctcttttcggtttctcccgttcgatgtgcatgcaaacacgcacaacgtagggggaacaagaaggctggagagcgccgcgaacaaggcagcgggcactgctgaacgaagcaacgcccagaccatcgctgctcggttcccccatgtctcagtgcatgtacacccagtgggaccagagatgatggcgaaactctgcaccgaataatgccgcagcccctcgttctcagtctggattgacacactgtccagttcacacatggaggggctgtacagtgtgtagcgtcgccgcatgtcgttgtttttctccgtgtcaactttgcctaacttgtcgata

SEQ ID NO: 1414 - DNA, 4451 bp, Toxoplasma gondii
  source 1..4451: mol_type = genomic DNA
agtcacctttttggcaactctccgcgaaaaatagatggtggtttgcaagttcgaggaacaacgcggatccggggcgagttgctcaatcgggtgctacagagtgaggaagttgtaggaactagttatcttacttccaaattggccttgtctctattgcgtgtagaatcgtttcccgaatggctgagtcgatggggctcgaaagttagggatttacacgtttgctcccgcagtgaaaacgtaaccagtctgaaccgaagacctgtctaacgtctctttgactctcacctggttgaaggcgataagaaacgcgaagaaataaacaaatcccaacgcgcgcagaaaaacctgcatgttcacaacagcaccaagaaaagcagtctttatggggttgctactgaatggtgaccgctatttttgcgatcaaatccattaggtacatgtcagagcaaggtgcatgaaccaagtatgcgaggatccagattccatttccagcatggttttgataacataaagtaaatctacgggtctattccggctcctttcaagcgtgaaaacttggtgtttcgaccctagaatatgagaacgagcacaagattcattcaccagtgtggcactcctcgattctggttcctacgcatgcacttcagatctgaattcagcgagcgggaacagcgtgtctgaaaaaacatatggagatgatggacacttgcaagaatgagggctacaccgggaggtgttgcccattacgccgcaagatggagcacaggaaaaacagctccctgaagccattcatggctgcgatagctgtgattgtggaaaagaaaagttttgagtgaacatataattccacgtcataaccagttttttaccatacaagggaaactctactagcccagtcgcagaacccagtccggcaggaatttgctgagcgtggcctttactcacaatccgtgaaagccagtacgttgattttagtttcctcaaagtctccgggtccaggcggcgtctcttctcagcgcaagaccatgttggatccagtgcgtcccacacgcgccgcccaaggttgaggctcagttgcttccagctttttcctgtcggggagcctgccttcagggccgtgtctgttgcagatccaatagagaatccattaggcccactttcatctcggatgcccctactgttcacgaggctagcctcttctgactgaggggaggaatacatgctgacaattcagggaaacggagagaacgttaccggtgcctctgtgatatctgtgggctcgctagcacgatccgaaccgggaaggtgttttgccgccgcgaagaccaccgccgtcagtgtgcgaaaaatggaaactgtgggcacgacagcataaagtctacgtagtagaacgagtgaaacaagaagaaaagaaaacgacgaaatgaacggtatggggcccgagcgtcgccgttgcaccctcactctcatctagccagacaaacgtacaggcgtttccgagaaccctgtgtcacagcgacggagaatgtctacatgaaactgcgcgacgaccaaatcttgatccctccttgaggtcgaattggaacacaatcaatgacaacggttcatctaacgcaaacgtcattggctctcgagctcctcgaccagacaaggcccgggatggcatcacggagatcactcaaattccctggtaacgcaaagtgcggttatggtcttcacatgcgttgaaattccgccatcggatatgagaatagagccaaagaaaaccaccgttcacagataaaaaagttgcgggattgtcgggccatcgagctgttcgtgccgccaggaccggtgcgtgccgcaggaccgcgagacacaggtcgagtgcctctttttgagtccttgagtactccgttgagggaaaagaaaagcacaaaaccctttccacagaatcggacaaaatctgaatttcccgctaagccgtggaacggagtgtcgaaagcaaccaaagacaagctggcggctgggctaggacaatctgtcttgttacccgtggcagctctcagcggggctctatgcagcgagctgccgaagggcaaagcgtgccaaaaaaacgaacctttgtgcttttccgtttttttccgtattgaattcaatttcccattggtgacgaaacatcgggagccctccaggccgccgaggccatcgggcattaatttgaaaccaaccgaccttctggagaatttgtcctcttcgggtaacacgaaattgtgattccgccgcaatacacgagccgctgaagtacaagatcaacagtagtagacgaagcgaaagatacagcataaggcggatagccctagagaaggtagcagaggctcagaggtttcctaaatgatgacttgaatgaggactttcgtgttgactagcacacggtatttcagagattttcggtaactccctggtcaatgggcaacaatgcggcgacgggacgcctgtaacctcttggatgacaggtttgattttatatctgcttcgtatagccactgcgttctccgaatatatactaccatggaaacaaatgactctgtggcgctacaggcatcacagacctccgtcacggatttctgtttacctcgcctcgtcctttgtcagcaggccacattcggtttctatcatcactgattcctcgacaacctggtcatgttctaaccaccacctcaatcaggggaagcgggcttccgcaacagaatcttcctcaattgacgcgtgccctcggttcttgtcaacaggtggtacatgaaatcaagcagggcaaaacgagagctgctcttcccataaggagcgtgtagcagcacccgacgcagatgagtggcactagcgacacgtggattgctccagttactgtaccatcggcggtcccctgcacgaaggataacaacggtgtttttttcggggaactgcactgcatgaaccttcctattgaagctgagtttcagttcctgaagactgcccctatggcttttttgacaccgagtaccttttgcctacaggcgtagcccatgctgcattcgtgtatcacgtaggttgtatgttccctgagttttcagtcccaaactctcgcatgacctccacagcaatggagtgaatagttcaaactggttactcatgtacatctggggaatatcgtaaaaaaatctcttttcgagccctgcacattatgatgaagtgttgcatcccgcgtctttcggcgggtgcttatctacaaaaacagcttgtcggcatctgctggataacggtacaacatagtttatcgtaagcgatcttgcccaatggtatgatttgtctcttcttccgtacatgagtaccctatcacaattctccacagtgtgtgagatgatctggtcacgcagtttgctcagttagtccaaagagccaaagattcgaggctgattcgttgcgtcaaggtggaacacgcgacgggtacatctgctcccctgacacgcaacacatccatatgggcaattcattacatattccaatcctttcgagccttcacaaaaaacggtgtaagtatctgagggaaacagcacaccgttcgtgtggagggagggatatgggtttgaccaggagccttccgtctgagtttagtcaactggcggactagcggtccgccgtttccgtagacgaaaaacgagagaaatcgtggatgaaagaagtactttgcaaccattattttatgtttacgaggcgattactggatacgtctttccgcctcttttgcaaccatcgacagtccgaataactcagcctctacgttttcggctgcgggggagacatacaacgtttttgcgggccgctagacagaggctgcagaagacatggccagtagtggctagcatttcaagcgtcgtgttccttcagcgtgcttctcgcgtttttcggccagatagcccaaaaaaggacaatcattgaagtgtgcacttcaaaatgccgtttagagttggatcatccactgcgtcacgaattctcgaatttttgcaccttaccagctctttgaggcaaccaacgatgtttcagcctcgatcaacgatgccacacccgccctttgggggccttgtcctgcataaactcttttccaccgtgtgtctagtgaatgagttgtgtggcctacaattctccggaaatacccgtctttgaacttcccgttttcgctgcctgccgtgtgtcttgtcggagccacccgggttcaagacgtgtgagctagcagtgttggcagtcgggaacttgaagtcgcacagttctatttatcgctcgcttttggagcactagatgcttgcaaggccactgtctgctcccggggagctatgtttttttccaccgtgactccttacggtgtgttcggcacggccacttgccctttgccattgctaccctatatcgacctaaagaaaaacgttatctgtgaatca

SEQ ID NO: 1415 - DNA, 3507 bp, Toxoplasma gondii
  source 1..3507: mol_type = genomic DNA
gcccatcgatgcgtcacccactgggagtgatttggctgatacaccggcaagctccggcttaccagcggggtttctctttaacgtcgtgcgtttctgtttgctcgcgtcctgcttaccgctggcgccttgcggctgctgttcgtttcccttggtcttcgacgccgtattttgcggagtgccttttccgcgagaagctccctcccccgccttcttgccttgcgatcgcttccccttcttcgtttcaggccgttcagctcccgtcccccgactcgcagggttccctgcatcgccgttgtgggcaagggtaggctgaatgtggttcgtcggattctcgactttcgcctgaccctgactctgcgtcacgaggtgaccattcgcggcggaaacaaagagagaattggcctgactactcaggtggtctcttatcggcagttgctgcgggcgtgagtacccagaaggggagtggccacctgcagaagcagaggtcaaatccacagcagatcgctgaagtgggctgcattgagaacccggaggaatatgacacacagaagaatggtggagactgctttcctgttggtgctgtgggacgccaccaccttcgtgagcagcggtaactgtttcatactgcgaggggtgactcagtgtagtgaactgccccgtctgatgtccgggggagggcgcagggggtggcacgacaaccgatgcttgaaacccacggacacgacctccgtttccgcataagggagtgcaagcgttgtcctgtccctgggatagtccagaatccgacgagttttccgaccagtagtcctggaagtacgcagtgttggaagagtcgtgccgggtgagggcgttcgactccttagacgggagccggggcaacgccatcttggtgggcaaaccgttgaacgagatgcagttgtggtcttcctcccccgagacttgaggacgaggatcggcgtccacaaggtaaaacaaccgatctacagacaccccgtcagaaggagcacctctcggggtagaagctcccgtcaacgcgccagctagcaagcaacagtggagggtatcgagacaaaaaggaaggttgatcggtgagcattggcagaaataagtttcacgctaagttccgtcccttgcacgcacactccaccattgtcccaaaactggaaaaactggagatatccgttcttgaccagcaatccccgagggcaaaaggaggcatcaagaacctacacaagacttgtgacagcgacacactcgcgtagccggtgtagcgttacgactgaggagaccagaatccgggacctctggacgagcaaaggaagctagatgatttcggaaggaagaagccagatgcctgaaagaacagggtgcgaagcaacaagtctccaaactggtgaattccgacacgcaccggcgctccgctagttggcttcagttttgacaagactgtcggttgtaggcgtgacagaggcgttacgacaacggcgaaaattatctcacgaaaatgccgcgacaaaggaataccaagacgaccgtggcttttccaacaaaatactgggacaaatattcccagtacacgcagtacagacacatagtatcgacaaaactctgcaatggaaacagagaaaaaggtgccaggacggcagcgaccgttgcatcgcgtggttcggtggactggcagcgcgatcagtgcacgccagtgtctatcgcggaaagtatataaggtggcgcaagtgttttgggttaccgattgtcgtctgctgagagtaaggcgaaaaaaggtctcagcaaacacaagaccttgtagaaaccctgaattttccgtcaccttatccatggtccagggcaaacccgcgcgcacggacaaacaggcaagcatcgacagctaggcaggtctgcgcagcttcggtactcagcacgacccttccgccacaaactagctagcgaggggatcacttgggtaacagcaattccttctcaacgtgctgcacgaagtctcctctcactgcgtgcaagccctggattcctcatacactcccctcggccatgtgcacgcgaaaactcctctagtttctcagtcgcttccgttgtctgcgcaggagaggaatcgtggatcatggtgacacacgcgcctgactacggtccacggaggcatacgaagcacacagggataataaacacgcttgtccagttactatagatagacagtgtcgcacaatctataatttagaagaactcatgcagttgcgagcgtcaactatctggatacacagacgcgctctttcgctgagtgccaccgctgctgtttctgcataccgggcgcccaacagcgtaaccaccctcttcaaaagctcattccggaagacaggactgcctttctcgatttgaccgcgggcacatacaagacaacagaggaggatgcctggacaagggtgttcttcactggaagatgtttcttgaggttcgtggattagtctgtgtatcaggaagcagtcggaaaacgacgcttacctgccacaggccacaccctagggacaccattgacggaacgggactggcagggacacgcaattctcgacacgtcttgtgtgcgggacaaagaactaccggattcttcaccagaaagtacctacaccttttagaggacaatttgcgagaagacaattattttttgtagatttacgcagcgtaggcatttcgcgtttttttcgcggtgtatgccttgcgcgctggcaaagccttctgccatcgacagctacaggtacttttcacagtagagaacgcttctttactcaacttcgccgcgtgtgaaaaggtgtagcttaccctttgagtacacttaacaacagaatctgcattatcctgaggtctgtcaaacccaacacagctattttcctgtggattgttagcgaggggaagctgttgacaattttcgtgattattcagcacctttttttccccgtgtctccgcccgagacgctctctgcgccctaccgcaattccacgaagctaagagccaaagacacagaaaaaccagtttctctcccccatgttctccgacaggacattcaggaatctgtgacttcatttcccgtttccgcggctgtctgattgtttgtccgattgtctgactccgctatcttcgattgtctcccttctccctctgtacctcctagttttcttcgtctggattaccactggcttcttcccctcgttgtcccgtgtgctgaaccttttcctgcgacgcattctatatgcgaagcgggttccagacaccaggccacccacactccgacacctccacatcacctgaaagacccacgaagacctcattcgccctgcctgtgactctgcccctacatctaccgctgtagctgcacagctcttccgtcctcacctacgggcagatcctcgcggttcttgctcggctgcgtttccgcgttgttttcctttctgatccgttctcgctggcacactttaactccatttgttcgatccttcacaaga

SEQ ID NO: 1416 - DNA, 4276 bp, Toxoplasma gondii
  source 1..4276: mol_type = genomic DNA
agaaggagaatccgaggcgcaaagagagactgcgtttcgatggaggcgacttggagagaacctggacaacaaggtgccaggctccgcatgcgcttgagcccattgagcgccttttctcacttcccttctgaggtgtttctcacgcacgtgacccttccaccccgcctgtttgttctcattcacggcttcagaaggtagcgagctgacaggcacttgcaagagacaaattgttctttcctgtctctgactggtgattccagcatgtccttcacccacagaacccttcacatctgtcgctcctccaccctgccgtccccgtccgtcaggccttgcaggtgcagtgttgtcagcatcgttcgtcccccgtagaggaaaaaacctgtttgttttcttctcttcgagacgggatccttctccattggaaacatgggagagactgccgttgctatgtcgccgtgagtctcgggcagcgcagaaagagtctcctacgatggaggcatttgttccgtattccatgaaagaagacgtcagcgacgatgcaactgagaagaaagcggggcgagagaatcgtttttcttcgtcttctttcagtgccgctaaagtggcgaggctgccgagcgacgcggaaagcaccgccgcagcgcagcgcctcgacgggaggccagagctggacggagggaccatcttttctggtgaggaaaccgccaacaaaaaatttttgaggagacaaagtaagacagaaaggagaaacctgtagaggaaagcttacgacatggtgggcatgtcaagttgctagctaccttgttcaacaactgcagacatctgtcgcggcgttcgtccgccacgtcgaggggaaggaaaggtcgtgaggaagaaagagaggagagaaaaaagtctctctcccagataaaagcaggtgtgtcccttttcaacgggaaaaggagttgcctcctggcagcttgctgaaacaattccgtggtttgacaaacttttcaagttaagacgcgcgcatgcatgcggcagcgccgcgcatgcagccatttgacggcgtgtgcagcagtaattctcagtgtgactaagctctgctattacagtggaacttggatccgcacggcgctggacaagaacggaaggggacatgcaaatggtggatccttcgtcttcagtacattcatttattgaaaaggtgtcggtttagccagctgctataaacttcgcgggcaagcgggtacgaaccgttcacgtcgcacgcaggtgtcacgagaagcagcttttgccggaccgtcgtagaaatgttgcgggggggaaaaacgaggctctgtgtaacccggtgtctcaacgtacaactagattcggctgaaactgtgggcaaccgcctccagcaagggtcaccgacggcagccaaaagaaaaccacaaggccagaacggtggaaatcggtaaacctagaagcatgtgcaaaggtcagcaagccacgggctgaagtaagtaccgcatgctgcaatgttgaccttccctccagctagaatagcagcaggctgctacgaaaaaagcggttccacaccagtgagctgctccaaacacgacccaactccagaattaagaagaaaatcaggattcatggttccagaatgcgttacgtgcacttcatgtgggaagagccgacaggaggaatctattgagtttgtcgtgtgtcaactatggggcagcggctccgcagacgctggatatatccggtgcatgctggactgttgcgcaggttgtatagtaccaaaaggccaatatagatgacacggtcaatccggacacgcgtggtaaattttcgcttcagtgtagctctcttttgatctgaaaactcgatgctgtatggactcgaggaagtctcattcttctgtcatcccgccttcctggccctcctctgcacagtgtttactttatctcccatgttacccatgggtgttgcgtcagcgaggatccaggtgcgttttcaaaatcagtatatgttagcgagtccccacgctgtcgcacttgtctccagtttggaatgggaggggtaagaatgctgtggaccgtcagtttctgcagccgctttctagggtgtacgtgccggaatgtttttctttccgtgtaaatggaaggcgcaaagcagtcagcgtatccttggttttcccatctcaggagcgagtcctcctgaaggtacaaatgactcgacggtttcccgtaatgcgaaggcttcttgaccaccctaaaagttgcagggatattattgttcacatgtgtcttgaaacgcatcgtttaacgtccggttccagagacaggtaattccttgggattcaactgtgtgaggagcccgtccacagaaaatgcccatgtcaccacggtcaggaacttccatgtgcacagggagctgaggggcctgcgaatgtacccacggtgccagcatgattcgttgaagtgttcacaatccatcggcatggccaactcgtgttgaaacacttaccctttatgcagttttttgaagcgaagcttacagaaagtacatcaagcatatgcagcgggagaagacgtgccgtatcactgagtcgcgctgcgtatcacgccagtgtttcgagcaccgggaattttctttctcgactgtattagctaacagctgcggtgatcaaagtggcaaatcagtggaaatgcaacctgcattttgggaggtcaacctcaccaaggaaatttcattccccccacgtacgctcccgtcgttgccccgtacacacggaaaataacgatggctcacacattttggcatccggacgaatttcatcggccccctgggcagcacccacaaaacacgtccagaaatcggggcgtttgcagaacagcatcttcattacccgatcatgaccgtcacatgtgcgcagcaaatgcaagaattgtcttccccttccttgtgcagtgagccactcccactatcttttgcctcctgacaatactgaagttgtttgattcgctctgcctgtctcccaatttacctgtgccttcaacttcgtccttccatccaccagaatgcaaaaatggagcagctgacatgccagagaatgagcgatagcccccctcgtgagtagtaaggctgctttggcgtcttgttgcactgcaaggcacctcctacaaaaggtttgccgtacaaacagtgctgtgatcgcctcggtcgacgttgcatcattttcaattcgcagcactgtactttagtgctgtcgcacatatatatgtagtgtcaggtgcatgtgtcgtgaaggttcacggtctatttgtcctgcctcccagtaggtagaagcagaggtgctaaggcactgttggttccaggctggtgatccaggaacctcgcttgccggcacaaccatcaccttccagcacctttgtacgcgtattccccacgcatggcatctgtatccttcgcaccatgtggtgctttcgactaggacgaatctcgctcaacaatgcactgtttcaggacgcatgctaggcggaaagacagcgattcaattgattcggtggaactctgcagtcaacaacgcgtggctgccaccgtccgcaagttcggtcggactgtgatgaccggcgaatcttgctggtccgcgcacacggcttgtctcggcttcacagtccgcccttcgcctagaaaaaagacatcaccaaacacgtcgtatcactgactcactctcatttattctcagcacagatggagtagaaagcatgttatctccgatagtttaccttccacaccacgacgcgcatacttttgtagagcgagtctacgtacttgaccgtccaaacggcgcgggtgttgcacgtttcgtgaggtggcggtgagcttgtgactgaacaccgcacacaaagacttctctcagtgtcccggtccgcgtttgtgatctgccttaccatcgaaacagcacgggctttttattgcgaactgtttcatggctacgcgtcctgtgagtctgcgtcagtggctcgggaaacagacgtttctgggacgtttgtgggacgttttcccttgaaactctacgaactaaagggggatccaaggctcgcgggttgacaccactgcaacgatcgacgccagtgtggtagggctgcagactgcaccgcagcagcgtttcgagttctctttgaagaggtggttttattgcagtttggtccgtccgcggattttcttcctctgtgtgtccgtcgagtgctgtttccttccgttttcccgtacttgcacggttccaaggattagccagcca

SEQ ID NO: 1417 - DNA, 4691 bp, Toxoplasma gondii
  source 1..4691: mol_type = genomic DNA
acgtcgttcctctcggaaggagggcgacggaaaagatgcgatttttcgatgagactcagtggcgtctcccgacggtaccggtcatgatagagcaatgcagcaatcaactctttcacgtcttccggtgtttgttcggaaccgcggcaatcgtcgaagtcggggaccaggcgatctcgttctatggtggccacctggttcatgaacccttccatgtcagctcgatttaggtgcaagccaaagggtaagcgatgacaccagagtttataagaaacgactccgaggcaccagctgtctcgactttcgagcaaatccaaccgacgatctggctcactgaagtagcacgcagcgcgtgcaggctcgtgcagggaaggagtgcctccacctcggggaccgcagggccccgtccggcggtgaccgagagattgagcctgctcgaaatctccgagaaaaacgcgtccgttgtcgtccaggaagaagttttcccacttgacgtcgccgtgcagaatgccgtagctatgaagccgagccacgcggtcgaccatttgcttagtcagctcgagcttgactccgtccgggagacgatgcgcactgaaaagttgccctacactacacgccaccttatgaaatccgaccacaacactcgtcgcaccgaactcctccgttaacggagtcattcgcggcttccccgcgaggataccctgaaacaacggcaggacaaacccttcttcgtacaactgctcgggtgacttgtcaggtggaaacaacctgagtactttcatctccttgcgaagagccctggcgaatgcccaatcctcttcgcgcctccaggcatcgtggctgaggtcccccacggcctctagaaacgtgctcatacgcacaagcaggagtttcagtgcgtatacgtggccgtcactgtcctgcgcctcaaaaactagaccgtttcctcccacacccagaagcgggcctctgacaaattctttggactcagatgcatcagagagagattcgacaaagaaacggtcgccatctggaaggtacatgttgaacgcttcgaccagtttcttctttcgcgattgcgagacaatgtcatgcgtgtttgtggtagccacgagatgggcaagtattttcaccgcttccggatcagagagggactcaatatgatgtggatactcgccaaggtgtagaagctcgctgactagttcgtcgtcaggtgcgttgacgctgtcggtttgggcgctgtcctctccacgaaggtcgtggtgatcggacctctctgttacttcttcaattgagtgtacgactgctcttcgcattacaaatcgatctggatccttggcacgatttctggagtcaacagctggacgcgatgaagcattgtagacgctcctcagaccagacagtatgcttgtcgctgccccccgccgactccggtgacttgtgggcaactgctcttcagaagccgttgccagtgcccgtttgttgcgaccggccgttggttctacatttgattcagttggactgtgaatagacccgacgggcgcggtgttatcaatttctgtataggaacggaaaacacttggcgttgagtgactcagccggcgcggagagttagctgacgcccataccatagtgttcggaagcagcgaccttgacatgtgcataaacagccccacggaatagcagcacaggagaattcgccatgatgtgaagtaaggaagaaggtctcggcaaacggcagccattttgttcaaactgtggagttagccttatccaggtcaggcgtacgagacacacagctctcggtcgcagagagcaactgggtgtctagcgccctcctgcacacgaaaacacgcgtagcagagctattgtaggtggtatgcgtattttccgccacgcgtggttaaggctacggtagaaaatgcggagagtggaaacctgtgctatctagtctgcacgtgtacctcattactcggcagcagacagtgagctcgcggatcctcctgaaacggacttcttcagtgcctcgctatgctgtcccacgtctcgatgcgaaagcgcatccgagggaaccatggggtcaaaaaagggagaaagaaccagacatgagtcatttacaacgacggacatgctcaaaatccatctgctgttggcagcgagccagtattcaagagcatggttacgcacctcgagtcatccgaccctcagacgggttcaaacctggaaagtgtatcggttagaccagtcaaaaacgagtacatcttgtgcacagaccacgctaatactctttctcagcgccgcacaaaggacgacgagcgcggataactgcacagcagatggctgacgtgaatccctgccacgaaaccatcgttctcagcatcaatttcacactttacatttccttttgccgggtaccattgcgcaggacgttgctacctatcaacggcggttgaaacggaaacacttcgacgcgagactgaaataggaagcgtgtttgtaaccaaggtcaactgccactgacaccaggaaacttttggcgtcatgtttgtgcctataaaaagacatggtatcacagcttcatctgtacataaattgtgaagaaggagtcactgttataaaaccccttgccgcattccgtgaacggaacactgggagacacgacaggtgttgacggtggaggcgtaaacaccgggtatttcccaggtttttgcaacgcccctcccggtacgggccacccccaccaaaaatgcgcgacgagtgtctagaaacggagaagttgcctcagtggttctgtgtgtctgcaagtctgcatcagctacttctgttattaaaggagcaagaatcctgtggatagagactgactaccacgatgcaatatagaaaaacgtaaattgacaccagtgagtcagtcgacttaacaaaactaagacacggtcaggctgtagcaaggttcccttgcactttcagtgccacaaacgcgttcacaccgatagtttatatggcgaactggggactcttgaacttccgaatcaaaatgtgtcctgtcatcgatggaaaaatgtcagggttgatgctgcatcggctgaatgccccaagccacagctagatgggtttttaccttaatacaaattctctgcggctgctggaatcttccgtgggcacaaattcccactttggttcacggttaaggtttcgcctcaagaagtgaaacaacacatcactcttgtctggaaaacggcgaatatgagatttccttggcttttccacagcatttgccgttgaacattcaactttcataggtgaccagtagtacgcatgacgcaggctagttgcttgatatggttcgagggcgttgggaaaatcgcattctctgctgcctcggtcggtgggcaaagttcccaaagaattgacacaaaatcgcagagtagactagtgatgtggcacccatggtcgccataatgtagttgcaacaccaccggtacataaacaccaaatggtcaaaaagtggaactgcctgacatgtcatactcaaagactttcgcttgacagtatgacgagcctttgaatatgcgtgttagggacctaggtggatcacgaattcttcgagatttctaagaaaaggtactcgtcttattcgtacctctagttctgatatggtgacggctgttctgtaaacaagcccctaacacaacactacacccatggctcccgatggtatcgctcaaggaactgcccacagaaaatgacgacgtactgaatctacattaccagaagtagatttgcgttcagaccgcaggtaacgatttgcttctacttgttagacacggacaccggtcttctagactgtgaagggtgttcgttgacggaaatccaactctttgacatctccataaacgcggtttttgccactggcaccgttgcttgtcaactgaaaaagcagagaggggtagctttcgcacgggatcagatcgatgttttctccccacgtagtattcttttatgcactgaggtgctgcagactacattagagggaagaggataaagtgttctgcctgtccactcaaacaatcccccacaagatcaggtatggatcggtcattttccattcttgtacctgcagaccaccgcatcacacgatacttcctagcaaacatgataatcgtggcacatcattctcagtggcaggtcttgctccattagtcttgtttctcgagttctgtcctctccccccccgcgatgagcttgatacggtgagaaatctgtacacttccaccgacgaaaggaagttctcacacctctcagtatgtcgggttataagttctgttcctcaacagaagattcagacaggactatgtgtagtttctgactgagaatggcgccacagtcccgaacaccgattcctctatacattcctccgttgggtatggagtcgcaagggaagaagtcagactggaatcctcttccttgctgaagagaggcaatccagcgtaataagcggcgtcttgcaaccagcggctgtatcaagtctcaccgtcgaccacacacgcggttgcacattttgcccctgaaagacttccacagagccccgatcgtacttggaccgggtaaaaaagacctttcagctctaaccggtagtccaactcggtttagatatgtcctcaacataacagctatccgcttatatatctacggaa

SEQ ID NO: 1418 - DNA, 1069 bp, Toxoplasma gondii
  source 1..1069: mol_type = genomic DNA
agagacgtctgacagaatctgcaggcttttcagacgcgtggagtttcgtcgcggctccctctcctcgaccttgcctcctccctctctctcgtcctcgtcctcttcttcagctcctaaagcagcagcatccacttcctggccgctggcgcgcgcagctgctgggaggaaaggcagtgaagcaatggcctctatcgcctcagagagagcgcggccgctctgctctggcgggtctccgttcgcctcttgttcaccctctctgtgtccttcagtgagctcgcaacatcgtccctcgcgactccgtctggatgcctcgccgcggcgcggagaagaaagaagacgagccaagtcaggtcgactcggaagagcaagcgaaagcacagacgccagtgcggcattgtacgtcgtggtagggggacgagcggtggggccatggaaggctagcggcttctgctcgaaaggcgaagaagacgaagggaggtccgctgcggcagccatcgggactgaagcgcgggtgaacaagcaaaagtcatgtcttcagggctcgcgggcgcgacacaggagtgaaaacgacagcgtctgaagcgacagagagacgcccacacgcgcggcaccgcttgtgtcgctgctgcctccaggtcttcgcggctctcgcggtcatccctgaagtcctaaacccgtcgtttacataactctgcctcgattctccaaaccgcatacgctggccgacttagtggggtgtacatacacctcggcaattcttctggtgtacatacacctcagaagactaccgtggtaatctggggaaagacagttttgtttgcgtgtcgacagtctggagttgcgttgttcgtcggcatcggcgctttccgtcgagcgtttctgagcgagcaatgctgtctttcccagtctcgcaggatctgccggaaacgggaagaccctttcgactgggattctgacaattcaactgtgctggcgtgtgtcttcccgcgctcggccacccactcacgcaggcgactgcggagaccaccctgagaggtgcgaggttgccctcgctttccgaaagttctga

SEQ ID NO: 1419 - DNA, 2743 bp, Toxoplasma gondii
  source 1..2743: mol_type = genomic DNA
ggactgaagacgttcgacccgcagcagaaaaaggagacagacgaggaggaacacaggcgaaggcggcgagggagaaaaaggagatagaagcaacggtacagacaaaaggagagaaggacaagaagaaggagacggagggggttcggggaagggaatgaaggagaaacgagtgagtgacgaaagagaagaaagaaggacgcagaggagagagtgaaagggtaggagaaagaatgacagagaaggcgacaagagaggttcgctctctacctggtacacagcgccgcctcctgtgtagcgtcgagcgagcttcacaccattttcctccattttttgaatgttgcattcactccaggcattctggtgtcgcccgatgacgatggttttgtcatttctccacagaaagaggagcggcgcacgaaaccctgccctctgagtttgcgcctcgtccctcttcgtgccgctcccaccgacggaggtcaccaggcctcgaccccgcccaaggacgtcagcgagaaagcattctgctgcgaggttttcgacgatgtctgaggaagcagaagagagaatgtggaggtctctcgagctcgacacatccctggaagtcgaaaaagctgcctttccctgcccgtaggaaagggcaggagtccgcgacgaccaagactcacgcagcgcggcaggcgaacagtgagagtttggactcttccttggagaggagcagttacgcggaaaccacggagcgtcgccagagcaactaccctccttttttgtctgaaaagaatggaccaagcaggaggcggtggaacttggagaaaacacagatttgcgaacaaagggcagaggaggacgaagcgccgcccgactcgtgggtacgagggacatggtgtggaagaaagaaatccgctctgcaacagaagagaagagactcgagacggtgagtctcgcgagggaagcacagggaaaaaatctcagagagagggaagcttcaagtggaggcaatcaacgacgggtcggtgagagaacggaagcaaggacagcaaagattgaggcgacaaagagagccgaaacgagcaacaagaagggcgcaaggaaggggatgagaagagagagacgagagaaacacgaaatcaagggcagagaatcccccagaagcggtcagccaggcccaggagagaaagagacgtgaaacgcagttcgctgttttcgcaggtgttcagcggaacccgtgtgatatctggaagaggaaggccacgaaaaagccccgggaaaactcgcgagtcactggaaaagagaaactacgtggggaatgtgaaacaatcgtgagcagcgaagaacaaacatggcaggacgcggcgccaacgtccacgagccgacaggcgggcgagagagtctgaagaaggaaagggggcaaaaagagaatcggaagagaaagaaatgagaaggtcaacgaggtgagatcaacaacagcgctgacgagtagagatgcagcggaaatgtggaccgaactggccaagcgcgagttgaactgccgtgagtgccacaagggggggggacggagcagagcccaagaggcgaaggggtgtagaggcacttcttcgtcaaggagaaacaatccactgttgtcattgagagcaaaaaccgatcaaaagagtgaaaaaaaggaaggcgatgagcctcttttgaaactgatccaaaacccacaccagatgggactcgaacccacaaccttatccttaggagggatacgcgctatccattgcgccactggtgctcaacaagtaaccctctcgcacgccgtccttcgccttctttgatgcataccacgtctccaccaagaatcgcacgaagcttccattttccaaaaagaagcgacactgtccacacgtgacatgtgactctccgcagaaatctcgaatgcgcctttcaaggtgagcggcaactctctgagaagggcagcgtaaggggagaacaccgaactcggaatcagtcgattgtttctaactggccagtttcgttcgtgtggacaacaggatagacaacaaagagtgtttcaacccaggggtgatctataaccgcaaaggtcgctcacaactaggcggcatttaccgaaaatcgcatgtcgtgtctgggttacaagacacacaaaggcgaggcgggagcccttcgctgatcgctataccgctgctttaactgttggctgcgttccctggaaacctccgtttccttcagcccgagccacatggattatgtcgttgtagagtgagaaaaaattgggaacgcggaagcctagctgcacgattgcgaggcaaaaagtcggatgaatcgacgtcgttgccactcgacaggcgtggcggccaagcggagtgagtttctcaacttttttgtgcatgcgctttgaatcgacagccccatcgcagccagtgaaactctccacgatggacgcataccgttgatttcctagagattcaaactccgcttagttctcaggaaatatctttcgagcagctgccgccgcgccattccttgtgctgccgaaaaacaatgcaaagtaatcgaatcgcagcgacagtggcgagcatctcttgcgtttgtggcacgcaagagaactagccgttcctttcgacgcaacacgacgaaaaacgccttcttttcttttgaaaaatgctccgtacagtcccttccctgttctgacaggtgctttccccgacttcctcctttggttctggtcgtccgactttattgtgga

SEQ ID NO: 1420 - DNA, 3078 bp, Toxoplasma gondii
  source 1..3078: mol_type = genomic DNA
cagaccctgcaagctcgtgaaaatgtttccttcttcgtcgaacgcgaggacgccgacgtctccaagttgaccgactgcgaggcgtcggtctctcgtccgaaaggcgattcgcgcgatgggcgcgacgaccgcctgcacccgaagcgcactgggagatacctgtctccccggagaagacgccggccgccccggcgaggcaaagatccaggagcgaccgcgcttatgcggcgtgtgatgcgaggcctcgacgaggactctggggagacagacacccgcgccgctggccgagagcgaagtggaggggaggagacaggcggacgccggctgcgaaggcgcgcagtcgggatggagaacccggatcaggtcgggatgctgcaccgaccagaagaagcaaggcgcggccgcgagagacgagccgttctcgacgatcagcagcgttcgcacggagaccgacgcggacgcgagacgaccagccgcctgagctggcgagggcaggagcacttgcgcaggacctatcttcagctgaggctgctcactcggcgccgcacccgcagcgacgccgggaagcctgcccggcgccggcttctcagggtggacggcgagaaggagaagagcaaggagcagaaacaggaggaggcgggagagagagaacttgaagagcaaggcggaacggacggcggaggcgccgctggaaggaccgcaaaacagagactgagggcgcagagaagagggatgcagagaggtcgacggaaacccaggagaaagagcacaagtcaccgcagaagagaaggcagacgaagagacagcgtcgaagccgggcatggccagaggcgcctcgtggcgtccgacaccgtcgagctggacggtacggcggcgcgaggccgcaaatgcgcgcatgtttagagacaagaaatgaaggaaaagcggaaagaacgaagagtgacggcagtaagaaacgatggtagtggaaaaaaggggaaaattcgggaagaaatgagacaaaagaaagacaaactgaggagagaaggggcgacggaagtggggagtgtctgtacacgaaagcgggtaaaagtagcgacagtgtgaaggaaagtgagacgctgagcgtaccgttgatctgccgtcacacagaaacagaagccatgcggccgcctggaggaaaacgatacactgtaaaacatcagatcgacggcaagcaggttgtgcggacttcgcgctgactgtgttcggcgatgcctttcagatgtcgcaagtcaggagagaagcgtgagtcaggcaagaggaggagaacgcagagaggacgcgagaagttgacagcctcgagacggtcgaagacgcggagacagttacacagcaagacgccatcgttggccaagaagagcggcgcaggccgcgacccggtgagacatcggtttcaccactgtcagccgtcgtgagcagtcgaggaaggcgatggtggatgcaggagatccgacgaagcgtcctcctcacgagccgcctgaagaaggacagggacgcagcggagggagcgagaaacgcgaagaaagaggagacgaaaggctgggggggagagtgacaaaagatgaaggaacgcgttccgtcggagtctctgtccacgggaggcgtcgtctgtagagagaggacagaagcgacgttttcgcgggcgactcggcggcaccacacgcactgcggcggagtctcaagttgacacactggccagattcgcgaaacagcgaggaaagatgtgagcgggatgaaaaaggcggacctgccggagaacatgccgtccagcgtccaaaaaaaggcgacgaatgtgccaagccaagaccgtacgaaaagacaaggagacaagacgccagacaagaaactgtggagtgcactcgccgagcacagcgtcagcgacaagtcaagaagttcgactggagaaaaaagacgagagagcaatcggaaacccaaaaaatatatatgtgcatgccgctgaacagatggagactgcgggtggagacggtaaaggcccttgggtggtcgagagaagtcaaacagacgctcccgcgtttcccccagtgtgtgttcaagcgtctactttcaaagcagaaagattgtctgggcgttcgcagcttcgcttcgttctcaccgctccccttttttcgtctccagagagacccccccgtgggcggcggaagaagcctttgctgctttgcggttcttttccgcgcgtccccaccctgcctctctctcagcggtcgctggcggaaacatccacaaaaagaagaagcgcgacttcctgcgggggaagagacggagaagcgcgactttttcttcgggacatcctctcgcctttgactgggaactcgagtccttcgtcttttgtctctcttcactctccgcctcgacaccaccgcgacgcctcggacagctggaaaagtcggaaaaagagaagaacgagaagaacgcactggttcgtccaaagccagcacggcggaagtttttttgacggagaagctgaggaagaaaagaccttcggacgacgtcatattgttctctcccgattccgacgtcaaaaatctgctctccctccgtcgctgctctttttctcgagggtgcctgctcttcttgtgaaaagagcgtcgagatgcacacagctgtctacgtctgaatccgttcatcgggtcgatcggaaggacaagcatcgcgtcggacatctctcagtcgttcttcctttagcgcctgacttctgctttctctgatctgcagcttcgaagacgcacagaagactccgtttcctttttccccatcgggcgacggggggaagaacggacccgcgccccccgagagctgctctcgtttttcctcttcggtgttgcgcatcacactcgctgtctcctcgtctcgcctcctctctcctcgatccgtcggattctcctttccgttccttcccctccttccgttccttcccctccttccgttccttcacttctctcctctttctttcgctgcttctcctcccagtctccttttctctgtcgcggcgtcctcttctcgcgccttcgccttcccctcgtgagttcctcgccgcca

SEQ ID NO: 1421 - DNA, 2852 bp, Toxoplasma gondii
  source 1..2852: mol_type = genomic DNA
cagcgccaactgcagacaaactggagattgcgattgtgaggaaagacccggctgacgattcgcgtttgattcagcgcctcctctcaaacgaagaggttacggctctcatcaaaaaggcgcaagagctccaggctgaagaacaggctccgtaaaaatgagacggaccactgaagccaatggtcattcaccgtcatatgtgacgggggggttctgctgcacttgtgccgtcgtacgcaaagtgttagaaaaagacaatcgatcaagtgcgtgggtgtgtcgtttgtgggatggtggtgaagctaccagtgagtgtcgtgtagaaaaacgagttctgtctgaaaagaaaaacgttcgagttttacgaacaaacagtagaattcggggaaacgggggtcacaagagctgccttctatttcgccggcccagaaaaagtcacacctcgggtcgcaacatcgtagattcccgtacacgagagaatctgctttttctccctttccaaagtataggaagtgccttcgactcagggacacagcgtcagaggctcgttgacaggaacaaatctgctgttgctttcgcaaaacataaatgtgcctttagccagaccgtgctgttgtttgaagctggcgaatccgcggctggaaacaaaagtgcagccggaaaagaagtggaggactgccacgaatgtaggcgaacgaatgtgcgatgtaggaacgtcacatcgtcggtgctttggaggtgcactaaaacagatttcgggtcttacttccggtccagccacggttttacccgaagtaagtaaaggattttctcgaaaaaaacctgaagagcgtgaacgtgacacacgggaaacattaaggagcaagccgtagagctaccctgcaacaacggtcagagtggtagactatgaactggagataaaccgttttcaagttctaggacaggccagcgggtgtgtgtgcagtgccaccgctcaaatagtcgcagggcgacacccccggttccgagggtgatagaaagttggtgttccttaccaacagtcgaagggcgtagagtgaatggcattctatggttctagaaatagaaccatcggtgaacacttttcttcgcctggcgactaaacagcggaaaacgaatcctggtaggtgaacttttgtaagcactgacggaagaactcgacacgcagagtgatgacgacgacagtctatgttttttcattcatttttaccgaagcagcgtggagacacacaagaacaaacccaaacggatgtccgtccagcgatgctctgacccttattcgtatcgccgcaagcagttctgtgtgagaaaaagtcgatcagcgagcgaaattcgggaaggtcccccctccactgacttggattaataaggagtggcataaataataacaaaccaccgttttttggatgcagttgcctgtagttccctgagcatacattctatagctctgctttggacactgaagccatcccacagctcaaccatgtattgtctacctctgttaattagtgtcagcactgatattctgtaccaactgatctgcaaaccgattccaccaacaatatatatctaacgtggtagattagctcaaccgtatcgcggaatgtccgttcaagggggctgttgtttactcaaagccacactgcgagaacgaaacggcgtcaacgttccaagtcgaaactacagtaggatgtcaacgaagcatgcattctccccgcaaaatgttatgtgttgaaaaggtcgagaaaacatgaaatgtatactgggcagctaccgttgagaaaagcagtgtgggtggaatagggaaacacaaaaacggttctagagtgatttcgcttgtacgggaagttggattcccagtccacaacggaccctccccagtcgagagctgggttcatctgcgtcgttctggcagtttgtccggtacgcggggaaccgcagaggagcgattttgccaaagatgtcagcgttacataaaccacgaggaggtgcaataagcctttttccagagcacccgttgctcccaaacgtatgctcaggttgaacgttcttgttgcgcccgtggttttcacggtttgctaatactcgatgtgattcgtgataagaaacaaaggccagggggagaggaatgctacaggaaggcactgtttcagttctgcttccttctgttgaactggcggtaccgttttccaacattattctcatcgctcggctgacatcatcacaacctcaaattcgagggttagaacgtcagccacatgaaagattaaaacagttattgttgtggtcagtggtgccaaaacggctggagtttcagacttacatcgagacagacacgcgatcaaggacgcttgcagaaaaacgcagcgatttcgcgaagtgtcctccccggggataggtacgttaagatgttttttggtttgtatctcagcacgccgagcctgctataattgttttcgcgtgtgtgttagtgatgaagccacgtttctgcgtacagcgtagtttttgatgtttcccacctccaccttgctgtcaacaacgtacatccaacttcccctgcggcgcaggatagcctgcaggcaaaagaccgaaatgcctcgcagagaaactatcgaaagcagacgactaacactggcatgatctaaagcctaacatatgaaaaaagagtctcacgtccatttcgaccgtcttttgttggagaggtcaaaccaacggtatcgtgtcttctcacttgccaaagtacttcatgtcactaggtcggacgtccacatccgtttacacaaacacaaccggttcgtcgtatacccagggtgtttccctttctgatttatgcaaaa

SEQ ID NO: 1422 - DNA, 2314 bp, Toxoplasma gondii
  source 1..2314: mol_type = genomic DNA
cgtggaagttccgctttgaagcctgtgcttccgcaacggaatccccatgtcgaccgattggtgaggaagcgggagcgcagtgtctaatcacatatttatggccgtggggctttgtacatcgatgggcgtttcgtttttctgtgaatctctcttgaactcgttttttgcgcttcatcaattcgcagtgttccacacagtctcgctctcaggtggcaactggggagcgaaacgttctttgtcgacgttctacaggacgaaaactcatgcagtctcgtcgtcacgttgtcaagaccgggaataggtcccgaaaccgactggcttactgttacggagcaacgctaaaacagcagagaccgcacatgcgcggcacacgcttgcgcacgactataaccgagtctatacgtacagaaattcagtgagtaaatgtacgcgtctgtataaatatatctgcacatacctgtgtttatctgcatgttttgtttccaaataatcacgcaaaacccgtgcatgaggctgtgaaagggggacgctgttgtgtgtcttggatgccctttgcgacgggaacacaagcataacctctatgtcactggagatctcgatccacgaaaaccacatcctccctccagctgtttgtttgcactctcacaaccatggagattcttttctgttgtatcaccaaccaccggccgaagacaactggttttcgaagacagtgcattggcaccgttgagcgggatgcgacctgtgaagatggaccatcattcacagtgaggcggctcagcgtagtaccgtagttcgacgccagcttttttttgccggctacgctgaaatacgcaatctcagtggactcggggcacttaattcgccgcctgttaacgtcaggcgactgccacatcaagaaaacgcctgtgtctcacggacaggacgcttcccccaagtgccacagaacctctctggtgtacaaatagctgccgagtgttggacggcgctttccgcagccgttttcgtttcccgtgtgtccacctctcagcggcacttttccacgctagggactatcgtgaatttaagctgcgttcgagcgtgtccgcctcccactgcgacaggcacaagccactttcacctgcagcaagctggtacgtttggttctaaagtgcgtagaacaaattcgagtacgggtgctgctccgccgctcctgccggcctcgctcgctatgcgtgacattggaaaatgaaggattctgcggtgtcagtcgctctgtggctctttgcgagttcaagaaagcggggaaaaccgacagtcaggctgacaaagagagttttcagtgcacgaggaagctccgtggagcgacgcagggggcgcgcaggactcagagaactccggacgcggggagacacaaaaaacagaaaaacaggggacatgaaaaatcataagggtgaaaataaggattatagttcgcacaggcaaacggttatgacgagccggagccggaggagccagaaaatctatgaaaaggcctctcagagtgacagcgactctgcatgctccgtgtgtcgatgatgctcactgtttggccgcagcgtaggtttcccagtgaaagctttctgcgccaagacacctgcgttgtgctacagttttttcgtttctcgaatcacctgttccagacttgatcgagtttttgccaccgttctttcgctcgaaccccagtgtattcttcgtccagtcttttgccccttggcaacaagccacggcggttgtgcgagaggcctggatagtcgcagcagaaagacgtcgatgaggcatgtcgctggcaaaggcggcaaggcaccggaaaaaaagctcacaatacccagtttttgatcaggtgagcccttgtttgtctctcgtactgttcggtgaaaatgcgaaaactgaggcaggtctgttttgcttctcttcctggcggttgcgttggtgccctgcagttcgtgaactgcaggaattggcgttcttccgcggtcgtgtaaacgagcaaagacgcgcggcaggccctttcgcgaactctggctgtgtttatctcccgctgttccgccgatattactctcccttctttctccgtttgtggtgcctctcttgttttcttgattgccttggcttgtgccttttttccttcgatactcccggtcacgtccctgattggatgctgctctaaaacccgaacaaaagtgtgcacgccagcatgcataggttttgcgttgcactttccccgttcggtttggccgcagagatcgctgctttccccgctgcccgtcgtttctcctccccccacctctgtcca

SEQ ID NO: 1423 - DNA, 1827 bp, Toxoplasma gondii
  source 1..1827: mol_type = genomic DNA
aaacatgtgtataggtgtcttctttgccctccgcatctctgtctctcagtcgcgctccgcggctttctcgagacgagcttctctttcgccgttttctccagacatcttcccgcttctctccgtgtgcattcctcccctcgccgtgtctcctctcctcgcgatgtctcctctcctcgcgatgtctcctctcctcgccatgtctcctctcctcgccatgtctcctctcctcaccgtgtctcctctcctcaccgtgtctcctctctctgccatgtctcctctcctcgtgtgaagagtcgctgctgtgagttttctcttgtccacgccgtctgtcttctcgatgccagtgtctctcgcctcctcggcctgctcccctctctcttctgctgtcgcaatctcgcttcctcattctttcgatgcgaaggttcctcttgagcgcttgcgcgaacaaccgccgttcgcagaccagcgggtcgcgggaccgtgagaggcagcgagctgcgcaggatggaagggagcgtcggaacaccctgaagtcattccatgtggacacagactcttcgcagatgaggggaaagccttcgtttctccctgaagcttgttcaggaacgcgtagtcttgattgaagcgctgccggcgtagtccgcgagtcgagctctgattcaagctggccggccttcccccccgagtcgcaagagaagttgcctctcaactgccagtgcagacaaagcgcctcttcacagacacagactgggaggcgcaggagcaggcagagcgcgcacagcgcgacgacgcacagccgcgtccgcgagagtcttgacgcattaggtaggttttcaggctggtgcagtttactttatcactgcatgcgcagaacaacgactcggagctcgaaagcgcagacgccaccgaggagagcccacgggacgcgctagaaacttaaaggcgtccggggaagacccgattctccgcgcagagtgcgcagtggaggcaggtgccacaggcggttgagcggggaaaagcgagccgaaaggattcagcagcagaaagggcgcagtgcggagtcgatctgctttgaatggccgggtgaaacggcagagaaagccgttttccctcaccagcgagtctcgagacaaggaagtgtgtgcgcaaacgaacagcggacacggcgcgggtgtcgcttgtcaacttgcgcgattctgtgctgtgcgggtcaagacaagggcggactaccgagtttttctcgagtttttcttgagatttcgaaagccagtgccgtgcacctttcccctggacgatgggtaagcgggatctagctgcgaaaagttgacttctttccggcagaaaacttcctagaccaccggaggggcttccgccgactcggcgtttcgcggtccttgggtgacctgcaggagatcctccacgcttgcattttcgtgactcgccgttttctctgcatgcatcttcgcgcggtgagcgcgacccccccacagctgcggtgtgggacgcaggtttgcccgcatgtcggctaaaaacagctcgcgtcttttcgcttcagactggcgcatgcgcgccgggggaaaaaagtcccccaacgcatctttccacggcagccgtgtggcgacaacgtctctggcggattcgcgcgtccggaaggaaacagagcggccattcgctggttgtttggagattcgagttgcacgaggtttcattgtctgtcggacctggtccatgttttctgctttctgacgcctcttccgtggggagcgccgagcctgtactgggcgcctgaaatcgccgtgtgggcaaccgacctcgcgttctccaaaa

SEQ ID NO: 1424 - DNA, 2128 bp, Toxoplasma gondii
  source 1..2128: mol_type = genomic DNA
tttttgttccgtctcacccgtcgacgtggtcctgcttcatttcttcgttggggaaatgctgcatgtaggagacgaggggggcttgtttgacgaagtcgatggcggtgccgaaggagaattgggtgcggccttggtggaactgagacagattgaggtaaggaaaggtgaggcagtactcagtccctgcaagcaggcaggcgtccaaaaactggtccctcgtcacgttccatgtggaaaggagttgctcaagttcgacccagtcgaaagttccccgcgcccagtcgatgttaacgatgacgcgcggtacgccgaaaagaagaagtgaaggcgggccaaagatcgcgtccagaaagttctgctccgcaaagtacgcgagctgcgcagtggcaaagaatggcgcctggaagcattcgcagcccttgcttttgaggaagtgcagcgagaagtggacaaagtccgagttgatgcgactcgtggcgtgggcaaacttcgacagcgcgacttgtccaccgccgtgcgcatacagcatccagccttcgtcgatttgctggtgaatctgcgaggagaaaagcgtgtgggagcgcggctgcagaccctgaaacacgaagaacgtcgggatcttgtgctccttgaacagcgcgacttgttgagacaacaccgcaaagagcgagggcggaagcccgccaatcgcttccgcaagcggatccttcaaactcgccagcgaacgcagccaaaacactgcgtccacccccaaacgcatgtctgtcaacgcctcaatcttcccctgccggagaagcatgttctccgacaggtacgtctgcagatgtcgaaccctcatcttgactgtctgcgataggcgtagacggacagagccacctaagagcgataacgtggaacaggaaacaacacgtgcgatgaaaaatagaaaacggaaacgaggacaaaaatgggctgcaaaaaacgcggacggattggagggggggaggggaattgcgagacaaagtgctcgactccacctccttttcggaccgccgcctggtccgttcccaaagaaaacagatgcagacacgaagaaccaggaaacagaacgaaaacgccccaagaaacgttcttccctcggtcagcacatactgagtgttgccgggagtccgaacggcgcggcggcaggagagacaagagacggaggagagaaacacagcaaaggggtcgacagactagtaaccgcttgatggctcagaaagtgaacacgtttccgtgcctttcctgcttttcaggcacaaggggaaaaacagtgtcgaccctttctgttctgtcccgcagcgtccttcaaccccggaaagcaatcgcggcccgccgtcggctttctgcgtccctcggccggcaatactccgctgatcttttactccagaaaaaaagaaaattgacaaagaaaaaagctgaaaggccgtcaggaggtacagcaacagtttcagcggatcaagtccatcccagttgacgatcacgaacagtaggcgcacagcagtggtctcccactcttcttgtgctgtgtgtctctacgcctcatccgcctagtgctgcttttgctttccgctgtttccctgccacaactctttcagggacgcgggcggtttcttcccatctttagtgcactgccgaccagattgagggccctctacttttcaaggcgacgcataaaaaagccgatttgagcgcatcctctgcatcctcttcacccgtcgcgaacccgttgtactgcgaatcggggaagtacgacccgcgctttgacggaaaattttgccccagttttgctaagattccctgttgtttgtagactacagaggtctcagataagcagagttgtcatttcttctcgccgcgcgtatctgcttgttaatgttctcctgccggagacacacacaacgctcaaatccacagctcgtcgaactgactttttttatcggcctctttgaaattctgccacaattttttttcaaaaacgttatttgaagccgtctgttccaccttcatttgagtcgctgctcgccgttttcgctgcctttaacggactcagttcttctgaggttcggctgtctcgtcctgccgttgctgtgcaccgtcaccgaaaaaa

SEQ ID NO: 1425 - DNA, 2163 bp, Toxoplasma gondii
  source 1..2163: mol_type = genomic DNA
aactcacaagtttcactgaagcctctggcgcatccaggtgtagccagccaacggaacacgcgttagcttagcatgaatctcggaactgactgaacagtgtgagacgtcttgacttgtgaatcactgtcacattttgtgagacctttctaagaaatatgcggtgtccaaaggcgccccgttgctttttacaggtcctcctactgtcgaatgtggagtcacttattattcgttaggtgactcgaggtcgcgcgaacagccgccccaaaacgcatttgttcacgtggtagcggacagcattctaaaacagatgactgtgggtttcctagtcgccctaagccgaattactaggcagctgagctgagaacagagtcatgtgagtggtcgcgtgaaacatgaaaaggtagatgtttcgccgctcgttttcttcggcgaaggcaccccagaagtttcttcgcagatgtatacagctaaagcagtgcgattaatgaagagtactccaataaaggttgcagcgttgcagaagaaccgcttccaccatcggaacgactgtagttcggtttgttcagtgaaaacagcacacagcattgctctttttcagaccatggagacattccacagtgcgtccaggtttcgtgtagagtgagcagagccacgtacgaccttcctgttctggttaaagagctacttcggagcaggtgtgaaccatcgttgtgcagcagtatcggcacgaaccgagaaaatgccgcagccgttgtaatcagccagtttccgtgcagacgctattccccgtaatgccttggtggagttcccgaaacgagtgtcagtctgctctgcagacgtttcctcatcagagtgccacataagtagtccttgtgtccctaatttgtgggtcacctgctttgttgtgtatcgctggatggcttctgcgcgggtcctaggtcctctccacgtcaaaaaatctgtcatagtcttgttcacgttcgcatgacaacgccgtgagttgagctgtttgccattaaagctatcttcttccgcaacagattggtgagtaattatgtccgcatggtcagcacgtgatacagctttgctgtatcgtttccccttctgctcctccggacatccactgtagacattgcgtttgtacagctccatagcgaaattaccccgtaaacgaattttccctgccggtggctctgtctcgaaaatacggtaatgggtgtccggtcgcgaacgcctctcactttgaagggaggagagtcttctccggacttcagaattgctgacttgcacgcttgattcctgctgcagtaaactatggttcgcctggcttctagagataaaatccgtattgccgctgccctttgagggacgagaccgaggtggagggatacaactgtaaatgtcaggttccaaacacatgcacatttccctactggaacagttgctaattgtggccaaatagccagtgcaggtttgcgtaggcgtccatcctgcaggacatgagacgggcgttgtttcacggtgtgaatcaggactgtgtgtcacagggtagttgccagaggggtcgggccagtagcggcggcgaccccgaaaagacctccgatgtggcgaaaccgctgttgcgagaccagcagggcggatatctttctggtccggccccggcgctatcattttttgcacgccagccgccacgttgaccactgcggctacaggtccgcacaaagaaacagggccagcaatacagttatacagcacggcacaattacacaggcggatttatgacagcatgcttcggtgtcaaagtgtgtgtttatttaacagacaacgtgtcagatggaaatagtaaaaattgaggaagcgttgtggggaaattgcagatgtagggccattgtagcagaatgtcctaatgcagacgacaatcgttacagagtgcaggactgcagcaccttatcactccttttcttgaatgcagcagcctagcagaaacctgctggctgttcgcgtattaaactccttgtcttcaatttgtttctgcttcattgccgctgagtccctagccccttttgattcattgccggcggggctgtggccgccgacaggcagctggcagagaacatgcgcttaatgcattttggtgacctttgttgaattccgatatcacaa

SEQ ID NO: 1426 - DNA, 4114 bp, Toxoplasma gondii
  source 1..4114: mol_type = genomic DNA
cccttcagaagttcagtcatcggcaggaatccggaagagctttcgtccagcgtttctctctctctcttctctcgccgtcgttccttgcgcgccacgtcttcctctggcgaggcaggacgccgccacaagtcactctcgttttcccctggttcgtctcggactcctctgccttcccgtgtctctttcctgagctcggcggcggactgaggacccgaccgactgccgggggtgtcctgtgggagtctacccttttcgctttcttccgcgccccgtccctccgccgcgtcgcctcctcttctcccgcattccaccgatcggctccgacgcccgaggctggacgcgagacctgcccaccaccgtttcttcttttgttgcagacttctgcctcggaaaagcgattcaagactagcagcggactcgcctcgctcccaggaggttgcggggtcactcggttcttccccaaacgacgactgcttcacctgctggcttgaggttccgacatggtcgtcaccgccagtcaggtcgagtccttcttctctttccgcgattgtctctccgtcggacgcccagtccctcccgcgttcctctgcaggggcgcgctgcgccccgaagccgcaggcgtccctgccttcccccttttttcctttgatcccctcctcgttatcctgggcgctccgcgtctctgccttgggcgctttcggaggcgaagaaataaggaaaaaacgctcagcgagggttctcgacttctttagagagacgtccggcgcctcctgcgagacgcgaatcgacgcctccttgacaggtgaagcgacgacatgttccagcacacggctacctgcagaccgaacttcgcctgccagagccgcctcagtcctcggcgattcctcggtctgcgaaccagacagagcgtgtgtgagggatgccacgtcgggtcgggactggtgtccggcgcccgcagcaagttgccagccgttttgctcaggtcttttctctggaaggaaatgccctctggatgccaagctcctctcggcgtcctgtggggcgggactgatgctgcggaccgtccctaaaaaagggcgagccgaggcaggcgacaaatgatctcccttcacctgcggcgccttgtgttctgtggtgaaaggatttccccaaacagaagaagtcgagaaggaaggaaacgagggcgtggaacaaatggggtcctgaggcgtgctggagtagtgtagcgcataaggcacagaaggtgcagaaggagccgggagcggagacgagggggaggtcataggcgagtaagactgacctggccaacatgtggaagagctccccacgcagtgcggaggaacagaagaaactacggaaggacgactggccctttccccacgatgcatgcgctcccggtcccgacctcgggactccacagtggtaggccactgaggcgaatacatcgctgacaaaggaagttagaagaagcaaaaacgcggcttgcctatacaaaaatgtgcgagtgaaagagctaccccaatcaaacggaattacccgtcatccgtcgccgcagaaaaacgatgcaaggatatacatatatatatatatatatatatggctatgacaaacgagaaactgtttcgtttcctctcgctctcagtatgtccagtcgactaggatttaaggtgcacaatttgaattctaaaatagcgcttctacagagaatataacaagagacgcggcagactcttccaggcaaagattcagtgggcgtgagaaggcgggacgacttgggaacaaggtggaggtcaagcgttgacgctgaagcctccacaccggcaaaagggaagaaagtgaggaaacccccagaggaggtacaggagaaagttcgagggaaacccttcgtagacactataaagtccggttgaggacggggctgaaacgcagcggcgaagagaaaggcgagcacgggacgagaaagacggcacacaaaagaagagagtcaaagaggcgacaaaaaagcagcgagaacctttggaaatcttaggagagaaagagaaaaagaggcacgaaactagagcgtcaaacgcgtttcagatgcgcgtgacttcgcgagtcggttagaccgaagaaacacaccgacaggcgggggcaaaccctgaggaaaacacaccaaagaaaaggcagagacgcgagagggaaagaggcggaccaacaaccgatgaaaacacggaaaaggtttctgcttctggagcgcctcgaaagcatgttgggccagctagatggcggcatggataaaccgaccaccggaatttctctctgcgtcatcaaatgagaatccgcgcaaatatttttcgccttttccctgtcagagctttactgggtgtgctctctttcttctcgaaaacgaggctgcgacggtttgtttccagcggcgaccagagagatacgtagtagacagttgtcgattgaggacggctcttcccggcgtttcgttccctgggaaactggcgcattgaggcgaataatattgacgatttccacgcacacaatccctagtgagtaaacacgacaaaagagagaatgcaagacctcttaaacgacggaaaacgcaggcacggacgcagcgagagtaggaatcctataggaagccgctctgaagaaccgctgggaagctagcccttttgccacgaccatcgaccaaaaacatcgtcccggtttcgacgcgggtcttttcagtaaaaaaccggtgagacaagaagtctctctttgggagtttcctctcccaagcgcagaaagcagctttccagagaacagatcaattttctcgctctctggattttccgcagcgacgaggaacccgagaaagaaccacgagaaaggcagagcgcgcttgactcttgaggttcccgcgcgcactcgggcgcgaggggggagacagagtaacaaggaaggcagggaaactttttggaggcgttcttcgggaagcaagaagcagcgagacggtctctctgcttcagtttgccttaaaagacagaaagaaggaagaaactgcgacgcagatcaaaacgcacggagaagaagcctcgcgcgcaggcacactcgaacctaaatccgcgccgcaggctcgagcgtgacggcagcgggacatctggaggtttcgcgacaagacacgttgccgcctttcattctctctgtgttgccttttagctaggcacttcttcgcgctccgaacagctcggaagatcacggaaatgagtgcggaagacaaacagtgaacggacaaagagcaaaaaccagactgtcggggactctccgtcgtctaggacagcctagaccgcaaaggacgccgcgcttcaagacgtctgccgggcacctcgagagcacgataatcgcagaaaagaagccagagcccgcgcttaacactttctcgtgttgggagtaactgcggctgctcttttaaacaaagagtagcgcgagcttctccgcagcggtcgagcgcgcggcgcggcgcagggggagcgggcgagaaccgactctgcggaaaaactggaccgacaaggcgcagcgcggcggagcaactttacgcagaggagctgaaggaaagaacctgcagtcgtttcttcctgatccacgatgcagacttcaaaatagttttttggttggaaatatcggggtggcgcttttgctgtggtcgtcggtccgaactcgtgtgctaggagggagaggtatacagaggcaggagacccccaggcgcaaaggtctcctcctcgctgctctgcaaagagagcagagtagagaagagattaaaggaaagctttgactgagtcgaaaaaaacgccgaagggacgaggaagagtgaacgggcgagaaacatcgcgggagtcaatatggctgccgcgtcatcacagccaacgcctctgacctcaactcacggtgcgtcttcttctgcgtgtctctgctcttcttcctgctgctcccggcgctgtcgatcctcccgggctccaacacacactttcctccgccttctacatacgtttctgctctttctccccgattgcttgcgtgccgtttctttccaacgtgacgcatgcgcctcctgtctccttttccactgctctgccactaaaaa

SEQ ID NO: 1427 - DNA, 1770 bp, Toxoplasma gondii
  source 1..1770: mol_type = genomic DNA
gcgttctgaatgtacatctctctgcaccttacactactgttacagcattgcattgttgttacagacatgcgcatgcatgctcgcatactcacatgtcaaacacagcacagaaggaaccatgtctccccatcgacctacagacctgcaagtacgcatgcacccggagtgtgcctcatgctatgcagacgactatacgcagacggagagacatctggggagaagggagacgagaagtcgcccacggaaacagtttcagagtcatcttcggtggatgtccttgcagcaaagtctaaagatccggcgaaacactcctcgatcgtgagattccactgcgcatatgttcgtatctagatgtttgtaccagaagcagcgagaaggagaaaatgaagagtcatcgagttctgttgcgagtgagttttgcatgcaagtgaaagagggtgaaacgaggcacagtctgcgcagagaggaagagatgtagagccagccgacaaggtacaggcagacgtctcggccctcggtgcggcagagaggagacgtcttgcagaaaccaggagaccagtgacgagacaccgctgtattcagctgcatgagtgtacttttccgagattcaagccgaaaaaaaggaggcacgctcgtctcttcggcagcgagagcggagagaaggaaaagaaaacgagagacgaagggatgtcttcaccggtggagaaggaagaccagggagactgaccgagtgtgagtcgaggagcccggcgcgacaaagggagttgcggtgtcggacatagaaaagcgaaggaaaaggagagaaggtgaaggaaaaggaacgttaaacgaaagagatactgttcttcccggacggcaggaagacagcgagaaaagtgaacgaagaagcgaaaaaacgagactcggcgatgattagtggagaagaatggaaacgaattcaaaagcagcattcacaagacgagagagaacctagataaaccgcgcaagacagagaaaagaaggaaaaagtcgagaaacgaagagaaaggaagagcgcccgcttttcgctgtcctttgcccccttttgtttccgagatccagacatgcaaggtgaaaatttttccttgacagctgatgccggtggcatctgtctccacacgccctgccctttatactcagttgtcttttcttgaaatcccccatgttaaacgcgaaaaaaagagtagtggaagagaggttgattcttcgtttctcggagatgcaagggaggcggggaagaaacgcgacggaactctgcctctctcgcaaaacgtctggaaagactgcgaagatgtagactcttcaatttcaagttcttttcctctttctccgtctcgctgtgtgctttggtgcgttctgaacggcgccggaatggagtccggattgcattaacaacacacgggaggaatcgagacagccttttctcgcttttcctcgacagcgtctcctcttcacggcctctcttcttttttcaacggcgggatcggattgtctccttgcgcgtgcggttctttttggttctttttccttccactttcgttcttttcctctgctgaaaactccccaagtggggaccaacgttgctcaggaaaacgaaacgcttttctctcatttcttgtcctgcgaaaaagcctcgccgccgacccccagcggctcctctccttctcttcgcctgctgttccctttcgtctctctcagctgctgtgggggcggcaattccgactgttgcttctcctctccgcagtggcaaga

SEQ ID NO: 1428 - DNA, 1736 bp, Toxoplasma gondii
  source 1..1736: mol_type = genomic DNA
acgttcgctccattctcgtgtgactctgcaaggacatgtcgaaaaatgcgcctcgatcgaggtctacgcattttccttttttcagacgccaaatgctttcgtttgaagttctcgcaagaccgaagagggccgtgatccctctcaagcgtcttcctcctctgcgtccactttttcatgcctcctgcgagtcctcctgtccctgacttctgcctcctgggcttcctctctttcctgttctgcatcgcctcgtctctggtgcagagaactttggaggaagggcaaaatgcaaaggaagagacaagaggagaaaaagacagagacgaagagagacacacacagacgaggaggcacccttgttcgccgcttcacatgtcgtttagctacaccttttcaaatggagtgtggggtgagaaagagaggaaaagcagaggaagcggatgcgtttcctcgtttctttgatcctgatgcagagacagaggaaacctgacaatagaaagacagcagcgagagatctgcttgcgtttcgggggtctctttgcgcgagattcactccgatttcttcggaggaccttcgacattgtctccctcgtctacatgctttatgtctagtcgcacggcgaactgccatgcgaaagcagtgaagtcctccgagagaatctcgctctgtctttcacttgatttcgaagaaagatactctctctagtgaccgtggaggctcccatcagttaggcgtgacatcgctgaaagtttctccctctcaaaacgcattaaacaaataggctcgcgtctactttggagcgctggtgagcgtgtgtgccctccttcgcagatcctccctgtcagtgaggttgcatcctgcagtccaccctcatgtgcgtttcgaaacagtgaatcaataaaatcagaaaagccttcgtttgactggtttttctgaaaggcgttgtccctggagattcggtgatgtctgtcgggcgtatcactacgaagcgaggctcggctcttcgaatttccgcgcttgcctgcgcctccaacggaggaggaacggagcaaagttcagggacgttttcacaccatgcagagaagcgcttgattcttcacctttcacccatcctcttgtcgccatttgctttacggatcccccgctttcttcgctaggcaagttgcgtagcaaaacgcactgtcgaggcgacaccccacccgctgtggcgttccgtggcgactgacggcggcgcatgtttctcagtttctcgcggtaaaacaacggaggttcgtctgcctttctcgcagaagaggggatggagagccatcgaagaacagggaactcctcttacactcctggcttccaactctctcgaactccccagtgcggcaccagtcgtctcggggtcaccccgacatatggtttggagagaaaaaccgcgttcgaaggaagaaattcgtctttttcgccggaaaaaagacgcatccttcccccgtttgctcgactccgttttctttccttcttccattctgttcgattctccgcagaaattccgcgcgtctccgcctcgttttttgttctgtgtctgtatatgctcccgcgccctcttgccgcgcatgcgccggatgggcgcgcagcgggtgtctgaatcgacggattctctcgtgtctcccgcgacaacgacgaagtcttttttccggtgttcttccattttgagtctttcctgtttgtccgcgcgatctgactgtcgctttca

SEQ ID NO: 1429 - DNA, 4229 bp, Toxoplasma gondii
  source 1..4229: mol_type = genomic DNA
tctcgcgacttgcaggcgaagccgctcctcagaagaaacttttgcctgggtgaggtcgtcgtcgccttcttcgtttgtgcgccctgctctctgcgactctgctctcggttccacggaagactggagagactcggcaacttcgtcgacaggagtgacgctcagcaagagagggatgaggagagaagccgagtagacgtgaggggcggcgtttaacgcaaagcccgacagccagctgcagacggaagcgccgtcgtacgagctcaggatttcggatgtcatgacacctgcgggttgctgcggcgcgccttgcgacgaatggcgcggaggactcgcttcccgagagtcaggagggacgggtttcagcttcgcgaacagcaggggaggagcagaggcaaatacgtcgacgcggaggagaaacgaaacaggcacagacgaagaggcgtggttcgaagagtctccttgccaaaaagcgtctccaaatgccgctggctcttgcgcagctcgaagcgccttcgcagccgccagcgcccccaacccgctcaggtatacagacacctcgagggtctgcgccggcgcagagtcgctggttcccggcgtcagagttccttctagaacgacagagtctctgctttttttgaacgcattcgccacttcttccagagagagatacgcttgtgtggaagtcacgactcctgcgggcagcggcgcgggcgcagccgaggcagacacagataaggacaaaatgccggaagcgactcctcgaggccaaccccagcaatcgacagacgccggaggaccagtagcactgcacacagacaacaggagaagagaccacaccagcggaccgcaccgccacaggcgagaagcctcaagggaacccatcgtagaaaaaatgaaaaccctagcgaattcgatagaatgaaaaatgtgggtcaaaagaaagtgctatgcaagagaagtggtttacgtgagcagcagattagaaaaaggttcgagaataaatccttaaggggaaagtttgccggagaactactctggaaaggttgacgcgaacgaggtggcggtgacggcgtatagagtcacacaagttcaggcgtctgtggtgtcaagtccgagaatcccggaaaaagggggctaacacgagaaggccggcgtcaggcggaagcacgcggaaatctctgagttcgtaagaaaagactcttttaagatgtaaacgtcattccacgagtgtctagagagcaggaagaagcaccggagactgatgccgactagcaaggaacgacgacacgcactggctgtttctatcagaccaccactcagattatacaggtagaaaaatcaaggaaatgaggaaaagacgaagtggaacagcacttgccactaagcaatacaccgtagacaaggggaagaacgcggaacgcacgccgagaacagacagctcgccagcacacacgaggtgggccggaaagtgtgaaatgcactgcttctcacaagctgaatgtgaaaaacgtagtcctgggaggaacgcggagaaagttgccaagggaaaagaacaaaaacgacggtacaaagaaagattaacggtggaacgctttaaacgcccgctgtcactcatgaaactccagccagccagtttgccaaggagcaacctcgaagcatcgcggaaaccggaaagccttgcgaaagtgaaatcttcggagtccgtttcatagttgcgactaagaagccgaatcaggaaaaaaagagcaaaagagaacagagatacaactctttggcatgatgaaagactgcgcagtgtcttgttgaggtttacccggcacactttcggcaaaaagcgccgtgtcgatggcgcttgcacactcaaattcgtgacattctcggcgctggttgcagccgcgccggaagacacaacacaaagattgtctgaggaaaaaactaagcgaatctgcggcaggattcggctttgaaaacgaagaagatccgggagaaaatcgtacacgtgctaacagggtcccggcgggttgcgtacaccaggtgcgcgactctagcgtagacatgcagcaggctgctcgacactggaggtaatttggaatctgttttgtcgctagtttttcaacaatccaataaaacgactcgcgagtgtcagaaaggagcgaaactccacacctgcggtgggctttcttcgagcacagtctcgagcttcgagtgtgccacgccccgagcggggaatgcctgtggttcttatcgttcttggggggccagcaaagtcacaggaaaggctcgctgaccgttgacagttttctgttcctctgtcatgtcacctcctcacagatgccaactgcgcgcggtcgtcagaaagatatccggcccttcaaatcctgaaactgaagagccgccgtgtacccagcaaccaaaacgaattcggcgaacagacaaccaagaaaccccccggattcagtgcagctcgacttctgctggctggccaaagggtggaagaccttatgcggccggtggtacctataattgaaatcctttccgatcggatcccatctaatagttgcggtttacattggaacagggtgtcttttctcgatgaaaacgcgggaaatggaacatcgcgataatctaggttccagaatggaagtggtggtgtacaattgcagaagctttctgtattagaaatgatcgaggtgaatgattgcactcaggagcgactgcgtcgacgcctcgagctaggcccggctcacatcagggtgactagtcgattggaagttacgactagatgaatcgaccacggtatatcacaggagactctccgttgtgctagcaagtacaggcagatgcagctgaagagtttgcgtttcagatatcgtgattacgttgtcaaatcccttcctaaaacatcaaatttcgacatttgcgagagttcgcaattcctgatgaacgagtctacaagcaacactcaatggcaactgcaagtcgacccttcagccacaatctgctgatgcagaccggaaagggagccgggggtggtattcgatgtccttctacgagaaacagacccgcttgtccggtttctgtcaaaacacagctcaaaaacccacccagtctgacccttctggcgcgcgactttttcttttagactgctgcaacgatccgaagccgaacctgctcatatcctgcgaagatagtggaaagtatacgagcatctctgctggttctttggacgtccaggtgaacatgacactcggatacgttttaattttaacttactaaagcccacgggagcgaagcaaacagctgcttgtaagcaaatttcctggttagatgcgtaacaactccacatcctttagaaatttcgtcgcggtgccgagttccttgtgtacagccgaaagaaatgtgcttcacattactcgtgaatgagtgcgcgagagcgatgagtctacggatttgtctggcccacaccttctcgacatgagtgcgagaggggccgggcgacccgtccgattccatgaagcatgcttggcgtcttttctgatacagcaggcatcccggtgacccagaccgaatgtgtgccgactcaccgggatttctgcggtgttttactgagtgtgagtcaaaaaagcgtttggtttttcctttcacagcatacgtgatcattgtatccggcgatatgaagttttgaaacccatagatgcgcacgttcgttccgttcgtgtccctgcatctgcttaaagtacgtgcggacgataattatatcaatgaattaccaatttaagctgaagatgcacttcgcgtggctaactcgttagctcgtcgacagggtgtgtagctcaatggtagagcggccgactgcagatcggcaggttcatggttcaattccgtgcgcgcccttctcagacgtttgagaatgggggttctgcgggttaatttgttgtccggtttgccagttacaggatgagcggatgccatacctctgtctcgatcttctggaaagaagcaagctaactcgttagctggtcgacagggtgtgtagctcaatggtagagcggccgactgcagatcggcaggttcatggttcaattccgtgcgcgcccttctcagacgcttgagaatcggacttctgtgggttaatttgttgtctggtttgccagttacaggatgagactgcctcacctctgtcgcggtcttctggaaagaagcaagctaactcgttagctggtcgacag

SEQ ID NO: 1430 - DNA, 2187 bp, Toxoplasma gondii
  source 1..2187: mol_type = genomic DNA
ttttttcctgtcctcacgctgcttctgcccatgctaattgaagcctcgtgatccagccgtcttcggcctcactacgttttttctcttttttccttccttccactcagctcgacttcgtccgatgccctctgccttcttctccctgcatttctcgtatgctttgtccccttctcctaatctgtgctttcctccctcgtccctctcttctctctctctctccctcgtccctctcctctctccccgaatttgcctgtcgccttcgtagcgcctgcctgccgtctccacccgcggtccgtcgttttctctttgctcaggcctacttggcgatttctgtttttgggcgcgtggggcagtagctgacgtggattttcttcaggtagcgaagaaagtcgatgcgaggaaagatcgcgttcctcattctcgctctccgtcgctagtcttcgttttcgatcccgcggacacaacagacacaggagggaccgtgcgccttgcctctcggcgcggacaaggaaattctctcgctcaacggggttgcgtcgttacgcactgtgaggcaacgcgtaaagagaaattctttcttcgttggccgcatatatccatacagatccttaatgggtgagcgggtattacggctggctgtcgaggctcctagggcgttgcgtggacagagagacacatggcgcaattttcatgtttacttgcacggataacatcaggcaaaaacagacatatgcacacatagtatttggagacctagttactagataaacagtctcgcaagcgtctaactggacgagaaaaagcagacacgaatgcgaaacgaactcgagaaaatcctgcagtggaaagcgaagacgacttggaggcaacgggatgaagggagaggtcctttttgttcagtaaacgccgcaactcacgggacagagaggaaacgaggacgacaagacgcgacacaagggagagagatctctctccgcaggcggcgacgaaacgacgcgtagaaaaaagggagagagcaggagacaaacgaaacaacagagagcagcgaaaaacgcgaagccaacaacagagtcccagggagaggggagaataaagcaagacgaaagctgaggaagaaaactgggtttccttttttcgcagaaaaatcggagtgttcctcttgcatctcgaaaaaagagcgtagaccctaaaaaccgtaaacgcggacaaatcgagcggcaccaagtttgcgtgtggtccagttttcgatgctggcctaccgtttgtctctcgacacccagcgcgacagcagaaggcgtcccgagggtctgtcccgcaaaaaaaaacgcggccaaaactgcggaaaaactgcagatttcgaaagccgctgtctctgcgagcagaaaactggtaaaaactcgaaaaaagaaaggcacccgcagccacggagacagggcgtgaggcgccttgactctgcgctgcatctgcacacctcgcgtctgtttgcatgcttcctgagcttccggaaggcaaatcggaatttttcaagggcggaagagatgcgacacactccagagagaccctcgagttttcaaaaaacttgtttttcctttctctcgcctccccattggcgtagagcgacgatgtggcggcaacacacgcggcactgcgggttcgcgctttgtcgagcgaagaggcgaaattcatcagttcgtctcctgtaacgttttcgcctctcgctgcctttttcctttccaaccgctatctccccactcttttcgtatcgccaggttgttgtcaaaactcgcagtgcttcgcgctcacatgcagagagcagaacctctgtccagccaccacagagactctcgcgtcgtgaacgggtgaggagaaaggcgtcgacggggattccgaaccggtgacctcttcgaatttcctgcgcaagaacgacgaggagcgaagacaaaagcagcgaccgagctgtccggcgtcttctcgccgcggctccagtttggatcttccgacggcgtctctctccagttctgcagaatacctgaaacgaccaagaacatcgaacgactcgcgtttcctcctctttcttggacgtcctgtccctctcgagagaaaagcctgctcgtgatgccgcgtggaaactgttttcagacctttttcttccagggtgtcgtttgcatttccagggaaaggccgcga

SEQ ID NO: 1431 - DNA, 2040 bp, Toxoplasma gondii
  source 1..2040: mol_type = genomic DNA
gagcttcgcacaggtggtgccttttccatttgttcctgcaacgtggattatgtcgtagtcgtcctggggactgccgagtcctgcagcgactgcccgcatgcgatccgttccgagtttcaccgcgtggtgagaaaaaagttgtttcaagcacgcggtgtatttactgcccaagctggcgggcgtcgccatcctgtggcacagcgcgcgagccttttcggagtgtattgcgaacgtgtctccagttcgccgacgtagaagttgcgaggagaaagggagagtacgacgaggacgagagaggtaagaaggctagaaaaagaacgccacaagaagaaaatggggtgaagtgaatcaggataaacaaggtggcagtcggcagcctaggggaagtccaccgtcctctcgaagtgcattttttcacttctaaccgacggatgcaccctctctcgagctctgaattgttttgccacctggaaaaagagttcttgaagctacatggacgttaacattcgccagacaagaaagtgaatagctctggaccctgaaaaaaacagcggtgaaagcagagactcccctcctccccagttgcaccgtcgccggcgtgcaggacgtcgtgtgctctacgcgctgtcctgtcctcctacccagagacttggacgtcggctttttgctgttgtttataaaaagggcacagacagacaagccgaagcacgtactcgccacgacgagttcggaacagggaactaacggccacctgcatgtgtggatctcaaaaaggcgcctagcagccactcgttgaacaaacaatgccgaagagccacacaaatggaaaacgaaacgaaccacagatcggagtgagaaaaggtcttttcaggaacaaggtccatcccaacagtccgggtgaccgagacgcaacacacagatactggcggttgagcctttccgcggacaagcaggagtgtgaaacagacaagatctcgtggaaacaacgttcagcagctttgccactgctttgtctacctctgaaaagcgcctgaaaacaatcgtcttcacaggtgaacggatctccggaaacccagaaaggtgtcgttgcaaacgctggaccgcatgcacacaaatgtgcgtcaaaaatctcaaacctcaacgagaatcgaagccatttttctctggactttgctgcggggccatcctcacgcaagggaactggcccacacaaacagctccgcttccttttgtttctctgttttcgatttccctatgaagggatgccaatgccgggcatagctattttgcctccaaggagacacgctcgtgcgcaagtccgcagacaggagtgtgtcatagccgctcgcgacagctgaagctcgtggagggaagactttattggcgaaagttttctcttccattcaattcagaagccgcaaacagagagagaaacgcgtatttcaagccttgtcggcagagtcgggtggtcagagagaagcagaaattctaactgatgaccgggcctagtggttgcgcgtagtcacgcgtcgcagcaggggaaggcagagaatctctgtccgtgcctccattcttctttcgagtcttccaattacgaagacggttgaggcgccgtgcttcatgtgtcgattctgttccttctactcaaggctctcgtctgttgaatttcaccttcagggtgccggagggtgctattgtacggtctacagcgtgatagtcctttgtgttgggaaggaataaggtctagaaagctctacgccacctcgcagaccaggcgttcttcgattctacaccacctctctggggcctacagaaagtcaatcaatctatagataaacgaaaaccgggcaactgcagtgtaattcttctggctaagtgaaggctcccggagattgtgcgatcttccgcctgtatctgcctggaaccctaccatccgctggaggcgcgatcaattgactgtgcgtttagcagcttgttttggtatgcaaaccagtctttgaaattcaaagggacagggctccgacttgcggctcagaaaga

SEQ ID NO: 1432 - DNA, 2500 bp, Toxoplasma gondii
  source 1..2500: mol_type = genomic DNA
catctttctctgtgcacccgcggaagcgttccaggtccggtatctgatcgacggtgctggcgcaacatccagaactgcgccgttcgtcagtcccccaacgtaaaaagaaaagaagcgcagttcccctcttgtgcggcgagacagagcaggttcccgtggatctgaggcatatcaagtggctgcctgcgcgagcggcctggcgctctctgaaacactggagattccatacacaccaggaaggccaacaatctccccaggagctcggtctaaggcgatgcaaaatttgacagacatcgacaggaaccggaactgatagatacagagtagagtgtgcgagtgcaagtggagagtctcaagatgctttccgagtcttgccgcttttccccactgcattctctcttggatcttccaggaaaacgatggatctgcgagagtggagaggcctaaacactttagagaacaacctgtccatgtacttttggcttcgagtgcactgcagacgacgcagacatcgagcacagaacagacgcagaacatcatttaaacgcgtatgaagagacgaagacatacccccggagcactacgcgagtcagtgtccccgcgtcacaactcttccgcgttatcgcttgcagttaaacagaaagtcaaaacgcctgcacgcttgtctgagtcaccattcacagatcacggagagaaagcggagaaagaacagcgaaaaaaattggctttctatgctttgtcgacgtcagcgatcctgcattgaaacgagttaggcggccagacgtgcggtacacgacagaaaacaagaccgaaactactttatttttgaggaacttggcgtccagaagtcgcctgtgtctgttcgttcttactgtctcaagagcgcagccatctcagacgcgtagcgcgtgaaggagactccactcgatctccacatcttttaggcagaaaaagaagagaacgcgagaagagacagaagtagaagaaaagtggaaattgcacgacagtccagagctctggcaggccaccacaggtgagaagtcaactgtgcagaaaccagatctctcgcttctgcttgagacacgggagacacggaggcggcagcttcctggggagctgacaatcaggggtggtctggagaaggcaaagcaaagattcgctcggaacagcagcgcgatgtggaacagttccaagcccttgaaaaagcgacaaaaccaccgtcaaaatggcatcgtacgtgtgggcccgtggtctctgagaaactgaactcggccagcaaggacgggtcggagaaatctgtgctctagaaacgaaatgcagcaaaccagaggagagggatcaacggcaacagagatccccacgcaaagtcgcaacgttaaagcaaattcgcgtgactcgagtgtcgcgcatatacgcgaacattactgtacgtccaaggacgtggacgcggactgtccttgtcttgggtgtgtgtccgaaatcaccgcgtttcttccggatttcacaatggatgaatcgagcattcgtctcatgagaatttacctcagtactccggccgctttccatctttccggccgtgcacacgccgagacaacaacagctgctttctcgatttgaaacgccgggtggtggcgcaagcatgcggataaaagacgaagaaaagtcacctctcggcttcgtttttcagtggcgcgcgttttcactgcatttgcaggaaacagcaagaccttttcgtcagtcgttttgacaaacagcttgttgcccccggggacttttctttccacgttgatcttgaagatgcaacactctaggacgccaagagtccttgcatgcgtctagagagggactgaattcagggcgaccgattgaatcaggcggttgttttccagttttcttgggaaagccgagacgcgtgaaagtatcttagagactttccattgcttgaagaactcctctgtcgtctttgacagttcagaagggcacaccgcttcacttctcgacctccgtgacggttccgccgcggccgccccgtcttcgtgcttggtttcctgatctttttgctccggttttctccgttcctccgtatagacgccacattttgtctaactctttgtttgctcgatttccacttgcgtcttctcccgagctcctttcgtctcttctcgttcctctcaaccggtttctcaaaacgcgcttcccacgggtcttcgaaacgttggcttcctactcgctcaacacctttctgtcgtctacaaatccctcgtttctgcacttgcttttctaatctcgagtagttgttgtctcatctcccctcttctgcgtagaaagaaaaggctgaagctgcaggaagcgccttttctcactcgtcggttcgtttttttcaagtccgagactgaagaggaaggaggacgagacgaaaaagctctgtgatccgacgcgaggtctcgggggacttgcgttcagaatctttcctggagtgttcgttacagcggagaaaaga

SEQ ID NO: 1433 - DNA, 1862 bp, Toxoplasma gondii
  source 1..1862: mol_type = genomic DNA
gaggaatgcctctccgtaagtgcagatacgcttgtacaaaaatctacgtttatagatgccgatatcatctaatgtagatctctctttatatatatatatatatatgtccatgtatgtgcaaacgtatacatatgtatatatgtacacttgtatatatagagattcatatgaatatctgtttggatcatcagctcgtatatgttctgtttgtccgaagccgctttttcatgtgcaaggacactggggaaaggattgaaacgcaggaggagagtctcgacagatgcgtcgacttggtttttccgtttctccgcgaaagcagagaaggacacaaagttctcagcttgctcgagcaatctttgaatctgcatgaggacgcaagtctcttgttggcattcgttctagctggcaaaggagcatttcgaatgtcagacgagcgagaggctttgtgccacagccatgagccaagcgaaagagacgcaaagtcgcagcgggagtcgacagcgatttgctcgaaaaacagaaattcgagagaggacgcattctcgactgtgaaacccaggactcacctgtaactgtgttgacaagcgccgctggctacatagaaaaaagcatttacattaaagtaggataaaccatcttcaaccgcgtcgatgtcttttaggtggtgggaaactttgatgtatctctttcttttcatgcgctcccgtaccagcgtatccatatatatatatatatatatatttatatttacacatatttatatgtcgacaggattagagggatccagatagaaatagatggatttatagatagctagacatagatagataaatggatagatgcgtaaaaaggtagatagatcgacacagatatggatctagatatcgatgcagatgtagattttacagataaatatatagataagatgttgagagatctatggtggtatttgaggagaagtatgtgggttgaaagatttatttttcctgtgcagaatgaggcatttgcggtgaaagagggaagagcggattcggtgtgtctcggagtcgagtaaagaggcgacatgagagagatgagagtgggcatgcagatagatgcttgtgttgcatgcggaacttcactttcgtcgcgtttcttctcctctttgacacacacacactttccccccgttctacccctttctcccgcattttggagacggtctcgatgaaattgaaaaggcggagaagcgagagagtagcagacacagaagcacaggcaacggcccaccaagggcaggaggagcagccacaaggacgcaaaaaaggaagaagatcgaaaagcagaggagaggaagagagaaagagaagaaagaaaggaaagacatttctctccgtgcaccctcgagtgtctttcttgttgtgtctaaaaaaaagagaacggaggttggaagccgtcagagataattcttttttcgacagacggggagtgcctcgtttcttgtgtgtgtgtttgttcgcttccacttttcgctctccctgtggtctggttccgcagaagtcttctgttgctcctctgcgaatctcgtcttctctctctttcctctgaatcttcacttcttccttcctcagaccttctcttcttcctccttcaaatgctctcctctgtctctgcccctctgttcttccccccaaattactgcgtccttctctcctaactcctgtctttccgactggctttccgtcgcctctcagcgcgcgttctgctcctccctcgcgtcttctctcgcgtcttctcttgcgccttctgagggtggaggaatctgtcttgctttcgcagagaactccttcggcgtcgatgctcgccggagtgaagctgctgga

SEQ ID NO: 1434 - DNA, 2240 bp, Toxoplasma gondii
  source 1..2240: mol_type = genomic DNA
accacaccactggattgcttgatgactaaaagtgtaaataggtaagacggtgtctttttgctccggtaggctaaccactgcttacaatcaacaaatctgaaaagtgtgtattaaaccttaagaggacatctttcttttaccatagtatcgtgtagtgatatgttcgtgctgcagagaagaaaccagcgctgacaccatgacgacgtgtgagccgcagcgctggtttcttctctgcagcacgaacatatcactacacgatactatggtaaaagaaagacgtcctcttaaggtttaatacacacttttcagatttgttgattgtaagcagtggttagcctaccggagcaaaaagacaccgtcctacctaacagggaggaaagggcacctatgacgtctgtttccgcagtggtatcagcaaactaatttacagggttgggcatggcagatagaaggcgctgatcctagcggagagtcaacacaccttaactcagtttcgtccaactcgacacgcacatgcgatagtgtccaaagcaggagatggcgcctgttagacgtgtacatttccagtgctccgggaaaggtctcacctggttgtcgtgccctaatcccacattccacagttgctgtcgtgtcacacttcagtcataacgactgtcgtacgacacacctgtatctggcggcatcctctgcatcgcgatcagcctctgagttgaatacccccgggttaccggacattagagtcgatttccaggcacaatcggcacttggcttgagcaagggtgggtatgcaaagcctcttgtccgtactgaaagattcggcattcctgataccggccttcagattcacaaggtaagccaaaagaatgatacacacggtagcgtaatattgacagtttcgtgctgtgtaaaattcccaaaaactcatccccctcttccccccccgttggcacatacactggctgatgcatgcgtcccagaccgcgcacctgtgccacgtcacaccacacgtgagatggagaaaaaagcgagatggaatactgacgggtggcagaacaccctgcagaacagaatccgtcacttacacctcccggagaaggccctttttacagagtaaacacttttgtcgctgaggggaaaaagcgatagacaacgcccacgagcgcacccggcgcaagcgatgctgatggttcggccaagccaaaggaaaccaccacatgcctgcagtagatctccaggggaggctcgccgcacgtctgacagcggctaaccattttcccacaagagcaaaataaaattcacgcgaatcgccctcagcggaagttgccgttgattgacgcgcttcacgctcaggcgtgctgaaacttacgttttgcttgctttgtttatgtcctcccgcaaggaaaggatcgttgataattccgtacaaagcccggaaggcagcgaccgccgcgtggctgccgtcgctattgcaaaacagcgaacagcataggagaccgcgggagctggtggctgccgtgccagcttttttcacgtggagtagggaaagagtactcgacttcttcccttccgcgtaacgatttatgcgtcctttttgaatgactgttttcttttcttctcaccaccctgcgttttggaggtgagtattgccacttttcctgtgtttttcccatatcgtttgcatcaccttctctcccgtgactatcgtcgtccacttcgactttcacagtgcaattgccaagtcttcttttcttttcggatagctcttttttgcgtcatggacacaactgtcactggccgtgcctcaccgctgcagttcgtgtgccgcgaggcctctctcgtggagaacgggaacctgtcagtgtagttctctgttcccgagggatggtgtgaagtcttcaccaggatcctttccacattgttcgtactgttgtctcttccgcttcggttattcttggctgcttggtctcttgcctcatagactggggcgcttctgttaccatgcagcccggctctctggtcgagggcaattcgcgccggtctctttaggcaggccgatcgctatcgatcatatgtcttttgaggagatacaggggtatcctcgattgttttcagccgccgttctctctggcttgtgtggcggcggcttcagctgtctgtatcagctgaaagtctgttgggacactgagacaggccaccgtggagcaaggacatatatactgcaattttagggtttgacaaga

SEQ ID NO: 1435 - DNA, 3800 bp, Toxoplasma gondii
  source 1..3800: mol_type = genomic DNA
ggagagaacgtttgcaagtctggacgacgcggacaagacaacatcccgcgagaaggaagcggagggagaagacacaggtgcagtgtcgctgcctggggggcgcatgtggcagcagcagacaaggagccaagccgctgtgtctcccgatctctcctgtcccctcccgcgaccgcgtctccgtgagcgccggacggcggggcctgattcggtggccaagtagacgccgtggcggggtgatcacggaggcggtcgagagtgacacttgcgcggtagcccaaatcttctatttggcggcgaatctcctcgactgtcacagtaggtgacgggaacgaagggtcgcacgacgctcgatattcaaccgtcgctgagtctaggatcagattgacggtgatcgacgtcacaccaggcagcttctgaacgtgtttttcgatgtgtctcgcgcaagacgcgcaggacatccctggaaaaagaaaaaaggtctcacagactcgttcgcatgcaaacgaccctcaatcacaccgctcgtcaagggaaacatgtgccacagtttcatctcggtcggggcagaggaatcggttgaacacgtttagtggtgaatcctaaagtattgagctggcggttcgattcaaaatccacggcacactgctttagctggagagacggacgccgatgtgagctgcgtggaccgcgtaccccgggacggggaagcacgcagaaagcgacgcccattcctcgtcagttcacacgaacacgatcggacgggaagcccgaacggagctaaacatgctctcgagaagctgcagctgacctagccgccttcaagaacggacctacagacgcatttacagcagcacattcatgctggcgtgtgcgcacctacacacatttatttttttctagatgtaaaggcttcgtgtctcagctgcgaatgaaaaataactggagggcatgcagacgcggcatcgaggagcaaaccgcggtgaagtcgaaccagctagcaaggatggagtcactttgcctctgatcctcggagtgcagcggcacctccattcagctttgtgctcccttgttactgaagacgattcggacaggaacgactggtcacgatcagcaggagtacctgagctgagttgaaaacgtctggtgacaggtttgtctcaccttcgacctggagttcggcatagtggagctgcgccgtggaacgcgcttcttggcctccgtacgtggcatctgcgccgcgctgcactggcatggccgtctcgtccgctgcggcgcaagacgagggagaggccgaaacatccgccgacgtcgcagacgacgaagagttgttggttggggcagcttcgttcacgagcgacacgtctagtccgagactttcgatcacggcggcaatctgcgcttgcgttacgataccgcgctgaaagggaagagacaaaaaggaagggaaacggcgagtgacaccagaaagaacatgcgagaagcaacgaatacgcgtcatacgagacatcgagaagaaaggcacggggagagacacacgcaaataagaggcatcaaccggaaacaaaaaagagagacaacacacccagtgtgccacggttttcagagaccgtaccacttgctcgtggttgccagggcgtctaggcaggaatgcatgttgggagtggcaaatcgaagagacaaagcgcgtccacagcaccttacagatgcgttcgcatacacgtatacatattgatttatttctacagctgtctttaccctgctgcacatcgttgcacggtaatgatacgccggtgtctgtgcgactgtccctacgaatataaatatgcagagccgaagtttctttcgggtgctgggacatttgacgttcagctttcaatgccttactgcagcagagggtcttcgacagcaggcacccgaagtggaaactttgacgcgtcccgcccgaacatcgacatcaacggcgagaatctcggacgtgaaggtttgtttcactttgctttcgatattcctggcgcaattcccgcaccgcattcctcctactctgaattcccatacgttgaagggaggagactggggactagatgcggcggggaaagggacacacgcagaagtcgagggttctcctgtcgggggctcatccatttttatttgttccggagaacgaggtacggggacaagctgaaactaccgagactgcggcatgaaaatcggtttcttgaagcttcggagtgcggaattttctggagtgagatgaaattcatgggggaggacaagcagttgacgacaagagtctctacttggaaactttgctagacaggaacagcaggcaactcaacttcgcgcacacagcgacgcgaagttgagcttcagtagcgcgcggagacgggatgtaggcgtccaaccccaacacaagggggttttagatgcaccgtgttcagttcgcacgtaggcgtttcatccatcaccgcgtgtctgaattgccaaaaactggtgactctggaaggtgtcttgtctaactgagttcctcttgtcttacacccttcctgcgggtgatccgaccccagcagttgtgcccccctccttcaccgctgtcgtgtagggaggccgatagagtttcagggcgcacaaagaaagcgacgtgccaaatgaaggtctaggtgccacacatattgtgacactcgacgttttcaatctcgtgttgaggctccgcgcaactggaagggttaattgcataagagctcgcttcagatcttgggcttgggcatggcgaaaagcaaatgagcaagcaggccgcggcctatgtatgccctcgccacgaacgattcgttcgccgtcgattcctcgacctggtcggttgtggagaaagactctgagctttccagcacctttcccggtgaagggagacaccggctccctggcgagtcaacatctacgccgcggtgtcggctcaacaccacaagcacggtaccacaggagacggcgaagcgccgggaaggtccccagtcacccacgatgtgtcctggcgtagcggtgctagcagcgggcaaccacggagtcaccaggggtagcgtgtctctctcagccgctctctctcggtgtggctgcggagcaaaggtggggaaaaggcaggtttttcgtcttcatctttctggattatgtgcgatgtatcagcgagaaatgggcaacttgacaggtggcggccttcttggtgctgaaaggaggcggacgcctgacagttctttctcggccatgcggtgctcttcgcagtgctacgtgcgagatgaattcaacgcacgagacatttcgcacactcaaacagcctgctcaccattcaaaggagctgaaagaggctttaagggacccccataagagaggtagctgcgctcaggtggcttgcgcaggagctcgagcgaaagggcaaacaggccgctgccggggttagcgagcgtcgattgccacagcgcgatgcgcaagatggtggcgagctaattatgctggcaacgagaccctcaactacaagtacttcatttccgtttgcttcttgtcatctccctttgctgaagttgctttccatcaagattttcccccaactactcgttccgagattctgcttcgcgtaagttcccgtgcgataacgacgaggtctgtacgtaaccgagagccaaggtagcggtgtcgcgaaatactgctgagccggctgaacaggaagatcaccaggaaagagcaaatcgcccggctacaaagatcggcgacgccgctttggctctttctaatttcttcagcaatttctcccggagcaa

SEQ ID NO: 1436 - DNA, 2817 bp, Toxoplasma gondii
  source 1..2817: mol_type = genomic DNA
ccaccttcaccatctcggtgagtcaggttgcggtcgttctggcgaggtgtcagcgctagaagcactgggatgaaacgtagaggaaataatgaactctcacgttctcactaaagaaacacaatcagacagtgatacataaggtaattaaggcccccactcagctttgtaaatccctctgtctattgtgctatttgaaagcatgcatgtagtcccatcgataaacgcatggctacgtagatccgacagggtcactgttgcttacaggcaagcagggaaacaccttcaccaaaacagctgttttagtcatttgactgcacagagaagtcaacgggcacacgcaactgggtggatgaatcaaagataaaagtcacttggtgcaacgaccgggttcgaagatatttccgtatagatatggtgttaaaataactacgactccagttgtatcgtcttcaagtgtttgtttagtagctggtttgccaactaccttgtttcgacatcataccaaccttatgctgaactgttgcagaagagggcacagcaaaataacgcgttcaacataccgtgataggtggagcgttcagacgcgagtctcacctgtttagctatccttttcggtgtcaatctacagcgaccacaaatagtccggactacgaaatgcttcatcacagaatccatgttgctgtggtggttttcacgcgtatcatgcccgtgttgttgtccactctcccgcgtgatcatttcagtggcgtacgtgcacagtagttcatgtgaaggcaactgcagtggcgggccccgttgaaacgatattctggcgtatttgctgttttgcgggaaaggatgttgcagtttacaggttgtctatgctacgacattttttgtacctagtattgccgcggatctaggcttaacgagcggaattttctcggcaagcgacgaaggcagaaaactaccgtaactgagcctcagatacacaaaccttctactggaactctttcccctcgttcagaagcttcgttactgcagagaaactatccctctgctgcaagacattcctcattctgcgcagtgcatgcccttactacagacaagatgttcaactacagattcactgctggtaattgcccaacctttccggctagatatccttgtaccgactaacatgtctggtgaaacccatcttgtgtagataaaacttcaaatatgcattctttatgttgagctgatcaagtgcatctctctgggacccacggcaccgccactctatcgcgtcgccagacaatgtacggagttgcagcttccgcaccacgattttccgaggatgcaaatcggggccaccttacatcttgctcgggcgatgttgaaagcatgagtggaagcttatggagatacaataaatatcagacagaataatgggggacacagcgaatgacttgcaatccttcacgcatgagggttctgcctggtttgaaggcaatgaatgcggcaacgccagcagcgacgcgcggccccatacatgacagacatagcaagtttttagacgagagcacttgagttcttcaggaccaacagtgaatccccgtaattttttaaacatacttcatgattctgaagggagctggtgaaaaagccggtcgcaggtgacccagttttcccaaccctgaggcagattcgcggttccccatgttcgaagcgtccagctagcatggtaaagcggctgttatgtcttgctgtctagcggtgcgaccctgttgagtcaaatggtgaatttgcttgtctctgactgcttttggcgagcaccactggattgggacccgaggcaggtagttcacgagaaattcctgtgctatcttgtttggcttcccaggaatgctggtcgttttcagacctttcctgggttctcgtcagtaacggcagcgtcattgctggcttcgggccaaaaccaaagcgtgcaaggccgcaggttgtccgcctctttgagccttagctcctatcaactcttgaagcgttttatcgaagctgaatatattttatttctcacggtcttacccatcactcggttctccgttgatacgtttacagcggatctgtgggacggtggataaggtgcaagtcaggtttttgtccgatatctttcgctgtgtcgcctacgatcttgaagcgatgcgcttcaaatgaggacatcttctcctgtaaatgtatttccggcccagtcagttttttgatggtatggatccaagaatcggtgaaggcccggcaaagtaggcagctcgcttttttccgtcggagtggtccttgcaaactgctctgccagtcagacgcctttcagaacgtaactcgttcatggcattttcaacgcccttgacggcatgtcctggctcattcagaagaaccaggtgatttgaggactcaggaacgcctatttttcaattgtatgtatcgacttccctctgcaatttcaccactcgccccatttttgccacgtcgcttgggtcatgctcgacctgttcaaggacccacgagtttcattctgtgttttgttgagtctgtttgcaccacgtcagtctgtctttgtcgctgttgcaattccggtgtcgttttcttagtgcttttctccggtttgtaacgattcgcggaaatcggtggaggcttgcggggtcttgtactgtcggatctgacgtagtcctgctcgatcagatctccgatatccaggatactatcgaatttcatcacgtctacccctcaacctgcgtatcacgaaacgaccgtaagaaattggcttgaacatcgtagcggccatttgaaggcctattttcgcaa

SEQ ID NO: 1437 - DNA, 2454 bp, Toxoplasma gondii
  source 1..2454: mol_type = genomic DNA
tgatcgagacatggcagaagagcgctgaactctgtgtttcctcgttcccggaactcctttgcctttcgcctccatcaattgtctgcaagtcgacggatcctttgagaaagacgttgccgcttcgattttcttcatgtcgtgtgagcgttttctcttgcaagtcgcagcgcttcgaactgcaagtacgggcgaggtgtggggagttcgctctcgaggagctgctcccggcgcagagcctcgcatgctgaagataacggaaaggaaggcctgctcggactctctgcattcgcctttgcgcgccggaaagaggatctcgcctcgaaagcctctcctttttctccttgtcgcccccctgccagatgtgagggaagctgtggagagctgcgggcgtcgactccacactgcgtgccttcgcgcagagaaaccgttgtgagggaacgctctgcgagagactcgcgagttcagaaggcgtcagggagaagaaacgcatgccgctcagacggcaagctcacacgcgaccccacacacgctccgcgaagccggagaggagacggggctacggaaaagaagagaaacagcgacagagagaggggggacgagcggcaaaaacgacaggtaaggggagaaaaaagctcggcagaggcagagccagaggagacaagggagagcgaagggaaaagagagaaaaaactcggaaaggcgctttgcggtcacagccgagagagaagaagccagccctctccagtgttcgacttttgccgtcggcacagcagttcgcggagacatgctcggacgcctgtacgctcaggcggaacacaggaaatgcgtttcgccgagcatggaccccaccctctgggagccgcttgcgagagagagaagctcgggagaaagggcaagagtggggacggatccccgagcgagggcaaggcctgacaacgcgaggcaggcggtccggacgggagagctcggaagcctcactgggcgtcttgccatcgcgactcgaacctgaactcttcctcctcgttggaagctgacgacgaagagcgaccgaatcagttaaaggcctccgcgtctctcgaggcgacaaacggcggcggtcgccgcgccggaagagacggagacgggcggcttttctcgctcgctgagtgtctgctgaagagagtctccttttcgtggaaatcgttgaagtttcttctcacgcggtgccgccgcggttcgtctcctctctttcttttcctcgaccctctgcgcatttcgagaagcctgtaacggccgaaaagcctgcgctaaatcggggaactgccggcgctttggacacacacaagagagacggcacagctagcccctgcatgcaagcgagtgcacacggcgccaccagcgccgcagggaatcgctgaaaagggcggaaaaaaggaaaggcctgtagaactttgaaatgccaggtcgtcttcgctgcgagtcgaatctcatgcagcgggagagaaagggagaaatagggagaagaagggagaaaaccggaggcggcagaaccgtgagagggagacaggcgcgtcggtcgcaaaaagcaaccccccgctgtgtttcacacgcgcgtctgtgtctttcttcgcgttttttttcctctgggcagtgcatgtccctttcaaacctgcgcgcgcggtggttcccgttttcttcgctctcgttggatgccagcgcctgcgaccgcgttcttcttctctgaatgcacgcgagagccgaagatttccagcgacgacctggcgaggccagaaatcgacgacacacacgagcggcggccctgttttggaaactgaagaagagtctggagagaagcagacgcaggtcggcgcggaccagcttccctgctgaagatcgccggacctcgaatccgcggggaaatgctgttcaagttcctgacacccgtctgcacacccatgcggagttgaagacccgtttctccgcagtgtcgagttgaccttgtcttgcatcttcgcgtcgacgtctcttcgttggcaacgagatccggcacatgcatatttgtagccgactctgtgtgcgtctgcatatgcgcatgctctgcttcctgtgtacacttgtacttccgcatgtttatgcgcagacacaaagacgctgttttattttcaccgcgatacgtctcgacttctccacgcagaccgctgaggctggacatgtccatcatgtcatcagaaagcgcttgaatcgacaagcaagccgtctacaaaaatcggatttcctttcgccgaactcgttgccattctcctttgccaacaacagcatctcttcgtcttccctcttctcccctcttctcccctcttctccccttttcttccctctgcttccctctgcttccctctcgccttttttcgcctcagatcgaggcagtgcatgcttcttgagagcggaggaaggcgcgcctgctgaggcgttcgtgga

SEQ ID NO: 1438 - DNA, 1248 bp, Toxoplasma gondii
  source 1..1248: mol_type = genomic DNA
ttttttcctgtcctcacgctgcttctgcccatgctaattgaagcctcgtgatccagccgtcttcggcctcactacgttttttctcttttttccttccttccactcagctcgacttcgtccgatgccctctgccttcttctccctgcatttctcgtatgctttgtccccttctcctaatctgtgctttcctccctcgtccctctcttctctctctctctccctcgtccctctcctctctccccgaatttgcctgtcgccttcgtagcgcctgcctgccgtctccacccgcggtccgtcgttttctctttgctcaggcctacttggcgatttctgtttttgggcgcgtggggcagtagctgacgtggattttcttcaggtagcgaagaaagtcgatgcgaggaaagatcgcgttcctcattctcgctctccgtcgctagtcttcgttttcgatcccgcggacacaacagacacaggagggaccgtgcgccttgcctctcggcgcggacaaggaaattctctcgctcaacggggttgcgtcgttacgcactgtgaggcaacgcgtaaagagaaattctttcttcgttggccgcatatatccatacagatccttaatgggtgagcgggtattacggctggctgtcgaggctcctagggcgttgcgtggacagagagacacatggcgcaattttcatgtttacttgcacggataacatcaggcaaaaacagacatatgcacacatagtatttggagacctagttactagataaacagtctcgcaagcgtctaactggacgagaaaaagcagacacgaatgcgaaacgaactcgagaaaatcctgcagtggaaagcgaagacgacttggaggcaacgggatgaagggagaggtcctttttgttcagtaaacgccgcaactcacgggacagagaggaaacgaggacgacaagacgcgacacaagggagagagatctctctccgcaggcggcgacgaaacgacgcgtagaaaaaagggagagagcaggagacaaacgaaacaacagagagcagcgaaaaacgcgaagccaacaacagagtcccagggagaggggagaataaagcaagacgaaagctgaggaagaaaactgggtttccttttttcgcagaaaaatcggagtgttcctcttgcatctcgaaaaaagagcgtagaccctaaaaaccgtaaacgcggacaaatcgagcggcaccaagtttgcgtgtggtccagttttcga

SEQ ID NO: 1439 - DNA, 2591 bp, Toxoplasma gondii
  source 1..2591: mol_type = genomic DNA
cggagacacgatcattaaggccatctttcgccacgtgactacagtttataaccgcttctaggctttgtctccgtggctatgtttctctgaaaagagggaggttcgacctgtaagctacagaagaaccagaatttgtacaaggccgcttctaaaatatacagttgttgctccatctgctacgacgggggtgttgcactgcatagtagtcccagttgctcaactttccggttttttcattctgcgcgggtggccaccacgtcagaacatcattcgtggagcttggtctcgccgacagatcatctgtcagactttttgcttaatgaggttagtttgttcggtttgtcagagactcctttatgtgtaactgccattcctacaacatgcgttttgatgctgcagagatacaaaacgggtatagtggttgcctactccattcaatcgttaatgcgcctcgccgctaattgccacgagcaagaggcaacagccgagctgctctgtggctctcgcgccaggtgcacgtacgccgcatggtcactgattgataccagcatagcagttggttgcagttattcggaagcttttcgttttctgcgggccaggcaggacataccaagaatctgggagtgccttacgatgactacagagaaccaagctcagtaatgccctgaagcgtttcacctggggatcccccgtctcggtcttctgaacaacaggtctcctagaagcattccgtcacaagtgctcgtgtacaccagtcgtatttgggattggcatttcggagaagcggccactcttccttccccgtgcagtgcagcgtgcaccttcgaccgagacagacatggttagactcacagcgaaaaattgcgtaggttctcagcttggtgtttctttcgcacattctcccctcctccccgtcctccatatgtggcaatttgccgacacacggtcttccattaaagccagtaactaccgggtggcaccattatcttgaatcaggaatgagtggagtcttgccacatttgaacacgagagataaagcgtcgccaataataaacaggtagcccagaacacattttgtacagcggtagttgtacaactggtgcaggggtgcgtgtttgctaataaacctgtcacagcaaggtgaggagcggcggctgagaagtggaggagctgacaaggttgcaaattggtcctggaacatcaccagtagtcaacagaaacaaacgatggtttgggttcactgcagtaagtgggtgcgaacagcgaaaaaatatacgcaaaagcctcctaataaacacgagaataagacgttcatttattgacttcctgtctcgtatgcacacggattttcctgtgctggcgtgtatggcgcctccgtgtgaaaccccacaacggcacccctggcatattcctcctctaccaatgtatccgtcttcgttagaactcgcgtactgccggtgtacttcatcctggcagagtctatccttgagatactgcggaacggtttttcaggtatgataaaaggtactttatttccttgtcaactcagtgctcgagtgctaccgcggctcaagtcgactgtacccagaaaaacagccgaagcgagctggcttctctctagctagcgcagcttcaggccactttcagagaacttcttggtcattccttctcatactggagaacctcccttctacttgcctctgttgcagctttctttctttgactgcggtcaaaactcttacgtaaacccccctcccgctcttcaagctgcgaagcggccttcggatgcgggcactctgcagagacaagagcaaacaaccgtgtcctaacggggtacggggttccccatgtcactgaacaactttgcaatgagatctttgctgtttttttccgaggagacatgcctctctgtgcatgcttctttcgtcacgaagtggtcaacgaaattttttctgccgagacaaagcagtgggctaggctgccatcctgccacgcgccgggtggtcaggggacgcctttgtccgtcaaacttctgttgcttccatttttcatcttctcctccacaaggaggtcaactatcttccttcacaagtagttgtatattaatgaatcttggcacattcgaataaactgtcgcgaaacttatgggcgacgacggtctgggtgtcaaaatcgaccacctgggcagactaactcgaagtgaatcacatttcatgaccgctctacgccatcaaccaccgtcatgaacaaccgcgtaaatttgtagagcgtgcgcatgaacacagcggatgaatcagcaaatcaaactcacaggttctacgtttacctctgttccggttctcgcgtcaccctgcgggatgcgtcttaaccgattctatgccttgctgtcagcgcggtggtcacacgacagtacagtggccatctttgaatgacacagtagtccttgctctgtacatttttcggaccgtctgttgctccttggcgagacatctctgttggctgctggggcacagcggtccgctgccgctgctgtaagagcctgtggcaaggcggcttaaattgtactctgtgagaaagcgtagtcgtcacta

SEQ ID NO: 1440 - DNA, 2457 bp, Toxoplasma gondii
  source 1..2457: mol_type = genomic DNA
ttccgcagacgacgagctggtcgacagcgagatcttcttctccctctgggcttccagtctcaggcgactcgagctcaaagactcgccactgaacgggcctcgccccttcacccacacgggcctcggcttccgccgcaagcctctcgttcgcgtggagaggccggtagttcgcgtgggatctctgttgcgtcgccgtatactcggagagaggcgggagaacgcgcgcgaagaccctgagctcgcagtctgcaggcgcggggtcggactggccctcgaagtcgacgttcgggtgtatcctctctccaaggccgaggaagaggacatggcggagcacgacaggacttctggggaactcaaccacgtccactaagccgacttcccccgcggctttttccggcgagtgaacgaggtgatggaatccaaggacaacggggacgggatccagcgccgggcgcccgacggctcggcgactctcagccacctgagcattctgcaactgaagcaactcgaggacagggtggacgactgggctcgctgacgacggccccacggcgccctgaagcggcgcagagcccgtcagagggcccccgacacctgcggctccaacagcatgcgcatgcagcaagtggcgggagcccttggctgcggcgaccggccccgcgtgctggcccgcgtagagaggagacgcgtacgcggggaggaaggcccccgagccggggaggccggcagctgcagcgggtggagcgacgccgcggagcgcagagtgggcttgagaggagagcgacgcagtagacgaggcggcagagggcgcgagggcctgcgaagccgctgcggcatgcgagacgccgttgtggcgagacggcggcggcagaaagggcacactggtggagctcaagccggcggcgcccgccaggcccaaggatcccgaggacagagacccggccaagcccggcgccgcattttgcgctttcgtgctgcgggggtggggctgcagcattgaagagcaggcagcagagacacgagggagaggtggaggagcgaaggccctcagagcctcacagggtccagggcagttctggagggcgccgcgggagaacgagggcgggggagttggagaggtcgcactcgagacagccgacgaccaagcagagtgtccacgggccagctgcgagaagagtgggcggcggtgcggggcgaaagggagaaaaaggacggatgagccagacagttcggcggaaaggagaaagtgaaaagacggagaggacgagaaagtgcaaggaaaggcgaagaaaaagaagagggacgcacgggcagacgctttggagagagggaagagaggcgaagctgcaggcagagagagaggaggaaattcgacagcagggagcgcccagctccagggaggacggaggaagagagacggagaaaagaagacaaggaaaagaggaaccaggcagaagaacagcgagaccctacttgtgttcttcttctttcgaagtagcagacccgttgccgacgcacagagggcgagaccgagcggcgagattgagacggcgaaaaagagatttcgtccgcagacagcagccagcggatcgacgaagaaagacctcgagaagcgagagaaaatttgccacaagggaagaggaggcacgaagagagaagaagggagtaaactggaaattcagtctcgcgcatgcacctcggcgtgacgacagcgagagaacaccgagcgctggtcccgggaaaaaacgccccacgcgtggtgttctcgttcttctctgaatcttcttctttcgcgagctggaaagcgaacctgttctgtctttccctgcctttcgtctgttttgtttcccctggccgttgcaaggcaaaaaaacagagagaaacgcgagtcgagatcccccgcgctcgccagagaaccgaacctcgagcctcttctcggcctctctctccagccagccagacggtctccgagcccgtccagtgtacctcgactcatcccggtgtacgtacacctcagtttcatcagctgttgttgacggggctggtgcgtcgaatggtttgcacaccgggaagggagcaggctcgccgacgagagggctgaagttcgtgtcttcatccgccgtggcgttcttgtctctcttcccgaatttccagtgacgaagcgaagccgcaggaggcttcttccggtgaggccattcgtcgttgctcgggactcgtggaaggctggattctctgcctctttgcgctctcgcctcctcctgcgccggaagaagctccgagtctttttctctccgcaaacgcctctcgcctcctctgctcacacccgtaccccctcacgccgatccgggtgtccgtacacctcgcgcaacacgcaggcgtctctattcacgacgtcgcttcagtctgtctgtgagacgggtgtgccgccaactcgtttcctctaagaaactcgagcca

SEQ ID NO: 1441 - DNA, 2281 bp, Toxoplasma gondii
  source 1..2281: mol_type = genomic DNA
caaaacaaccacgcccggtctttggctaacgtctagagtgtctagactccagcgatgaggcgtacagatcttctggcaagatggggaaaacaacgaggggcctctctctgccaaacgaggggagcaactcgttgaagggtacggacgaatagcggggcctcccggattcgaaagtgactccactgcacccggtggggggcgcaggtgagcagctgcgggaggagcatagagaggagaacggaggggcgaagagaagagaaaggggaaagggaggacaggacatgaagccgacgaacggagacaggacgcctcctttgttttggtggagacaggagaacaaacggcgcgtggagactctgaagagccactggaggtgtggcgcaaggatgcggactgaacggggagggaaggcgagtgagaagaagagaggctgtgcttctgcactcgagccgggtttcctgactgtcttcctttctccttagcatgcaacgaagaggaagagacagatgccaaaagtggatgacctgatgacccaccactgggacggcccgacaatgaggctcccctccgtcgtcccgtggtagaagtcgatgttgaaacagaaatgctagaggacaaaatcgttcgctttttgcagttgacactcttgttcgtgttcctgccttctttccgttttgatgaaggaagggcgggagttcgagtaacatcctcgcggtttaattcgccgccttccccactcctttcacctgagagagatgaaataccatcgtgggggtcccctaaggtcctcattgtcattctcgttttcgataaactttttcggttttgcggcggagcctaggttctcttcctcagagcctgtgccctcgcatctgaagcagaggccccgctgtgattcaaattgcctgcacagcgaccagaagcctgtgaatgaaaattttctctcgggcgtctacgtagctcccgcagcctcctcgcctttgaaaatcttttagcgtttatagttcgtgcacagccccatagaaacgtttctgactgatcttaggagaacttgggatataggaaagagaacaacctagggcctgctacactttgatagcattacatctttttgagttagcttctgtctatttgcatctgtatctacagtatatcaatctcgcattttcttcagaggtggaaatgaccgggttcaagcgctgcagaaacctaacaaaacgggcaaaagcttctccccagtctatgaacgctgcacctgaactcatgttccggccgccagcttccaatgtgctctctacgcggtggctgagacatcgtgtggatcgcctaaaccaagatctcagctctacctcctctgcagctcttcaaaacggcgatatgaagagaacaaaaatcactcatcacaaagataggcaaattcatcgtcagtcagcttgcaagccagcacactcagcttttcctggaggaatgttttcttccagaaagggattatggttcaaaagagataccgggaagaaaccgagatgcatttcagtttctccctttcgcgtttgaaatatggttgaaatcaccttcgtttccgaaaaagatcaattgccctgtcccgtcgcgaagctgtacctctggccctctgcatgcgcgaaaaaaaatcgtcgctgggcgaagagcatagagatcgggaatggtccagagcctgtagacgggaaactgttgaattttctctctctagcggttgatgaaaatcaaaatgaatttctgaggaggaagacttcttcccttctctcctgcggtcagcaggccgtctcccaagcaacggcgagaagggaatccggcgagacacgacttcgttggctgctgcagagttaagtttacttgctcgtctccttttctccagctttccaccgtttttcatgcactcttgagaaaaaacgcttatctctgcatatggctgcctcctgcgccgtcttgagtccggtcgtgcctcttcctcgtcgccggttttcatcgtctctctttgtccggttggacgcgtgcggaagttgactaaaaagccgaaagaaaaagacatttcccctctgttttcgatttcctttcctgtctcgtaaagttgtggatctccttttcgtctctcccgcttcggtccttgcttccaacagacaaatcaaggaggaagtcacacgtcagggcagaggaagaagtaggaggggcggcgagagaggttgggcggatggcagaaaggaagaaggagaagaaaaaggcgtcgttggagaagggaactgca

SEQ ID NO: 1442 - DNA, 2306 bp, Toxoplasma gondii
  source 1..2306: mol_type = genomic DNA
gagattctggagtcggtataatcggcatgacgactcgaatcatccacagagaagaagacaagaagggtgacacggaggggaacgaggaaggaaatatcggagaagttgggaagcctagagagtcagcggcgggggagaaagacgcagcagggaaggctacgagagaagaacgataacctggaaaagagaatgacctccgaacaggagggtctttgcagagagaccccgcactgaacaagaaagcagataacttgtggtcaacttcactgttttcaaatggcggccgggcgacgaccggctcgcaaacctttgtcgtttggtagacatgccaggcacgagaattcacggggacggttctggagtcaggaatacgcgaggacagacgatcttctgagaaccgtggcgatgattgcgcaaacaacgaaggccgccggactccggcgttgtgtatggtgtccaaataacctcgaagcggcgagctggtgaatcttcttgcctgagcaaagcgcggtcgcaggcaggctgcagccaccgcgacggctgccaacagcggaaaaatccatcgtgtctggtgtcctctccgtgtccacctcagcaaaacctttcctttgcatccagtatttttgcaagcactgcatgcaaatgccggactcgcatcatcgccagcgaccggcctgccccagaaagtctggcgcatgctggcggcggatctggcgaggcgcggaaccggagtcgcagtccagaggctgtcaccaggggcttcgagaacaaggaggaaaggaacaacgaaaaaaattaagacgtcaataagttcttaacgtccgagagaacctggtgaaggcaacaaagagttgtgagatgacaagcagacaaggttatgacagggtagaaagaagggaaagcgaccgggtgtttggccatcacttactgcctggggtccataactttttcactgggaagagtgcatgcagtctcggatatgacaggaaggtgaagacggccatcctttcagggaagcggtcctcaaagtgggcatgaggctttcccaatttgcctgagtttctggataccgtcggcgactttcaagggccctgtgatagagtccgacaaggcttcggcgcgctcctcgttcttctctgcagtcgattccatagtcttaatcttgcagatgtgtcctaccacaatacgagcacaaattttagccgagaattctcctgtaggagagaccagaaacgcccaaccacatttgaaggaaaagggacatgtgcgcctcctcgtgcacactgtaaccaaggcctgtacgaaaacgcgtaacgggcaccacagaaaagcacttggaggatcttggcgctgagcagaccggcagactcgtagtttcttttctacatctcgatgttcagtacaccgttccgccaagctgtcggacggtctgttcgttgagtatggctgcatgcggatctgcatgcgacatgcttcctcgcgaagacaactgacaactgccagccaggaaaacaaagtttctacattaccatcgcgaaaagaaatgttttttgaacttcgcgtttagatcggcatgacaagcagcatgcatatagagcaaggtcttcgattgatgcttgctttctaggcttggaccttgcccctcctaactgtctccagacacggaggcaagccttggcagccagcagagctattgggatttgagacagctgtgacccgccctttttcttcattctagaacggtgtgaaattatattttcctctgtatcgtgccagaactttgctctcttccttgccgtaattatcgccactcgttcaaaaggccgtcttcgccgttggtggcccgcgactcctgcttcacgagtttttcttcgttttcgccatcgagacacgtttcgcatgtttgttttcgagttttgtgtatgttgagagatgcggaaaacgctattatgcagtgggggatctttcgtcttcatgatctggacgtacacgggctctgttctcagcactttctcttttgcgtgtatgtaggaccgtcggtcaaacgtttaagaagcgcttgccgtgtacaccagagacttgcaacttcctctcgtttttgcttcacggactggcattgtaaaaggctgactcgcgatttttcgtccaacgtaacctttctgggcgaagtggttaagccggcaacgaacggctgtttattttgaggagcatatggagtcgggaagtccgtttcattccaggggacagccaagtcaagagtcgtacgacacccctgcagcacctgcgttggacttgtgcacgttgaa

SEQ ID NO: 1443 - DNA, 3407 bp, Toxoplasma gondii
  source 1..3407: mol_type = genomic DNA
gggaaaagtcaaccgcttcctcggaaacggccggacagcacgtatcctcactctctcgtcttctgtgcgcctcaaaaaacatcgatggcagccgagacacgcccttgggcagctgcccacccgatgccgtcggagacatgactctcgggccaggagtctctatcaagtcccccagatctcgttcacgacatccttcctcatcaacctccgctgtctctttcgtttccatgacgagctgtccgacgtcatctggatattcgcctccgactggggcgccgtggtcgtctccggtcacctcggcagcttctcccctttcttcatatttgtcaacctcccctccggtcctgcatgcgtctgaagttttttcgtcgaccctgctgttccatgcctctgtcgtcacgtcgcgctgtaggtctgtcgggaattttcgcatgtgtccgttgtcgacatcgaaaacctcccttcggtcgcaagattcgtggtgtttggtaatttcaacatcgtggtggtctaaaactcccctgtcccggagctcggcttccggttgctgctcttcggtaacttcagtctgtttgttgtctacctctcgttcgcttcttctgtatccatttgagtggacggcctcgggctctgcttccaggtctctgcaccccgttgtgtttccctgtgtcacgtcagcgacgggggcagcgtcgcgacctgcgccccagtccatggttctgtgacgctacccatttacagatatcgcttttccttactgggtcgaattcctaggagtggcagagcagcgtcagagagcggagaggcgcacacaggagaaagaaaaaccgggggaagagagttaaatacgagggaaacggaccttgcaaacaagaccgatgtaatctcagccatgaagagagcttctatatggtaatggcagaatggggaagcagattctcgcgtcgttctgttcacacgcaagacatgggttggcttcctttaaatctctggaagacaccggatggaaatggagttacggagcaaacgacacactagaacgattggcggcaaaagatccatcaacagtaggtgggcttctagaggggagactacacggttctgctgcacacacaaagggcggaaagaactaaccgtgttgtgaggcacgcaaagtgagtcgtaccacttccacgcatgtccgtgtgctggccgatgagctagcttttttggggaagcgaagcacgtagcggcgacgctgaggaaacacggctgaaacaaatggaaatgggaaacaataccaacaacactcttgtgatgtcctgctggctgcacgaagaactcggtggactgtgaaagccaaagctacttgggcaaaaaacttctttgcatgccacccgttcgcttgcaccggcctcggccgtctcctcggtccagcagtcgacctcaccgatatctcaggcaggtctccaggaggcaactaaccctttgctttccctagatcaaccaacatatgcataatttattttatcgggtatgtggggcgaccgcttcaaagtgtctggttaaagggccactgaagaagagctttcgttgccctggtggttaggtttatggacttgctcgccattgaaatgtctcccaggctggcatgcagcaaaaactcgatgaatgcacacagcagacccaagttgtcccagcattgtagtctagacaaagtctcttgtcaaccactgcagttagaaatggctagggctacgcagtgagagacgtacggttttttcacagagaaggattgtttgtctcagcgacgcggatgttttggtttaggaaaaaacacacatctctctagtatcgcttattgccgggtcacagcagtggaaacagcatgccgcacaaactcgagccaaaaaaataatcgtgtgattccggtttcatgtgtctcaagagactgaagcggaagtggcacacggtgaatagatcccggatcctctgagcgggtgtgtcgctggcggaaagatttgaaggatatcccctgcaccttaccttttcgcagctttggaagcagattgccctcgtccagaagttcgggaaacactcagggaatatcggtgagctggtggagatgtggcaaggcagacagtcaagtgcaggagatgtttcgcgcaagagatcatgaagcggctccatacacaacacacccagaatgtgtttttgagagatgtgcgagttctctgtttgaattcgcttctaacctgaggaaaggtactcgagtggcgacttgctaatcgcggaaactctctagctcgtacgcctctggttgtaagttgcagaggaagagttttttctcccggtacactgtagtccgccgaatccaagcgattgccgttttgtccgactgattatgtcttagcgcactcctcactgctgtcagtgcatagagaatgcgttagcattggatcctggaatagtaagtgaagttaatcatgcttgtaaaagaaagtaattccccaccaagaccacccgtctgtccgatattgtgctgcacctcggagtcacgttatagtgtctgcgccacgttgtaatacagaatttcatttcctcagtaatgtttcagctcgcggaatgtacagaagcaagtctgatttcttaagcataccatttttcattgaccatcagagcactaggtttttgcacactcatgcctgtgtcacgccggagttcggtggctgttttgggtggagtcggtgtgagctgagcggctcttgatatgaaggaatgcgtcatgaacggcgtcgttaaggtaatgcgtgttacaagctttcaaacacttgaaaaatactcggacgcgttcagtgtgaaggcagtcgtctggcgagattcctggcgcaacgcgtgcacgcaccgacatcaagtcatgttgtcctccatgattctccacgatcaaacaaacgacctagacatgaaacattattgttgctgcatgtcgattacgtgtgccaggcaagcaaacacagaagaaaacctcacatttgccgttttagctcggcttagctcccttcattcactctctgcgcactcttctagctgcgagtgtacaagttgcaatagatttgctacaggggcaacttgcttcatgtggaatatagctttttattcgggcatctgcaaactgctcttcggtaccacgtgcatgttgatatccgcccgtggcgcagcatcttgcttgtgtttctgtcttcagagaatttcgtcacagcaggcagcgaggcatgacactaaaagtcttatcacgttgttgtagaagagatgaatcacggtgtcggcgtggtggccacggagaaccgcagacaaaaaacggcatcggtagcggcacacgtcccaattaaggcagtgtacacatacacgcttcttgtgggtccctccaa

SEQ ID NO: 1444 - DNA, 1818 bp, Toxoplasma gondii
  source 1..1818: mol_type = genomic DNA
tttgtcttgcaatcaaatctgcggaaagcgcttgcttcgcgctagacaggaggaatgctttttggagaatctatggagcttcactatagggggtcccgcgggttttctggcagcccgtcgcccactgtgccggctgacgagcttagtgtttctttgcgggtttcctagtccacgaatgtggcatgcgaaacgcgtgcaagctttttaagggccgccctaagaccacgcttggactacgcaaatgaacctttttgtgcagttcacgacgtgcacgcagtataggtcaacacgcatttacaagcgacatcgatcttcgtgtgactcgcgtgtacgtacactacagcacgcgtttgcgatgcgagggagaaacacgaaagaaccgtgcaggaagacaggtgtttgacaatctatatgtaattctatatatttgtcagtttggcgccacagtgggtgctgcaagttcttcggcacactggctgaactctgacgctgtccgtgttttgttgtaaagctgcagacaccgatcatgatctgctgtttatttagttcagatttcgacacgtttttctgcgaagcaggagactgtatagaaccagcatagtgtacttaggactgcgctcttctgagtttcgggatttgcaacgcgtctgttcctaagaaaacggggcaaagcaaacggctcaagcactgacgcctccgaaaatacgtaccaccaagaaaacaatttatctactacgctctcgatgaacatttgaatgccatttcgggcaatcgaggcgagaaaatgatgtacgattgctttctgaaattgatatgtgtgatcttcgatctgttccgtatccacgatactactacttgagtgcggatgagcgtacggttcaattttgcctttggcaaggaagcagaaacagcgtgatactgtatcttgaattaggtccgtatacggtggctatgcttcgtttccatacctttctggatgtatgcagctaaggaactagaaaccggccatgcgtgacagaggtgtaaaagcacgcagggagcgtgtgttctgcgctttcagctcacttgcaatctgccaaatcacagtgcgacacatcgcaacagcgtcgggacgaagtctctgacggccgcgtcgcatgcacgcgatatagttattttccgttctatcaaccgctggaaggacaacgatgaatacagctggaaagtagcgacggaaggttctccggtgtgcgaaaatgaaaatatttttttctgacagaaacagtgcctgcacgagggttgtgttgtttgctcaaggttctttgcgtcaacggtgcatgcagttcatgcctttgctaaaatctcccgagtccaggacatgaaaaccgacaaaaacacgccttttgttgtccgacattgccgagaaactgtgaatggtttgtttggaggatgtgtgttgtttttacctcgaatcgactgatcgactgtgtcgcaaagcgtcggatgtccagtgtcgatgtgaggaccattggaccgctttactccgcagtcagagctcctttcgtccgaatctgagtcttctgccacaacaaggctccgtgaatgccgattggaattgaactgtgttgactggcagcagtgtagtctttgtgcggatgtccgggcgggtgtgtgttggtctgcctgttctgataccccggcaagaggcaaaaaaggcatcaaattacgtggcaagagaaagcctgagattggcgcggtgagtgtctcttcctcgtttctttcgtagcgcttgcactgaccatttgcagttcctcgcaattcgcccctcggcagccacga

SEQ ID NO: 1445 - DNA, 3094 bp, Toxoplasma gondii
  source 1..3094: mol_type = genomic DNA
aaggacgaggttcactcgggattcgagcgaaggctctgcgccacagaggtgagcgtcgaacgcgagcggttccacagcgtccgtcccctcggcggcgaaggacgcgaaaggcgaagagaagaaagacaacaggcagggatacgcagcggctgccccccaggcctcgacgcctgggtcgcgcgcgtcctgcgagctcgccgggtgcagcagcgacgcaccgagcgccgttgcatgcaccgacccccacggcgagctcgctccggtcgcggccgccgcgcatgcagtcgctgcatgtagagaaaagagcggagcatcgggtgcctcggaggggagacaagagttccgaaaggctcggccgacgggaagcggcgcctcgacggcggcgacgaggctgcggagaagcagagggagacatgcggcgaggagcacctcgaggagtcttagcaagccgagaaggtaggcgggatacaggagcttcgacgcatgcaaggcgcgaagcagcgacggggcagtcggcgcgcgacgacgctcggcctcgagggccttcaaaaacgcctcggccttcccaaggtcgtcctcgtcgattgacgcggatccccccaagaacgggaggaacaagcaggaagagaaccacgcaaaagacaacatggaagatggagatgaagaggatcgagaagcagaggcagcagaggaagaagttgacagagaagaatacggaattggccagagtgagagtttaagagagttcttctcctctgccgaggaggacgagcaatcgcctttgccacagtccatcgtccaggcagagacaggctcagaaaaaaaacaaacgccgatgcaagcgcgtcaaaacgctagacgaactggggctctcgatcccagagaatgatgccatcgagcaacggatgtcgaagggtgaagcgcggaaagagtacgagacgaaaacaaagaggacggacagaaaaaaatacacacacaaacacacagttcctctagagagacagacccagaatcgaatcaggacaaggaaaacgtaaaacattgtcgtcgccactgctcgacttgacaatctaggcctgcatcccgacttcggcttcaacttccacttaacgccttgcgcatctagactgcttgcgacctttcgttctccttccagttctcattctatttttctccctcctcgtctcttctgtgtcgtttcttcttcgtttccttcgaacgcctcacactcctgcccattgcggcgcccctgcgtttgtcatattttcttctctctgctctcctctgtctcctctcctctgtcttctctagcttgtctcttcctctccgtctcctcttctccgactgcacctctccgcctctttccgcggatctccttttcttctgggtcttctcttcttctccctttgcatttcctgcattcgccgttgctgtggctgaagccttttgtctctctgtctccttttcccctcgcgagggtgtctcctcgacgcagaggaggaagccggaaaagagaggcgcgccgattcacttggggagagcggaagacattttaatgtcggcaaagaagaggagcttgcgaaggcgcaacgcgagtctttggcggcgcgctctggtcgaccgccggagcggctcgagcgagaaggtgcctttctggcagggaaaagccgctgtcttgccagttctcggttcttctctaccgctgcctctgcgccgacgcgctgagaaaacgctggacaacttgcacaacttgcagacgaaaataaaagcgagagaaaacgagaggtacgaggagggagacggagacagtcggtctgcccgcgaactagcgcatgcgccggccctcaaatcagcgcgcgcctcgaaacgcgcgctttttttcgtgtgtgtctgcgggcagggccgcccgctccgagagagagaggcaaaggcgagcagggagtcgcaagacaaagaaaagagagttgaaagcgtttttccgcaggctggggctcggtgtgtggactctcgcggaacagaaaggaatgcaggcacaaacgcgcggctcttttgtcctgttctcgaggctctctgcccgctcttgtctttgctcgtatatacctgaagatgcacaccgcagcgtcctgcgactcgggactgtcgagacacccgagtctgagagcaggttcctgaaacgaaatggcggcttttcttcgcgacttctcctctcttctcccatgttgacaagcggttctcgtactccttccttcgtttcgccggctggacaagaaggcgatgctgccgtatagggagagagcgaggaggaacctggagaggaggtctccatggctcggcgctcgattcacaggatacgttttttcatcgcggggaagctcctcagacactctcagccaccacaacaatcgcgcgcttccgtcgacggtcgcgagggcgtttcagcatgctgccctttcctcttgagtttcctcttttttctcgctctgccttcgtcgcctctgtctccctgttccttcctcgttgcgttcttctctttctccggtcctcctccgcgcctgagcctccttcgtctgcattccagcatgtcgtcgatgtcttcgcctccgtagaatgcgttgcctgtttcaccctccctttgttaagtttctcttttcaacaaattcgtccatcttctccccgtcctcactctccaccctctctttcgttcgttttttcctctccaccgcttcgtctccaccgcttcctctccaccgcttcgtctccaccgcttcctctcctccgcttcgtctcccttctttgcttcttctttccttaggcgcgtttccttttcctttcactcggtagattcactggcttcttcttctggcttcgatggtcctgagaaggcgcaacagatcttaggtctcgtcttcacagccctgcaagatctaaaccgcagtcggacgcgtagcgcactctccccagaaaaggtttctcgatcctcctgcctcagagacggcgactctggtctggtcgcgccggtcgtgctcctgtctggtgaatggttttctctcgctgtcaggacagctccgagcagtccttccattctcagcaggga

SEQ ID NO: 1446 - DNA, 2537 bp, Toxoplasma gondii
  source 1..2537: mol_type = genomic DNA
tgcttcttcatccgtcctcatcctaatccgtattgtgtttcgcgttttctcgtgtttgtttccgttgcagggagcagactctgtgcagcggcatgtttgaacgcttggcactgtgacgtatattttagaaagctgcgaaacgacatgcgcctagcagctgtctcctccaaattacgcgcacttcatttgcacctgaaggatagtcattgactgtcaaaagcattccgtgtagtaggtgcaagtaacgagcttggcagtccagtgtgcaacgtgtcattcacggattttggaccgctggctccgatccaagcaatcaactgatccgctcctcgcttatactttcagcagacacagcagccttccagtgtagcaggacggtgccccgtgcttggatgggagcttcctccctccggggtgattcctggaacgattgtcattgtacattttgcgcgcggttcggcacctcccaccaagggcaatggaaaaaagttgtaagtcagccataaagaatatgcaagctgatgaaggtgattgccttgcaccagcccacaatgatgcaagggtacagttccggcaactaatgtgttattcactgtaggctcgcatacgaggagcgcaccgcagggaccatcttgtatggcgttcagctacgatctcaccttcggtgccatgtgaagtgcagtggagcgtaaaccgcaagagacgacgaatcaggccttctccatgtgacctaaaacatccatatatcctcacaaggaacagaaacaccgcggcaagtgcatcaagagttccactgaattgcatcgagtgtgtcgttcgtgaaaatgagcgcgattgtaccgtactagaacaccgctggtttaaatttgcaggatgttcagggcgccacgcgtgcggcctctcaacccaaacgatgaactcgtagcatgtgtaaaaaggcgtctatcgccagaatccaacaggtattttcaggggtgaaagtccgtccaactgtggacggcgagattggagcactcggattgcgttcacaccatgctcgcgtatgcctctatagcttgcgcccaacaggttgtctgtctcagcgtccgaggtagcatcgcacacgtcagtgtgttctctacgggttttaagttgcccatagaacaaagctgatgacgacttcagcgtccttctccgtgactgcaccggagaaacttgaaggacagttttcgccttcgattgatgcagctgtagactagtaggttcaatcacgctcccgtcactccttggtgaaaggcacgagtatgcatccgaatgagttgccaaccgaatagttggacattgttcaccggctccatgttcttgtttgtaaacatggtttcaagcattcgcaagaaagacatgagtctgcttaattgcttgggctctgttcagcgcttacgaaaggacccggtgggaagaacgtatccgctttctaattaataacgcgtcacttgcgtataaacgaagtagagtaccatcattacaattctgggaagctactgtcggttgttccggtttgacgactgtatagacgctggttgtagcaactgtacttcgttacaactgatggatggttccatggacatgtacagaattatgttgcttaccctatattcgtgtggtcggaaagacagcaaactcaacgaccacacgagatgccgtgtcctggtgagtgctcattttgcaccgggatggtgttttacgtgaatggcatgatgcctcgatcatagaacgatacgaccacccaccgcatgtgaagaaaaaatgttttttccaaagcaaatctgtcgcctatacggtacgacccggtggtgaccccccaaatgcagaaaccaacgtcttgtgccactgtagagtagcaagcgtgtacgtgccgtttccacaagacatgacgcttgcggtgggctcttcagcgagggtacttcacaggccgccatactgatcccaccgcccaaatccttcatgcgctccgaaactcccagcgatgacttcacgtatcgcacacgctgcatcaagccaccatgcatagtggaacatgtgaattgatgggctcggtcgaaaggccaaattcagcactccctgccccattcagcactttacagttaaatggggaaaactgcttgatggctctctgaatgggaatggcgtgtagccgtccgtcctcttgccgatttcagttgcacggttttgcgcgtcgccctgcccgcttcatatgcagagacgcacggtagagtagacaccgggaggccacacccctccacgccaccggcagcggaagcagtcggtcgatgcctgggtaaagccagacagtcacacacgtgggccagtggcctacagcaaccatactgtcagctttggtaagcgagcactggacgatcggttacagagtcccccctctccgttctgcagcacacaccccgagacatgtcgatgtgtccgtttgtagaggtggccgatgaacagatttgtttgtgtataggaaaaatccactagaaggtgatagactgtaggtaata

SEQ ID NO: 1447 - DNA, 2872 bp, Toxoplasma gondii
  source 1..2872: mol_type = genomic DNA
catcgggtgtacataaactggtgatgtggaccctgttcagttggtccttgagaaaccgggcgagtgcccccgtctttgtcgcggctacgaagacgaattgcaggtcgtttctgtgcagcagcgcttcgttcgacccctccgcgttccctctgccagcttcttcccggccaaacgcgggacgagactcccgcatttccaaaaggttttgactctggtgaggcgacgaagaccaccccgccctcgcctgctctcccccgcgctcagggccctcgagggcgactttcgcgaccgcaggcgaggcctggaagcggcggaagtgagaggagagcagcacacagagttcctgttcgtagaacgagtcacatagcgtgtctgcctcctcgatgacgagcgcttgtacgcggtgcatgttcacatttttcttgtgcaggtgcagaagcagacgcgctggagtcgccaccaccacgtcgactccagagcgcagcatgcgaacttccttgacgtacgactgacccgccgcacaggccgcagaagtgatcaccgaggagaagcgccgcaattgccccagaacttgcgtggcgagctccctagaaggaacgaggacgacgagtcccggctgctgcgggtacggcgcgagacgttctgtgtcagcagccaggagtcgatgcaggagaggcagcgcccaggccagggtcttcccgctgcccgtaggcgcgacgaccagcgaagacttccccgaaagcagaatcggaatgcagcgctcctgcacatctgtcggagtcacgatccccccccccttcagaaggggaatgaggagggaacgatggagagaggagaactgagaaaaaagacacgagtcgaggccggctgttggcgcggaagaggctgcgggagacgcgcgcgaggagacagaggcaaacggaggtgaagaagccggggtagcatctgagaaatcggcctgaggaggatcttcgagagacgcaaaggggatgcggctgggaccggagaacaacgtggtggatcccgacgaagctgtttcgcgatcctgcattcgtctctcttcgtctcgcgtaaggtcagcagcacgccagcaaaaaggcgcttccagcgtctggcagttctcctccccttcctggcctttttctcgtcctggctgcgtctccccgcgagacccctcgacgagaggttctcctgggctcccagactgtgcgccgtcctcgttctctgcgaacgggagatatctgctcgacccccccgttgcagagtctcgttgaatcttctctgtatgcgtccgcgatcgccggagagagcgagctcctcgcgacgcgaagcgactccaggccccggcgcatggaccgacggagccgtcgccagagtctcggctgtctagagaggtccaccctacaggcatcccggcacagaggagcggcgcgggacgagagagcctggagacgctttcgttgggtcgcgtcttttgagaggtgatcgcgccgatgcatgcacgattcctaaaaagcactcgagggcgagggcggctgtgccgggtgacgacactggacgtacagggggggacggcgcgcccccccggtgtaaggagagcggagagacgagtggccattcgcaggacgcagaggtgaaagggagatgcttctcatcgcatctggggctctctactacgcgcgaggaagacagaagaaatcgaaaacagagtgtccgatgcacagacagggaatactcgccctcgggacggttggcgcctccttgattccacagttttagctaccgaattctttggtgacgactggcatagtcacgctcagcagatcgtccaactcccagtagtcttgcgtgttcacatggtgcaagtcgacagacaaggagaaacgggggcgaaacagcaggcgacgaaatgggggtcgctttgagcgaagagaggggagacacagctcgtgtgttcgtcgaaatgtgcaacgctgtcgaaggggccgaggactcggtcgtcgcggggttttcagaactccatcgaagccgaagagacagcgagcagcatgcaaaggcgacagagataccaacagaagaaaataaatcaaaagcagaagcagaaggcgaagaaaaggccggcgggaagtcaacgaaaatcgaggctctttcggggctgcacactcaaaaagcccgcgagcggcgactcggcgaccctgggacttcccacaagatctgcaagtgacttcatggaaccgctgctagacacagaaagatacctcttgtctgctgaagtgtctggcgttatttattgtgcgctttggggaatctctagcatgccttttctcccgcaaagggcctagacgaggcgtttcgccagtgttgcatctactcgtctgtgcgctgtggacaagtcacatgcgctgcgaaaaagcctcgaaaaataatccctttttgacgatgacgaacgccgacccgtttcccagctcacagcacacacgagtaacagggcacttgaaaaggctggttcggcacccatattcacggtattttctgtctgtctcggctttctaggcgtgtgcgtctttccgtggcaagaaccaatgcgtttttcgcgagtcgtcttacggtgggcagagcgcccttgttgaaaacgggcgtgttgagtgcgcaggttgtctgaggttctatgcttcttcatttggggaaagagggagaccgacgtgactgtcagaccgagaagaaagctggcagatccgctggcagtttgtgttctcagtgcagagtgctgttcgtggcgggacgggcagacgtccttggattgcgacgaaagcaggcgtttgggatacgctgcgacggttggacccgatttcgagagcctctcaagcgcaaa

SEQ ID NO: 1448 - DNA, 3628 bp, Toxoplasma gondii
  source 1..3628: mol_type = genomic DNA
tgcctaaaaactcgagggtcggaatcagtgctcttcggtgtgtcagggactgtggcttcttccgaagcaaggcagaaacagtgggggggggtctttatcctatgtgagttcccttcctgcttcccaaaggggattcagcagcgcactgtcacttccatacaatcttgaaacactctcctggcgaagcgacgcttgtttttcccccgtggccatggcagtctctcgtcatatatatcgtgctatcgagtcgcgatcgacagcccgagcaagaaaaagatccaccatgttggtttgcacccttcggacaaaaaatcgctcacgcggcaacctctgaaacaaatgttggggacgccacgttcacggataaggcgtgaccattgagttctagatctcattatcatgagctagtagtggacggaatctttttggaaaatggagttggtgtcgcggtcagaacgggaggaaatcgcattatgacaagagacataccattcctcttttgcggacccagaaacgagtcgtcgccagagtgtacaagatacgacgtacttgacaaaagaaagacacacggcctgtcattttcggagcggcgcggctcggcggctcctcacactggttgcatacacaaataaggtgtctctcccgttcaaattaaaaacttaacagtggacatgactgctttttctcctatcgtttgtttgctagagtggcctcctttttcagttcgatgcaccatgctggaaaagtcagacaagacattcctccctcgagctgccggcgttcagtctcccgtctcccccgggaaaaagcgaccctcagtagcccttgaagattgacagagacagtaagaagcaccatatagtgacagaagatgcatgagatgaataccgtcctttcttcatgcggggctgttggatactatggaagtattctgcgctacagcatcactcacgtaggcacgacctggaagagtcaaaaatacctacaccacggaccgtgccccttttcagactgacatccacaaggaacaccgcgtttttcgtctttgcgatggtcaaaagaatgacagtccttgtacctgtttgataggcgtggctgcatccgtgtttgcggcctcattgattgtgtgcacgcaaccagcagccacacttcccacatctctcgaacgaggcagagactgcagttccagctgaaggagactggccaccatacccatgggcagatccacttcacacaaacgtaggtctgtttccgccggtcttctggcaagaagtgaacagagacaagacatggaagcacaccgagcgtgatcccgcagacacgtggctgagagaaaaagcgtttcagccctctctcccttttgtttcaccggaggtgccagcttaggcctgagcagcgctctcgctcttcttggactgaatagcagcctggggaggcggaggaggagccttgagaggcggcggacctgaaatctcaaccgccagtttcgccggctccgcaggagctgcctcggtcgtcgcagcctcaggagcgggctttgcctcttccgcgttttctacaggtgcggcttcagcagtcgctgcttcagcggtctcaccagcgggggcggcctctgtaaaaagcaacacaaaaatgcgaaattcaaatcgatctccagacgctcaatccgaactagttttttgcatccgctcgttctgcaagctggaacacgtgaccgttgaagaagcgccagcataccacacacttcacactcgcggaaccagacacagcacgcttgctgtcagtgatcttttttggacccctaaaccctaacgcgttttctttgcgagcactcaagactgccggaaacaaaatatggtctccgaagggtcttgcgcccgtatgaactcacaacagtggcccgaaccccctgatcttccacctgagctgcttataatccacttgtttgtaagtcatatgaccatggaaaccactttacactgttgaagctgtattatcccttcccgaccgacaacaacgtagccagcgatgtaggccgactttgaggcggctccactctccccacgcgtcttcacaccaccacccacaaacatgttccagcatcacttgagctatagcgtcttctactacacaccgacgagaactgacaaacagatttctcatctctgagagcgctctacgactcacatttcgttggctgtgcagtagtctgcccagccgcaaacctctgccctagcactggtagatccgacatttttattttgtctcctaacgaaacatcactggatgtctcctatgacttgatctttcagttttacacaatagtgaacgacaagcctcagaattccgttgtatctggcgcatcccgagcaaccacattgggggtggcggtatcgcggctaggcgcctcggaggctccgctgcatagatccactacttccgtattctcacagcgacgtgaatgtgcgaagcaagcgaatcggaactcaacaagctggttcttatagtctaagtccccttcgccatttggagcggtcgacttccgcggcagttttcctgctcgtggtgtgggagctaactccgccgcttctccatgcgtgcacttcctacctgtggttgctgcaggagcagaagcctcctgcgcaggttgttccgacgtctcttccttcttctgctcaacagcagactccttcttttccaccggagctgcaggcaccgcgggctccggattcgcgggtttttccgggctggccgcagacccgctctcacgggcaggctgggcgccgcctgacaagcagtttcccatgatgactctcaagctctagcggcagggccgcggaaaagtcaaacaaaaaaacgtaagcaaatctcgctgcagaggaccgcgcctcttggactttctcaaaaataaccgccacgcaaagtaggggtaactgtcgacacgagcgcacgcgcctctggaaatgaatcccactgcgcttttcaatcgggtagcgcaagaacgccgcggaatcccgcgctctcaattcctaggcccacacagcggagcagctcgaagctagtgagcacatgtagctcgctcgcgatggcgcggcgtcatcgcggaacagctcagtgcacgcgcctgcggtcgcgctgcgaaacgcggcagcccgagccccccatgttgtctcgacaggatccgacgtgaagcgaaatcacccgtggtctctcgagtgacttacctcttccgtggtgggtcctcgtgagcctgcatccccatgccgaaacgagagtgtctgtaacgagtgtagttcctgaacgggaggcgtgcgggaaccttcggcccttcgcaatggaaaacaccttctgagttgacgtggtgtcgaagcttaagagcataatgctgttgcttgtgcgaccaagtggaagaagcaagagcgtggcagctggtggaggacgcgagaaaagaaggtgaaacgcgttggtttgcgcggactctttctggtgtttttctgccctttggggggctgggaaacacggagaacgccttcaccaacaaagaggatgcgtcagaatgaaaaatttggagggactctaaccctcccgcgagagatctgcgatctctagcattacatctcggaaacca

SEQ ID NO: 1449 - DNA, 2069 bp, Toxoplasma gondii
  source 1..2069: mol_type = genomic DNA
caaatatattcaccgtctgtaacagcagacattcaaacagccgtgaaattcgactttctagatagaaaggaaacttagtctgcttcgcttccgaaaacattgagggaaaattaagcgtacgtattggttttaccccgaagagaacacgtgaaaagaatgagtgggtcatctcgattcgcatattcgcacgaacatcacgtttaaatgggggatccagctctggatgcccggagtaagtgctgtcatataccggtttggaagaaagtgaatcgtatgctagggatgctgccgttcgtgtcactttgttgattgtggagcagaacaaacacataccgatttgttaaggaagtcatgcgggcagctttgggaatcactcacgtgcgagcagccttcgtttcaaaagtgagaaaagctgctagaattgcgctacgctgcctgattgcccgttacagagttgctggtagtgtttcggggggccgatacagctgactagttggctgtgcaaccagtgccgtcgtgtatgcagaacgacaaacagtttacttccaattggatatcgggagagcgaaacaagctgaatgcgacacaccatgttgtttttgacagctgtgcgacggtttaccagatagcatgccacggtcgtctctcaggatctgcggtcacttagtgaataaacctagtaatatgagcgcacgctagcgcacgtgtgagcaaccagagaacgtgagtgtggtggtccagcgtgcttttgctggtgggtgccatagtggtcatacccaatgaggcagctttgccagaggctgttttccaacctctgcagttttttcttcgcagtgtctttgttgtgctagagtcaaatatccattggcaattgatgcacttacgtaattcagcgatgtgacacggattgagacttcttcatgaggtgaagcacccaccaaggtgggtgccagccgtacgcctctacagctatgaaatccgttatctaaatcgctcatgttccagtgctgcgcagactcgaacatgcgtctggagtaaagctgggcgcgtttttcctattgagggtgtctgctgtgcagagagtttctagctgaacgcacattctctccaggagtctgctttactgtggacctgcggcagccacacacatctaatccttcaacgtcgccgccgacaagcgaatccatttagcgccttttacactttcacagcgtactgcttgcacaaaccgcgtatcagatattcccgccacgaaacacttcttagaaactgatccgcgtactgctgatgccaggcaagcatgcatagattgcgtggtagctcgtcacattcgacagaagaaatcggacagcaacaccattttggatcaaactctcgatcttggcatatttgtgcccctttcaagtgcggctgaagattttggcgtggcagttgaatcgagagggcagggtcacctccgttacgggtagcagatacaccagcgcagtgtgcttctttgcgtatgcaatggactcatggacagcgacactatcgttctaaagagcaaacaaagagtacagtagaatctctgtgggcgtcatttcttgtcgtatcgatcgaaagccatatcagtattctttttcatctgccgattttccactgtttatgattgagatttattcgcattctgtggggtgattggcttccggtagacagagctttcggtccgtgagtgatttttctttttgtccaacccagggctcctccctttcagtagcctagtttttcgtgccgttttgttaatgcaaagctgcattctctgagttccagttacgcaaagacgtgtgtgttttcgaaacctcctctgaaattacccttggagctgctctcatgagtcattcagtcgccaattgtcctgatttcgccagtttggctaggtcgcgaattcctaatgcggctccgagaaatcgtgttgaggactgttctacacgaaatcgtaccgagcggtgcagttttttttcaggtatgcatgcggcgaagatcacgatgggaaggagagacgacgtgctgtaatagttattgacccaaga

SEQ ID NO: 1450 - DNA, 2482 bp, Toxoplasma gondii
  source 1..2482: mol_type = genomic DNA
tttctgtggtgctcctcgatacagggaacttcaccatggacctgaagcaagctgaagacgaccagcggtacaagcagctgcagtatgggagagtgccgagcattctaacgaagtaccacttgtagggcgtgggcggcgttcgcctctaagacggctctcggcccagattgtctattccagacggttttctgtaacgactctgccggagattctcccgtagacgcgtgaattgctcagtgtggaccaaggcaacctttctgtggttcccaagtgttagagactcagacgaacgttggagtgcactgctttttggtcgacagcccacgctgaatccaacgataaaaaaacgtttctaccgtgcgttcagaaaaaatgcactgtttttcgcgcaccagatttagaatgtctgtctcgaagccgtctcgccggggctttcgtaaaaaaacgtttcgcggtgtcttcttggctacatctgcgagtgtccgttgctctccaggtgtcagtgtgctgtcgcaaaaaacagaggggcagaggggcgcgttagaagacccacactatgaaacgcacttgagtaacgtaacagtgtagaagcttcagctgcgtctaatgtttgaaccactcactggatgcgttttcatgtttccaaaatcatgggggcgaagagcgtatcacgcggtggaaaaggcattccttccagggcccacgggttgttggtattcaaataatcccttaaggatcgaggaatcctctttgagatccacgctaaacagtcatgagtcattagcgtcgcccgcaacaaattaagccgcatgtaaggaagagagcgcgtatatcgtgaagctcccgcccgcgaggaaaaactctgatgttggtgtcgcctttctctagtcagtggagacccgtgaacgcaagataccgtttgcctttagtcacaagcaagagccgcttgcggagggaaatttggaaagacggcactacggcgacacgactgaatttgaattgcacccaagaaccattttgctggttttgttttccagtgaacaaacctaggggctcggtgaacctagacgtcgaacgcaggacgcacttggcgctggcacacctagtttgaactgcatgcttttgtctctgaagaaatctccacgttcttgtcaggtcgcaggatcacctttccataagctggtggaagacagcgtcatcagtatctgtggagcactcgagttgaacagagtcggagtccaacccaacagaaagcgtgtcgacagcagtgaaactgagagttctcgtgctgaaaaaggtccttcacaattgcacaattagaatcacgtgtggaagtgttgaatgcctcaacgcttggtgccagctgttccaaacgcctacttaaccgaaggttgctagaacgtctgggcagatcggcgcttaccaaattcccttctcaacacacacagcaaaatacgggattgccgcgaggaccttgaaagcagctcttttggatgcggtcgtgaactgttctctcatgacgcacgattcaaacatagccgattcggaataaccccactgtcggaggatcttgaaatccaacgcttttagctcgctgaagcagtccagtgcggcgggcacgtgcaaaaaagccgtaaagaacttttctgattgattcacctaacaaacacgtcgttgcttggaacaacactcttgtataaggatttcctttaatagtccacgaagaagtttactcgcacttgaatcccaagacgttggagatggcttctgcagcgagacgcgtgtctcgtagcaaggcacatgggtccgtctccaacttctcgtcggctgcggtttttcgcgtaacgtggatccgtagttttttcaacgcgttccctatattcgccttctgcacatttaagtgcttgccacacgcatttctctgttcgtcttctcgtcggggcaacttccgcgttttccgcgtcactcagacacacacattttcgcgtgctctgcaagctggcggccgtggtcagctggttctgtgttcgtgtgcgacaggattacggcttggttgcctccactctttctcctcataaggcgcagagattcttttggcgtggatggtcacgggaggaaggacggcttttttgcgactggaaggttttttcggagtcgcgtgcgcagcgtgtcttccgtccgcgttcaaaagcgacctttcgcggttcactgacaagcgggagtttctcttttccttttccccggtagcgccgtatctatctctctttgacttcacactttactcgcgaacgagtttcctcttgggtttctctctcacgtttacactggggttttctccggtgtcccgccgtccaagaatctgcgaagtgttcaaccgcggtccgtagctctgttcttctcaataacgagctcagagagactttttgcgagttcagcaagctttgagcaagacgcgttgcactgaagagcgacgctttcgcca

SEQ ID NO: 1451 - DNA, 1443 bp, Toxoplasma gondii
  source 1..1443: mol_type = genomic DNA
tacattttggtgtgcattggttgtgagcacttcttcgtggttgtttggatatgccattttttctctggaagtttacgcgaggaaggaatgggacacagattgttagaagagaagtggagcgccccgggggaatgccggcataagaggcgaatggcgatcttctgtctgcacatgtccaagagcacagggaagtcaaaggttttggtgcttcatttccgtcacacaggaattgaaagagaacatgtgacctccgtcgctgtgaggataagtttaaattcgactggaacaccgttttctaatctcccgcttgccctgctgtcgggccagtgcagatgactctagaaaagtcgtgagaagcgagagaggcagcgagactttcaggagagagaaatgacctaaattcttggggcgagtgtcagtacacaagggcaaaaacgaggatgcgcagttcaaacccagcatgaatgcttcctgtctacctttctgcgccagaggaaacaccgaaagactttcttttgtgcaactgttcgaaacgactcgaattcacagtgtgtgcgtcttcaaatcctcgatgtacacacaggttccctcatgcagtcgtctctgctagagtgtcttctccgacaaacttccgaaagtaaagcgtgtaattcactgttcttacggaaaacttctctttgcttgttgtcaaaaggaggaacggaaggagacaatgccctccttcgtgctggggaaatgccgtttccgccaggtcctagcatgacagtttcaaaggagacgatgcctcccagtaagaggtactgatcagacaagcatctaaatagggttgttttctggttataaacagtagaaagcgaatagtaatcctgtcgcacagatgacgcctcgtagtacgaggtactgatcataccagagcctgagagggattttccctcggtggtagtgcaactactccttagtttatgtcgacttgattgtttcaccatgtaccactacattctgttcgatgttttcattcgatggagtgatcaagctttttttactgtttagcgcttctcctcccgtaccttcaacactggaacacattgacatggaacagggtgttccgcggctctttcagtctttcctctacgcgcatgtgcatgagatagcagcgtttaaaagtgcacagcgacaaaaagacgacgacaagacatgaaactctgtgcgaccgtcccctcttgccctccattttgtcttgcctcaccacgagagttcaacgcttctgctgtctggcttgacacgcatgcgagcaatcgagactggagaacaagtgccgcttttttttgtggagaaagtcacaggaaacacaccttttctccgccctttaaaagtcttcaaggcttttcaatggcagcaggaattccttccttcctctgtttcgagttttaggtctttttctca

SEQ ID NO: 1452 - DNA, 1977 bp, Toxoplasma gondii
  source 1..1977: mol_type = genomic DNA
ctcgaggccgacaaggccttctcgcaggatcgacaccgttcttttgccgagcaaagtgtctccttcctcacctcggtacccagtgggcttccgacccgttggcgcgggaggcggcgaggccttgaagattttaaagggcgcaggcgtcgccatcttctccagctgaatcgctccgatcacgttcttccggagcaatacgttccacaattcacgatctgcgggggcaaagcgcgtctccctcctactcttttttctccccacgcatgtacacacacttgcgagaaacacaccaatgcatacaatatatatatatatatatatatgtaattcgggcatacgaatacataaatatatatatatatatatatatatatatatatatataatctttgcgggtgacgaggaaggcagacgaggtcgactgttctcagacacgagagagaagtcgagcgcaggttgatgagaaggaaagaagagaggagaggctgcccgaggcgaaggtcgcgtaggggagagcagaccaagaagaagtggaggagagagacaaggacgaaagagttcctcaggacggcaacaggagtttctgggcgcagaacgtgtctgctggtgtctcaggtcgttgccgcagatcggagacagcaggggctgggcgtccgagctttgctccctcctgcctcctaacttgttgctttcctttccttctccattttcgtctgtctgcgttggtggatttcagaagagatcgactgagctgcagaaaccttctcgccagctccttctctgtgcatgaagaggtctttgttcgcccgcggcttatctctgggagaagagagcgtctcctgtcttcctgttcaaggggaaagcgggagacatccgaagaaagacgtgtgcctctacaggaagcagagagaccggaaaagaagacacaacgagcgagagaggcaacaaggaccaagccagtcgagggcgagaggagcgcagagccgacaccgaacgagaagttgtagccacatgcagcgatggcttgcttcgacacacggactcgcctttttctgcgaagaacagactcgcacagatgaacctctgcgtctcggtgtccgagagtcgacaggaaaaagaaaaaaagacgcatgcggcgcatggagagacccgcaaagtcgcctgcaaacctgcgtggggcccaggacaaggtcgaggaggaagacgaggcagcgctcgaaaacactcgccgcttttcgggtgtaaagacacccaaaaaggtggaacgcttgcttcctgtgctttctcgtctgcacgcggacgctttcacatctttctgcgaaaaccgactcattccctggctgctccaacctcgcccgcgctcggcgaggcgcagacgacaaagccacacagaggccccgagagaagacaaagaagaccgagagagagagctgagaaaaacgagagagacgagacgcagacagggagagacgaaaagcggcttctctctccacttccacgcccgagtttctgcactcttcccccctcttttgactccgcccagccaatttcgtgtgcctatatcgaaagcgtcgcggcctgcacgttctcccggagacaaaatacgctcttttatctctgatatttggagatggtaccaaccacgcagcttctatcctttgctcgaagcccagagactcgcgttctcttctctacgtcaacttctgcaaaggaccgctgctgaaccgcctgcccgcgccgttcaccgccctcgtatctgtgtgcagcgacagcggacctttctgttcattgtccatccttctcatgctctgtcaaagccaccagactctcctcccatgtctccccttcgacaaaagcgcgacgacatgaccggcggcagtggcgagtaactccggacgactcggctagctgcccctgcgtcctcttcctccacttctcctctttctcttcttctccctccccttcgtctctgcatca

SEQ ID NO: 1453 - DNA, 1581 bp, Toxoplasma gondii
  source 1..1581: mol_type = genomic DNA
cagaaactgaagttttgcacagtggagtgctgagcacccacagttgacaggtaatgatgcacgtgtgggcaggtctacgcacgcaggcataggggttggcctgtctagacacctgaatgcccacacacgtgatgtactcccccagcgtagcagacaaacaggatttgagaaccagttctgcacaatgctgcagactagaagggtggttgctctctggtgccgacaagaaatgtggtcgacatacgataaccgtttttttgagaggtgggttctttcgaaaggcctaggcggacgagtctgataggtgaactttgaagaacccagttatccgcaagcgtaacttcaccgatgaaagctcagagcggcaaagaagcgcgaactgaatgtttttgatttcactcttccagggaaatcctttgctcttcagcctccgtcgcagcaatgccagtgaccgctgccattcgggtgtacacacagggaagtctcaaacaaaaaggcggcttcatcactggctgatgtgtttatcaggcgaatgtctcttctttgcacttgcgttccatccatatgggcgagaacgcctccgaaaacatatctggaaaaaacactcgagttttttctagctttctagcttgtttatggattgtgtacctatcgtcatgtcactatgcccagcagtgagccctatttgtgtcatctctgtagacgcacgtcgaacgtagatgcatatatcgtacataatatgtttcctatacatctgctttttacattcatatgatgcacgtgtatctccctattcactgggggtgtgactgaactacccagcagttactttttcgtcacaaagtattcgctccttgccagtcgtccgtatatatttctgataacgaaagttgcaccggacaactcactgaattaactcgtcgctgtgcacatgcgtgaatatcgtggcttttttcgctgggatgtctataccgagactgaaggcctgcattggatctcggccgcggcgcatgcatcgctgcatgcgggaaaactcgacgggcgcggccgtatcgagtctcctgcgaacgtctttcgcgtgcaaaggcgttcacgttgcattctctgaacaagccacgaatccggccctttatggtgtttttcgttttcttcatttaccagtctcctttcctgccttctgagtgtctgcctgcgcccccgttttacgcacgccctcaacttccctcagtctccgcatgttctcgccccgatcctctgttcagacgctctgctcttttcttttgcttctctgaggaataaagttaactgctctccccttattatcctccggtgtgtccagaaggctctggaaatacgagggactcacagcgaggagaaacaggcccgcgcttgactcaagctcggcgagggctttgccaacacatgcgaaattggatccgtaaacaaagcgttccagggtataaggcagtagtccagatcgtatcacatccccccccgcgagcagacgtcttcttggcaatcagctactcttcgttctccgccgtttttctgtgctgcgggagacgaattgttcgaacatca

SEQ ID NO: 1454 - DNA, 1521 bp, Toxoplasma gondii
  source 1..1521: mol_type = genomic DNA
gtccctgagttggagaacttccggcactaccctgggcctctgtttttagcggcacctgctcatccgcttcggtggccccctcagctccagtggatgcctcattttcagtgcctggctcagctcctgggatcatatcagctcctgtgcctgctacatcttcagtggccgcgtcagttccaatgctcatatcagctcctgtgcctgctacatcttcagtggccgcgtcagttccagtgctcatatcagctcctgtgcctgctacatcttcagtggcctcctcaacttcaggggctccctcatttccagtggccacctcagctcctatattcgcttcagtgtccggggcagcctgtgctctgatggtcgatacactcagaggggcaacatcgctttttgttgcaagaggggggttaaacacatctacctctttaggctcgcctgggctcttctcgaggccatctgtcgtcgcctcttgccgtgagtcgtccgccacagtggcgccagcaagggtgcccgggagatcagttggcgacgtggcatcggcagctggaatagtctcagatgcagctgcgctatcctgtgaagcctccgctgatggttgggctcctgattcagccccaattcgctgtccagtttcaccactagaggcagtctctggaccactgttaagtggatctacaggtatgtctgttacttccgaatcacccatggtgtcagagccagaatcttcacccgactctgaggcgtccgtcccctgtgcggtaggagtgttagggtcggccgtcgaagactgactttgatcctctgatttctctgcttcgtctttcgtgtccgcctcccctttagcctgggctgacgattcttgttcctcaccaccacggtctccaggggacgacacatctaccagtgagcttgatcgccaaacttctccttggtctgacccagtcggaacacctccgtcagattcttcttccctagagccgctgaagccgtcctcagtttttgaactcacaggtcgtacaggcagcgccgcgggcggtagcgaagatgtctccagtacagggtcacctctgtacacctgttgagttgcgtccaaaaataagtcatcgtccccggcgtcactggtatcgatcctttgtggtgcatgcgcttcaagggtgagggaggagtcccagcgtgatgacggctggacggcgcggcggtcctgcagaggcaacaggctgtcccattgcggcgattcgcgaaatcgaagatggagtccgctaacagagaagcgcttttcagatacacacagcaagcttaaaaagaacatggaaggaagaggccacctgggtcgtcccatctttccgcggaaatttatgtatctctcgcgggtgatcgaatcgactgaggctgccagcgagccgcagcagagaaagaaaacatgtatgaactggcaaagtgtgcctttcgaatgagctcgtcattcaccaacaaaaacgagtcgaaaaagagacgaacaagaacaacttcttctgcgca

SEQ ID NO: 1455 - DNA, 2457 bp, Toxoplasma gondii
  source 1..2457: mol_type = genomic DNA
tcgggtatctgtctctttgtgtacaactcctcgttctttctcatcactgtctcttttccactcttcgctctgtatctactttcttcaccttggtaaatgtaggtgctttgaggcttggacgaccatgggtctttttgaattccaaatagtgccatcgcttgggccggcgcagtctgcttcatcgtcgcgtcggtgtgttctgcatgtatttgctactttcgctcgaactcttttttcccgtgtaccatcctgcctctttgctgtcccgttctgcttccacatgctcttcttgcttgaaggaagcagtgcctcccctcccagagtgacaagtctaggtcgaagatgcgccgccggataccagcttgtagttacagccataatgaatcgttcgtacccacttggcatctcagttcaagttagcgaggccgatgactgtagcttcaaccggtaacatcagtgcttccttaacgttagaaagtgacggtgcatcgctggaccggaaaccgttacgcgtagcgggacacttgtacgaaagaagaggcaccctacaggtgaagtaagctacaatcaggaacaagtgggagtgacatactgagctggaatccctgtttctccaccgtttcgcgttctgcggctctttcccgcggctgtcagatcgcgtcaatgcagacggttccgattcgacaaaggatttgtgaatatacacgggaaaatacgtccatacaagacggttcgttagtaccctttgggggttttctatgcgtgacctaagggactgtttcagcatcctctatctcaatctctcagtcgtgaacaagaacgggaaagtgttctttgtcgctttgcgtaccacttgacaggggacccctgttacgagagactcccgcttcgatcctgatcatcgatcccacggcacaatactggtggcgttcggatttcagtgaagctcagaggaaggcgacacgtgcttgttcaccaagtaaccagactcgaagagtctgaagaaccgcccctcgtcaggttgtttaactccgcggccgcggactgtgattatctcgaaatgtagggggatggacagagacatatgcgttgtaacttcttgctcgtccaatttatctaaagaatgtcctaaagaatacatctctttgtggactggaccattttactaaataatacacgtatgatcttcggcaaatgcgaaacaccggcagtggtgcgtgggattgacttgagacacaacctccgtcgagcgcacataaaaaacaggacagacccgcagacgccgtgcttgggaatctttttttgaatgctgctcgccgtccagagcccctgcagaaaacgcgaaaccgaacggaacctagttcgcgtgtctgaaaagcaggtgctcatcctgggtctttggctgtcgtcaaaactgtaaaacgcctctccctaactcgtcgtcggcctgaagtcggccttgtggatcggcttatagtaggagaattcctggggcgcggcgcaggaggcgtggtggcgtgcagcgcacaccgcggaagcttggggagaggccggtgacgaaaaagtaaggaaacgcaactgaacggttacgagcgctaacaggtaagcttgaggaaagtccgcgttccgtgtggtcgagaaaaaagcgagaaaatacctcgtggcagcaaacacccacccggggactcttactgcgtccaggcttgttgttgcttgcaagtcgcgggacaggggtgacacacaaagacatgtgtctgctctgttttcgcttcgtcgcctcaggcatccgtgtcattttcctctttcttcatgctctcgagtttcctgttttcctctgtttctgtctgaccgcagctgttcttgactcttgccactcgccttctctaggggtttgtgcctcgcgagtttttctcctaagtcgcgcgcctgtgtgtgtccgtttccttcacttcgggtggctcgacgccatcggtcccttttctctccgtatttctcggtcccgtttgcggcgcttcccgctggtgtccctctccagccttgtccgtcttccgcttccaaacttatagagaactcctacgggcttctctatcagatcgttgtttctcaaaatcgagcgccctcttcctgcttctcaggcatgtcttgctctctcgccgtccaactggttttcttcggcttttctcgtcgtagttctgtcccaggtctgtctcctctcaggtgtctccgcaacagcatgcactgctttccctcgcgttttctgcgtttcaacagctcctgtgtttcctgccgctctcggtcccttgctctgcctctctgagcgccaactttctctcttttttcggaaagcgtctcgcttcttgctgccttcacgccgtcttcctctcgccgtctcgacctctcgaccctctttctctcctcttttcaacccacggttgagaaaacgcagagcagacacca

SEQ ID NO: 1456 - DNA, 3520 bp, Toxoplasma gondii
  source 1..3520: mol_type = genomic DNA
accggtgtatgaccaactagctgtacgctcttcgtcgacaccatcgcgcccgcagaaggacaaggcactggataagaatgaagggacagtggaagaaggatcacttcaagtgtcacctcggggcatctgcgaatgcgctgcgcatgaaaaaggcaagcgttccggcgagcaatcgccataccgacctgctccgtctgccgtaactacaactgtcctggtggaagtcggcgctgtgttggcacaagcacacgccgcagtacgagatgccgatgccgcagccgattctcttcttgaagactcgtcggccggttcggcatgcattccctgcgaccgtcttgaagagtccggtgcatcacatgatacaaaaaagaagcaatctattcatctgacgtttaccggatgtggagattcccacaagccggcctccaaatcggacagtacgaagaagagtaacattcgttgtcaacctcctcacgcgatgcagcttcacaacgcggaagattccctttggcggccactgccttgctccaaggaaccctcccgtacaactgctgacgcagcctcttatgatggtgcgtgcatcccccaggggtctctgtcgaagcctgagctcgacacagcagtcgcatgttgctgtgccgctgtctcctctgtagtaatgaagccgcccctgaccaaggcttcttcgtcgctttactaccagaaacagaattcgtctttttcgcttccggaaacccgcagtatccctcagtctgacagtcagcttttagggccgtcgggacagtcccctgcagaggcttcccctatggagggcaagcccttccgccgttatctgccgccgggaagctcgtctactccgttcccggattcctccacacctggagttgccgatgattcttgcaccctcgactccagctgggaaaatgcctccatcaccgcagcagggaagattgccgaatgcaagatgtccagttcaggacagtttcaaactgagggcggtggacttcgctcagactcgaggagttcagcagcatctttcctgtcgattttggaagatgagcttttctgcgccagagctcttgcgcaactccgtcacaacacgtctctgtcgccgcacgagttcatgaatgaacgtacccaaccagtggcccttgagttactaagaactggcttctctgcgccaaagaggcctttcgataattcgccttgttcgtcggcctatgcaacgcgtaaacctgtccattctggaaaaagttgtgttcacaagatgccaaagacggaagaaaaggcaacgccgggaagagaggggaaagtgcttcaaagacatgagattggcgaaactccagaaaaggcacagtctgcctccatgaccacacctttctctcagccatgtggacgagcccacaacttcgccaattcgttcgattcaattttgtgccctccttgcgccgctcagacacaacaagaatcatttgcaggacgttcggagtcccttgagtctttgtctcagctccctatctcctgccagatacatgtagccgctgaatcgaaaccaagtcacctacagcagtcggcaacacttttctcgctttcccctccttgtgacaaactgagctccctcccaacactgtgcgcgccttgcactgaccacagatgctgtccgaatgcctcaaagaattgctctgctagtgtcagcaaatccccaacgcatgagacccatcgagagttgagaccagctgcaggtagacttccgatatctccaacaggcaagcatacctcaccgcgagctcctgtggcacctcacattcagatcacagtgccgagggagccttcccctcaaacagcatcggttgatcagccagtgcctgaccagcagaaaactgaactcagggcaacggtagaaataacgaggaaggctcttctctcagctgcgcgacagagcgctgccttgtgttgcattccttcatctgtttcgcatgactctgaaacgccttcaatagagggatcttctcgagaggatgcagaatcagcatccctgttggaacagaatatattaacggacactaccattgcgaggaagctgtgtgtactagacatcatgtcaaacgcacagcctgcggtctgtcaatataatgacaggccagtgcaacgtgacacgaacgggccagccagcagacctcccgtgcctgccgtcaccgtttgcgcgtttgaagagcaatgtacaaccggaaaacgggatctcgccacaggtgtcacgacgattgccacacttccgacacacagccggacagcggaaagcgaagccgagagacggacgtcggcgacgcaagcacagccgatggtgtaccatccgtgggtgaacaacactgccttgttgtgctctcttaaagtcttcggctgtgaaacaggctcgcgaaaccactcatcagagacctttggagagcctcaccttggggagcgtctggaagacatcccgccgcggtccagaggtcaaaatatccatgcaatgttgtgtagtgagggggcccgacggagcgtgtaccgtcccaaaatgtcatccgggcacctcatgctaaggctcaagcctgggtcgttcgacgcgagtacctgctcagctgcatccgcggaagcactttccgctcgatcaaacgccggggaaaagcacctcgtctatccggtcgcaggacgccgttctggccagcgaaagcccgaaaccagcctgagtagcaaacaagcgatgatcaatttctacagtccgcgttttctggaccgtatagtgtcgcggaaccctgccacaggtttggtgtccggcagccccaaaagatcacagctgccagagctcagggaatcgacaagaaaacctacgcactcttatatgtttgtagttcgaatgcaagcaagggcagaagaaaggaggcagcgactggcacagctaaagctcaggtaggacgaagactctagagaaggggttgtacaacgacgtagattaaggggaggggaagatggggtgaactaaacaaagttcgcgtatggcttgaaatccgtatccactcaatcggtcttacgggggactctgcagtttatgcgaggctgcgaatattaccgcgtggctccgcagcaacaggaaagacaggattgcacccgcaacctaacgcagactacattttgcctccattgcacgttgcgcgaaagagacacgaccgctccaggtgctgctgcccgagttcccgcaatactagctctgctgctgaactaggcttgagtgtgaccattctctgtaggaaggcggaggcgctcgctcggcacaaagagctggaaaagttagtacgcacatacgttttatgagtgcatctcggctgagcggagagaaattgatccatcgccgtcgagacggatttcaggtgattgtatgtcggttcagaacatcttatttacggtataggggaccaccgccagtgaaatgagcctaccctcaaaattcgttgtgatgcagcagatgcgtccactggttgcgtcatga

SEQ ID NO: 1457 - DNA, 2088 bp, Toxoplasma gondii
  source 1..2088: mol_type = genomic DNA
aagcgaacgtccattccgtcttcgctctcgaagttttcgcagatgcacaggtccgccgccgcggacaagtttgggctcagccgagacgccgaggaagcagacgaagaggaagacgaagaggaagaagacgaagaggaagaagaagacgtagaaagagaagaagcgaaagaagagaaggaagaagtggaaggcaactgcacagatgctgcagccgacatcggagatgaatcaggtagattgagtgacggcgacgagagttgagaggttcctcccgttgccagatatgcattggcattctccccgattctcttcttcttcacgaatggcccttcgtcttcgtctcttccttcgagtctccgttcctccctccctgctgctcctccaggctgtacctcgacagtcctttcagcttctctgtgaacctctggccgttcccctgcggagagggcgccaagtgaggacgacggcatgctgtttgaaagcgaaactgaaagagtcggaggcgaagacggagaagaacaccagagcagaaagagaaggcagcaggtcctgcagccggcgcttctgcatgcggaacggaggtcctggatgcgagacactaaacagcgaaaaaacgcatgcgagcgcgagagggacagggtggaatgtagacgtttgggtggagagagataggcgaacgaggagagagagggaaatgcagagattgataagtagaacgagatagagagggacggaggaaaagagaggtatacagagaaaaactcagaggaagagagagacagatggaaaggagcagaagcgagcagagagaggggagtaaacagaggtccgtggaaaagagaggaatacgaactgatatgcagagaaagagcaaaacccaaggatggaaagagacgaactgagttgagacgtgagagaagaaggtcgagattcactgcgcgtaaaagccgcagaaggttgaggcatggcacatcagtaaaaggaggcagcaaagaggagaagaagaaagacgagtcgacgtagccagcgagagatgaaagaagagcaaggagaaccttcaagacagaaaagagcgacaaacgaggcctttactatgcgtgtcttccaggtccgaaaagataaaggagcatgcagacgcgtcgcgagccagtggctccgtcagaagcgacgaaagaaaaaactgcgtctctcgtcctgagagaagttttcttgtttctcgctggtgttcttcctctctcctgtcgccacagtgtggttgatcggctggtgcatgcaatcgggccatggtcgccagagccccgtccgtgcatgccttttttgttcggcttctcctctccttcttctccttcttctccttcttctgtctctctccctccagaaccgtgggcggagtttctcgtcttttgtgttttctgaaatctgcggctaggggatgtttcttctcctgcggggatccttctctcttcctccccgattgaaagcgcagtgggagaaaagaacgctgccgcaaaaaggcctacactgtggaaagagcttgaccgcctcacaggcaagagtcgcctgaaacgtttctgttttctcccgagccgctgagttgcctgatcgaaatctccgcaggcctctgtctgttctctgtgactgtcggggggccgtagccgtttgtcatgtctcctttgtctccgtgtctccggtctccccaagccgtccctcgaccagtcgtcgatttcttcttcagtttcctcgtgctctctcgtgacgggagccgttcgttcatgtttcttcctctgggtttcgagtctccctcgaagttcagcgccgccaacgaaagtggaggtccgtctctgccgactcgcgttcagaagagagagaagagaaactccgagaaaaaatagcgcagccggtcctcctctctctgcgtgcctcttctctgtcccttcctcatctccgacggcttcttttctctcttcctttcctctctttgccctctctcatcttctccctcgcttctgtttcctttctcgtacaccttccctactgaggcgttcctctgtcggtgtatctccttctgttccgcgcgtcttcctgcca

SEQ ID NO: 1458 - DNA, 2179 bp, Toxoplasma gondii
  source 1..2179: mol_type = genomic DNA
gtggtgtttggcgtcgctttagcagtgtgatgtttaggagctttccggggaaaggactcgcgtttacaaagtccactccaaaatggtcgtttgttggtaagcgacagtcgcttactgcagatgcggtttcgtcatgatcgggaaaacgtcattaagagaactggtgcttccactcgcgtagaatgatgtgctgagagttgaagaagatacttccgcgattcatgtctcttcaaggaggaaccattctcattgaggccctggcagaaacgagagaagtgatcctgcgtatgggttgtcctgtttttcttggcgcgacagagaaacgcgccgtgtcagcacgagcagtgtccgcctctctaggtcggacaggaattcacagacgcgacacagcggattttcaggaaggcagtgactgtgatcgacagaaaactccagaaaagttctacgagggttgacaaaggactgaagagcacgagcggctgctgtcacttgccgttactggcaatttttactgtcagcatgggactttggtggaacgtacacttaatcaaatgactccaagaagttactgtacgcgttcgtgcgttcacagtcgtttgtttatcgctcaggaggatcagcgatgaaccacagagactggaccctgtggatatttggaaactcaacgtctattcacaagctgtacaacagtcttgccgtacactttgtcagtatctccttcccatgttcgtccgcacacactccttcggtcgcgctttgtgtatcaccgccagtggagtcggtagtgtgctacttactttttctcctcactttcccgcgcacttcatcgcgcattctgatattttctccacttttcgaggtcacgcgaatgcagcacatgttctataagctgccgcaatggagtcccctttttgttacagtttgcttcttcgcggagtcttttgctggaacgctctgaattctgaggcagctgactcgccctttcaaggattcgctctccggtgtcgtatccttacttctgtccagttccttggtgcatctgcctttgtgggaatgtgcagaggccgcgtctaccgcttgtctggccacagtgttctctgagacggctgtgatctcggttgccgccgttatgggattcggccaagacacattgccatgtggatcattgctcatgtctcgcggagccactgcaagatttaaacagcgtactttgacgtacaacacaaacagcgaaactgtgggattcgaacatccggcgcgagatcaggttttttggctctgaggagaaaagttcggttgctcttgttattctcaatctcttcaccgctcgacactcgtctgccgaagagaaacgcaacgtcaagaatcacatcgattgctgagaaaacttgactctctcagggtctcatttctcttttttccgggccgtccgttccgtgccgactgaagttgaagacgcggcaactcgggaaaaaggctgcatgcacggagaaagctgccgttttctctccgtgacgtccgtttctctttattctttctaaatcgatgaagaggcttcttttctcgacgcgtctcccgcgtgcgatctgcgattctcattcgtttgttctctggaaaaccgtccgccgactctctctcgcgtgttccagttcccttttcgaaggcaggaaaagttaccgagcctccctgttttctttgcctctttctttttgcgtatcactcccactgggcccgcttcttttcgactgaaaaacgctcgtcgccgtcggactttgttttttcgcggtcttccggccgtacgttcgcatgcagtctgcttttttttccttcgcgtcgactgtcccggttcgatcgtttcctttcttttcctcaacactccgaatgtttgttcttcaccgcttttccgccctttcctccgattcttctcggttcctccactcctctggacgggatgcgctacctctggcatccatgtctctccagattcgctaacagacctgttttcgccttctcccagggtgggtcgacctgccccgcttcccgccgctcttctctttctctccgtccaagtcgcgtcattctcgcgcctcctccttgcttcgtctctctgctgcgcctgcgtctgagtctcgtctttctgagtctgccgttggtggattttttctcgcgtcgccaaaaa

SEQ ID NO: 1459 - DNA, 3594 bp, Toxoplasma gondii
  source 1..3594: mol_type = genomic DNA
tcctttcttagtccgagcatgaaccaccgaatttggtgttggacaccgggaaaatcgttttttgcgataatctcgccatggagctcaactgcgggggatttgatgcatcgcggtactccagctggcttgcaggtcgattaatgaatatctggcgattacaccatccggacacgctgccgttttgagagtactccacgtctacaaagccacacgattcctgaagtttgtgttagctatacacccgttgcaacctacagactttttgcgctggggttttgtgcgttcagccatgaagcccagcatatcatcaaagttcgctacagcagagaattgcttcgatggatctctccgtacataatatcggctgggtgcagttacagtagagttcattagcgcatacaaagcattttctgaaaacgttcaagatccaccgtaagaagtgcttttcagctcggaaaggcgaactgcatgaacgttatgaggtgaaatagcctccgagaatgttccgcgaataacctggattgtatggcaagcctgaatttggcatgggtggacaaaggcaaactccgtatgcgtgttcaatacccgcaacacttgaaaaaacagaagtgacggatcaatgccggtgaaagaaggcggcgccgcataaatgaccgtctccgcgaacatgctacaactcacaagggcaggtgacggtatatcctctgtacgtggcatttctatcacacagtcacaaactcgacgggaatctggtgtttctggttttactgactcatacgtgacaatacaagactcctgaacgtttgctgttcggtacaattactgtcaccgtttttcgcggcactatcttttcaactgaaaagacacctgctagaaaaatgtgtccgatgccgtgtgatactgtggcactgtgttctgtagatgaagcctgctctgtagaggagcaactctgcctgaagcttacagtcgattttcgttttgactggcacatgcccgtgctccacgattacgggactctcgtggggttttccgcactttcgggtgaacgcccctctcctgggtgtccctactgggctaacatccctcagacgggcagtgccctggacgagatcataggatccctgtgtccctgaaagaaaagtcagagcaacaattgagctggatgagcgcgactgtttcttggagaaaatgcttgggagatccgtcgagcacgacagcctctgacttaatttgccgcgttcagtcacagagtgcactgtggtcgttatgcgtcagcagctctattctttgtgtgtgcatcgaagggtcgcacaggatcttgaaatattccaccgcattgggaggctcccacgcttcatgaggttcgttagcagtgtgctcgaactgtcgcgttttacggatcacacggattcctaaggaaaaggttgcaaggcagtttgcatgaaactagacttcatcccgtacttccgacgcactgttgaactgtgtagcgacgaatcgctctgccgcctgtttgtcaatcgatttggcctcgcaggaactgatcagtgccttcatgtgaatcgccttggcttccgatttccattgctgcagtgaccgaggcaaggagcagtagcgttggtaaacgcttgactgaagcaagtgaaagcagtgcgcttttaggagacagtcagtgtcttggatttgtggccggtacaagactgtggacagcgcagcgaatggtcacctgccagcgtgggtacgcacggggtagcttgtgttctaacctggcagtccgttctgcttgcgaaggttgtccgaggtcctggaaccggaggttcaactgtcgaatatcgcagtgcaacagcaaacagttgggcaaattgtgtcaagcatttcctctcgcgaaccaagcagttgtggataagtttgtgacacgcgacagacgtgtgcacttcgactgtgacacttccctttctcccagaaaacaggactcgaagagtggatgatcatacacgttcttccgtacatttgtgagcggactcatcacacaggcccaagactttgcccactctttttgttcgggactgagcgtttagttgttgacgacttcgatttcgatgtcagattacgcattcatagaaagccctccgtacttgagagcaggaaatgacataaaacacaccgggatgcaaacagtccgtggacgcaagaaagcctttcctggaaaacgagcgccatccgacgccgcaaacacacagttcgacttcaacagatgagcaacacgtcgaccagtagaagcgtatgtaagagcccccgcgcatcaaacccacaaacactgctgaggtcgaacaatgagcagaagcctacccacaatttacagccatctgtgtaaaactaccgcccggcttcgaacagtggaatcattccacaatcaatatccgctgcagttcctgcacgtgccagagacactctacgacctgagtctcaatatgttatgagccaacgtttccgcgtatttaacatactttggcaccacggttcgtttgcagtcaaaagcatgttttgaggacgaagttcatcacactgtagttatgtagttatagcctcgatgtgagcatcgtcccaactgatgctcgtagaactcatggcaagattttgggggcttgaggcaataattactcactttcttcaaaccgtcatggccactgaactgacctggcttccaagaaacaggtggcttcgagcctctggtgtacatgacatccttgtaaagacgttcccgcgccgtggttgccattgcaaaacactgttacagagccagagaaatacaccaacggagttagctaatgaattcgcatgaacctacgttcgaaagttcgatcatggctatggatgcaagggacagaagggtccagcgaacaaatagggaggcttcactgagctcggtaagtgactcagagagtccagaaaaaaaactggccccgtgtggggctgctgctgagatgagacattgagaacgaagttctccgatgcggcagttccactgtaggcctctgttacgtctaacgagttctggcgtttgaaaattccaatcgaacacggcagtatggaagacactggagcggtagcataactgccgtattgttttttctgggtggctgcagcctctctacctcacactagatactcagttgcacgacggtcgcattgttttactttcgtaggtttgatttactggatacatactctgaaaacagcattcggtcatgcggctacgtcaattatctgccacatcgttcgaggtggtgtgatagaacagttgaccaggctccatcccggaactcttcgagtttaaaggcgtctgtggacagcagggcaaatggtggtaaagcgtgcagtgccagagattcggttctgctcggttattcgtctatgacgtacttcacccatttagcctaaatgcgtgcactccttccctctggtcttctgccttgggccgtaaaagcttgtggaccattcacttctggggggaacccgcgacgaggcttctgtatcacacgcgaatatagcagggcagccgagtatggggttgtttcagaaacgacggaagca

SEQ ID NO: 1460 - DNA, 4380 bp, Toxoplasma gondii
  source 1..4380: mol_type = genomic DNA
tcttttcttctcgcctctttcctctttcctcctctcatttcgcgcgccgtccgacccctccattctgttgaagccggtcgcctctgtgtctcggactcccagcgcggtggcactggcggccatgcgaggagctgagacgcgttttcttttgacactcgaagttaccgcgtttcagtggatgagcaccatacaatggaaacctcgggaactcgaaagattcctacgaaaggatgaactgcataggctgcatcggggcccaagattagatgttcactgcgactgacggaagtcaagcatgagtccgtctaccacgtctagaccgtgatcgaccggaagtaaatgaacttcgccaacttcttctcgacgtaccccgacggcggagccaatcatgacgaggagggggatgaggtggaggcccatgagggggagacgcagctgagtgacgcctgcgtcgctgagactcgcgtcgacatggaagcaaaaaaagggaatgatcgcgatggcgtagtccgggacgctcggcggcggaaagagaacgcgcgccgcgacgacgagaggaaagcagaccgctgagaggaagaggatgaagaagaacagagaagtcccgttcgggcgacacgcgtggagtttccatgcgaggcatgcaaggttgaggcggcatcgcggccgctctgcgtcgtctgcgcgcgcctccaactccgcagccaccaggttctgaaaggaggtcgagcgtccgacccactccctgtcttccctcctcggagagccgcggccgtcctctctcccacggtctgggctgcttctttcggaagcgtctccctcgcctgccgtcccccgctcgataaaggatgcttctcctcgagtcgagtcttcgaagtccccttctcccccctcccctgcctgcgcgcggcttgttccgccgagccagccgcgcccaggtgtatgtacaccccagctcgggagccgcgggaagacgcggggcccttctggacttcgggggacacgccgcgcctccggtgtatgtacaccaggtcccgcgccgcccgcgtctctgtttcgcacgggcagaggcgtcgcgggcgccgcatcagggaaagcctcaattgaggacagagaagggagaagagcagacggcgggggctgcgggtctgcgaggaagtctggagacgcttccgcgatggccacagaagaggcagaagcggtggacaagctggaagcgacaaaggagtgccgcggagaagccactagactcgacagacggaaatgcggaggcaccggaaggccgggagaaagtgaaagtgaactcctcgactccccagctcctcgcgaagacacgagagaagaagaggcctccggccgcgtcgctgagggttcgagaagagacgccgagaacaggaaggagaagagcgaagagagccgcgggcgtcccgagttctccgcgtcgggctccgctgctcgactgtctcgacactcgaagggcaagtccgcgggcggagcctctgcctcactcgctgcgtctctcacggcaacgctgtcgccttctcgcgactgctcaccttccacgacgaccatcgtgcactcacgagaagccgaagaaacacccgcgtcagctatcgaggaagaatcgtcctcatacctctcttcgaagacaagacaggctgcagcatcctggacagtttccccccgttccggcttggccgaggaacaaatttccctcgaagacagagtcgaaccacaggaagaacacaacacaggagacacaagaggggtccttagaatacccactgaagaagaggaagaagaggaagatgaagaagatgaagaggagggagaagacggagtggaggaagaaggggaagaagatgagaaggaagcggaagaaggggaaggactcccttcgtcctcttcttcggtgtcgttcattccgacctctccgagagggtcggcgagcagcggggcctgctggcaccggcaggttggcgggaggagcccccagtgcggtggaattctggtctcctccatctctgctgaagttttccgggtttctctcgaaaaaaagcaccacccgacgcaagcggttccacgagagaaaaacagacagcagagaaacgccgcgcctctgtcggccacaggcgtctcggcggaggtcggaacggagagaggaggaaaaaagaaaatgtagtccgtgctatccgcgacgcacacccaggcaggcagaaggaagggaactcacttcaggagagcgcatcggagccgtgaggacggcacaaataacttcgcaagtcgagacacagcggacatgcatgaacggaccaaaaccatcacaagacggatgcaaccacgagtatccgtctctctgtcgctctctctctgatccgtttcttcctttgtctggcgagagatacactaccgggaaaggtgacggggaagcagcgaccggagagacgacggttcctggtctctcaggctgctctcccgccgttttcgctgcgaaaaaagagaagacacacagcagaggcaggagctcacgatggccgcctctctgtacgtagcgatacggagaaacgcacgaaactttttctgaagagagcttccatggaggcggcgcagtacattcggaagacgcgattttctgtgatacagcgtctctgggagccttctctgagtgtcactcttacacgaagtggacgccgctgtccatctgtctgtctccataaacattcatcccctcgaattcacctccacatatccccactctcctctagcgatcaacctgttgatctctctccttgcctcggtctctgtcttcctgtcttgatctcattgtctgcctctttttctgtatccatccctacgtctgtctctttctcttactctcctcgctgtctacctctcggtctctctctccgtctacatctccctctctgcgtctccccctgtctccctgtcgctgcctatcggtccttctctccccccctctgcatctgttgctatgtctctgtcactttctccccatctctcgcacctcttacggttcaccctccgctgccgactgcttgctctgcttctccctgtctctgtctcctctgccagccagcgttggagggcgctgccgcgtctccgactgcgtttcagccgtgctctgcggcctgcccgcgaggggtcagacccatccggcgcgtgcattctgcatttttttctggattctctctctcgaaagccaggccgccttctcgaagtccggaggactctgcacggctctccaggtggcgtcgccttcgccgtctggtcgcgagcgtcgcgagccagcaacccaacgtgtggctctctgctagacacccgcgagactccgctgagaaatgtaaaaaaaacggaaacgcgagaaatccgccgcgctcgccgcgcatgcagaaacctggccgggtgtcggtacaacactggagcgcgaccctcccccagagctggtgccgcctttaagggaaccgcgaccgggacctgcggagacgccgaaagaagccttttcgccggcgcaggttggctcatacacgagtcgctctttggaccgagaaacttgaggcgagaaatcacataagtccccgaacggcctggtgtctgcagaatcccgtctctctgcgtcggattcctgcggactcgcaatgccgcgcggcgccgcagctgcgctagcgcgcccgccgcgagagagacggtcctggctggcaccgcgcggtcggctggggaagagactcgtcgcgtgccgttcgagagcggcgcgaagacacccgaaaaagagcagaacagaaagacaaccgcgagagacaaagcaggaagaaagaagcaaacagagatgacagagagaagagaaagccggggagaagggagagggcgggagaagaaaacggggagaaaggaagaagagcgggagacggagagaagaagcaaagggagacacgagagagatgttgagttggggagggagggcatgcgcgcccgcgcagagttccgcgagcctttccaaatcgcgaaggcgtcgcacacatgcagactgaagaaacagacggaaaaggccccgccgagtgtctagacaccagcagcagagaagacaaagaagagcgagaagaaagagagaagaaagagagaagaaagagagaagaaagagagaagaggaaagacgacgaaaggtcctcgccaagcgcccttcgcgcgtcggcgtcgttccgttttgcatgtgcctgcacagcaccgcgttgtgggcctcaaaactgtcggaataaactcaaagaaagtggaagggatgtcttagcgtttcgggctcctcgccccagacgcagaagtctcttccttctctcgaaactccacgcctatagtcctcctgaaagaaaa

SEQ ID NO: 1461 - DNA, 3414 bp, Toxoplasma gondii
  source 1..3414: mol_type = genomic DNA
ccaagaacagccgcgagtgggacattgttgtcacgttcaacgagttgtaagtggaggtaaatgtacacgtaggtgatccaggcaaagaggaaaagccccgtgactatgacaaggggaatcagcgacagccccctgacggcgcggctcgtcgcgtacatcgttttcaccgcaagcagacagacacgctctgcaaaagtgaggtggcaggctcaagctgcagttggtgcccagagaaaccctctggcatggtgcaaaaggcggacgcccgagaggaacgccgcacacagactccccgaaacagagacaagaaaaagaatcaatacggaggaagacgttacagtggggccgacagtacacacgatatgggaggtcgtgaaaaaggatctaaaggggaagcactttacccgcagtgcggcaagaactgaaacagccgcgcgagtcgtgggcacagcacacaccgggaaatgcagaccttcgtattacgttgatcatgaaacgtgcgtcgcaggactctgatccggtaacgaaaggccttcaaagtccgggccagtagtctaagtcgcagaagacactgtctagaacaacgtcataaatgctcctttgattcacgaccaacaaccgaacctccgtttaagcgtccagaaaatccatcgacagtgatatcgcaaaaaaactccagtgacggtttcacctgattcccgttggctcttcgaccgcagagtgctgaacgagccacacgccgacacgcgcggccaagggaaacgactgttagcagaagccttcccggatccaactgttgacgcttactagaaaggtcttttggcaatatggaaacgctgtctatatttctgtggactcttgagcgtctctcgtctgttcacaaaacagggggactcaaaccgcatagccggggggttcgctggaccgccaacagaaggcgaaaatcgttgttcagaaggaaacgagagagcgaaaacgagcgagaaaagcaacgcagatctaaaggtaacaacaaactcctccacacaaattacaaaaactccgtcgcggaagggttttggacttcgacgcgagatgacgagggagctgaacactctcacgagacgtggtgctggtaatggtgcgtcgagaccggagaagcaagcctaattacactggaatgtgtgtgagttcttattcagtggggtacttgggaacgatggacgctggcatcagcaactgataaacctgacacgaactatatttcatgttcccattaacagggtcgcgcgtcgactcagcggcgtgtggttcctaacttcatcacagggaaacggagacctgagacaaaaaacgccgccggaagcgcaccagaaaacccgcagaactggaaacttttcggaagtaccaaaacttgtgatagagacgagtcttgttgagcgaacgctcgatactagcgcctagcgaaaagagaccccaatggcagggccgagtcaagcattccttccattcagcgctttctgtgaaacagtctccagtaaggtcttgaaaatcggttaaaaggacataaatatctgcccctcgtttgcaatttcattctcattcagcaatttagcagatcgccggcatctcggccggccatgtgcctcgcagcttgcacggttcccatggctcagcaagctgacacatctgcgctatgtctctcgtgatttttccccatctgcatttccggtcaattctcaacccttcaaataagtaagtagatggcttccctggaaacactgcaagggcctgtcaacaaaagacaaaagggttcaagggttccgcagagagttccgcaggattcggcaaaagacacgggaaaaaccaagggtgcaaaagctcactatactgaggccggctaatagacgaaactacatggaaatgccaacgcttgcaccaggggaaagagtggcaagcccgtctcgaacatgtttttctcctgtttcgatcagcgatctgtttcaagctataaaaagcacacgtcgctctcagtccttgtgaagggagcgctcctgttcgttccagagaaacgctgcactgcagttcctgtaaacagtgtgtggcgatccgcgaaacggtactgcctgtacattttgaaaactagtgtatctggggttcttggggggaaatcagcctctcataccgttactagagaatctctatgtttaccgtcggtgacggaaatctccgtactagtgaacgtatctactcctgggtcatgccgctactgccacgaaagctggtaaaaccctagtacgaaagatagctatgtattcaaccacaccggtgccttttagagatctcggcttctctgtgcgatacgagagagcgtgccgatgtttcgtgagcgcagaagaacgggaacgtccgccgaagctgcggaaagcgatgcggacctaagtagaacactcagtggggggccggggtggcacgcgtgttggtggcgcgtttgttgcgcatttttgaaaatgctgaagggtgcccgtcaacgcggaggctttttcgtccctctatcgctcattactactctatcatgcattttttgtcacagctcgtgtcctcttcgcggctcctctatcccttgcagacacgtccttctgctctagtgttgacacttccacatgtctgatgcggacgtgagcgtgtcgaacgggggtatttgcgcagaccacactgcgctgtgctttgctcgcctaggtcaacgcgctactttcgcttaccggcccgagcggtggctgttactttcaaagtgtgatggtttttcgaaaggcgtcgcgtctgttgtctccgttccagtgtgttcacccagcgtttgggataggaacacgaacgtagttctccataccccagcctttccgagagccggtaagcgccgctgcggggagttttcctgagcgtatgtggttttgagcgttccacacatgtggtgcgagttttctccttgcgttttttcgacctttttcttccaatgagttggccgcagcctttcggatccgctaaaaccagccgacaattgcgcagaaggttctaccgtctggcggtgcagtgtgcaagcgtatgattataaacgactaccgtcgagttttctccgtccgacccgttcggcctgcgcgtcagaaaaacgtttccattccctaatcgtcaataggacatttcacaagtccaaacttctccgtgctgccggcttccagtccgttccccggagttagacaacacgagacatcgttcctcgtttctctgtgcgcaccggatttttcgcgggaaacgttaattattccaggtgtttttgcttgtccccgtttgttcatgtctcggcgctcccgcgttcttcattaagttgtccgtccgctccgtcggtaatccactctcggtattagtcacctctcgcagaca

SEQ ID NO: 1462 - DNA, 3662 bp, Toxoplasma gondii
  misc_difference 2427..2446: note = n is a, c, g, or t
  source 1..3662: mol_type = genomic DNA
tagagaagcaatttggaacgtggatgccctcgtcggcgcgacgcatcccgaagcattggagagataatcggagaagagaatgaaaaaccacgtggaatgcgacgtttggagcgttgagacaagagactgttctgaggtagacgcgtatccttatctgtttgttttcctgacagacccaggtcagacggagagagtgcgctgaccgacatatttccaatttttcgcggctgaattttcagaaaagttgacgtttacgacggaaaccacaaactcaggttgagaaggcattctgtggaactctcgtgcataaaacgattgcttcaacggccttccagaagccgtcctggccccgcgagctgtgaagaacgacaagatttccccggcatgttgctcaagggagtggcggcgacgtgtctctgctgtttttaaacaaatcggaggcgtcggttcgcgacgcggaaacctgtaagagacgtaactgtgccggatctccagaggattggaaggtaacgaagaaaagaagatgcaaacgtggatcctccgctccacggagtagttcaagatggagcgagcgacgaattttgacaaacgagacgggctcgtgaaaaaaaaaaaagggcaaaagccacctccgaaccggagggctgctgttctgttgtcgttttcctctcgcgcccacaaagagactttgacaaattcaccacgtgatcacgaagctcatcaactgtgggacacaaagagaacggaaacgaataggaaatgtccggcagatcgacacaccgtcggctttcagatgaagtccgtgccggcgaggtgacttctgcactagggtaacgacggagtcaagtttcaaagatcttgcggtgaaatgagcgattcatgaaacggaagactttttaaggagttctcctcaccgaagaaacccctaagagataaggaactgcgcgatgcagggaaagcagaaatatcaaaaacaactagcagcttggcaatttgctcaccgccggactctacacagttgagtcggcagcgacagtggcttgccgagaaaatcgggggagtttctccaatacactcgagggaatctcaggcaatctttccatgatattcagagggtttctgttcttccagtgtctccaaatggcgaaggaagttttcaaagtgctgcggcagatatgcgcatgcaacagagacgagggcctacgaccagcgcgggagctagcttgtcacgggaaaccgggttgttcctgaacatctttggcgagacaactggcacatggagaaaatgctgcgacgcgacagctccagccagcgattaaactgtagagatttcccgcggccgaaagcaaagtggactttagggtgtgacagttttctccgtgtagacaactgcccatcaacgcggcttgctacgggggcaaaagctaccggcaagacaatgccattgcgatggtgaagagcgacatgttcaggatctttacgatcggttcccgactgtcatgctgtcacgaatggttctgcattatcgggtcttgacgagtgattcaataatgtctggtctctatttttagcgcataagaatcacacgggctggacagttgaagtggccagcatgtagaagaagagcacttttgtgtgactcttaagtgctcccggagtaaccgcatccattcatggcatggctccaaaacaaatggtcgcttattcgttcccaacggttatgggaaagccttatgctgaaaaggaaaaggcgcattgtctgcagagtatattgtgcattcgggaattcacaagagttgatattcatcagtacacatgccccctgtatcgcaaccgcgcaactaaaccggtcgcatacatgtaaaatcaagggatagttctcgtagaaaaaagtggtaggtacctcacagccgcccatagagacagagtgaaaattcgtggaccgctgtccaccctgcttggacggcatgtagacaacaagactgtagatcgttccaagaacatcttccacagtgtacctttgcatttactcaaagctgaagtacagttttcaggcaagtaacgaaaaagctatgtacacgtgacatactgtgactaaagaatccctggacagcttcccttagggtagtcaattagtttcacagggtctgtggtagcggagatttccttctagctttcccctcgctttcgtatggcataaaagagaagccgtcaatccagtgacgaggggttccctgtgccgtcagcgtagatcagcaatcgcagacggcaacgcggtcatacatctcatcggctgtctgggagcgtcgtcccagttcgactgtatcaataatacgaaaaatgaacacaactcttttcggcgtgtgcgagcaaaaaaaatccccattttcggttctgctgttgaattgcaacctgctttccatgtgnnnnnnnnnnnnnnnnnnnngcccatagagacagagtgaaaattcgtggaccgctgtccaccctgcttggacggcatgtagacaacaagactgtagatcgttccaagaacatcttccacagtgtacctttgcatttactcaaagctgaagtacagttttcaggcaagtaacgaaaaagctatgtacacgtgacatactgtgactaaagaatccctggacagcttcccttagggtagtcaattagtttcacagggtctgtggtagcggagatttccttctagctttcccctcgctttcgtatggcataaaagagaagccgtcaatccagtgacgaggggttccctgtgccgtcagcgtagatcagcaatcgcagacggcaacgcggtcatacatctcatcggctgtctgggagcgtcgtcccagttcgactgtatcaataatacgaaaaatgaacacaactcttttcggcgtgtgcgagcaaaaaaaatccccattttcggttctgctgttgaattgcaacctgctttccattgttgttcttgtccgtcatgttctatgatccgagtatggtgtaaatttcgtgatttcggaagctctttctctgccataaattctacactcctctgcaagtatcaaagacacgcggcgcatgtactgaagagaacatgtcggtgatatatgcccagttcctcgggttcatcacactccaattctccaactcattcctttgttatgcggtcggattaaacccttgtggactccctttaggtattcctcaagcgagtctggtggattttgtattctcatctacattctgctcttctttgggtgcggtcctttaccatgtttgttccagtttcagacgtttcttcattataaaaatgtttcctcccgaagttgcagctctatgaatttcttttcgcctgctggtgtcggcggatgaccgctgctgcagccttgcttctgctgttgcactcaagcaaggctctcgaagacgaacttcccctatgctttcctcttgtatcctaagcgtcttagaaagcgagtggcacctcggcagacgtgcgaaaagttagtgttttttaattactctctcggctgacgagaccggggatgtctcggcgaacgccggggttcgttaccaaatgtccattcaataacactgttcaacccgggacttatgttgcaacagcaaaggtggaattcgtgccgcatgaagggacgcccagctgaaaa

SEQ ID NO: 1463 - DNA, 1456 bp, Toxoplasma gondii
  source 1..1456: mol_type = genomic DNA
tttgaatatttttctgcttttgccgctaaacagtatgcgagtgtaagcgtgctacgaaaccactgacggaatagggatgcatatctgcgcttgcagcgatataggtactttggtgggtgtcgataaacgtgcgatatagggatgtttgtccgttagatcggcctgtgtgcggtaggagtttgctcccgcgcttttttttgtgtctgagcctctcgcaactcggcggcgaggtccgactccctgatttttcttcctttttcgcgggacgaccgtgtaaggaacctcttgcagggttctggggagaaaagcccggttccgtgagactttttgcaagcgctgcgagttttgtcttctttccctgcaagcgaggctgctttgccgccagcagtgtacaccaaaatttgctttgtccccgagaaacgccagtccaaaagaatgaaaacccgtcattcgtggatgcatcggccattcccctcaaaaaaacagttcttagcggcgtgcgtatccacatcggcggagtgtgccactaagtcggtccccgatgcaaggcttcgatacatcaaacgtttgggcgtgcgtttttataaatgaaagttttgtaggattttgacaaggtggtttgggatacgtaagtctctcagcgagagcgggcgagttgagtagccaggacagacacgtagattcacacatgcatgcatcctcgcccactgcactagaaacgacctgagagagccgctgcatctaacggtactgggtggattcttagcgttctcgcaagtgcatagcagcaggttacccgagtttgcgcgagtttcacgctttcacacgtgctgtgcttggagctttgttgacggacaaggtctcgcgtagccttcagtactgggagcagcccaacaggaacaagtttcaggcctgcctcagagacactggttagcctaggacacccgttcacgttcctgtcagcatgcaatctaattcgtcaggctgcggcggctttcatggaagccgcgtgcgaaagcagaaatcccgtgaccctcaaatagaaaaaactgccacatgcgcgtttcgtagccgtcctcgtgcttagttgggaacttgtccgcgtgaaaaatcgtactactgtagtatgcacgcaattctcgaaatacaaaactacaaacatgctttcggatgtacggttcgaagttcgtggctcttgccgtctctcggcacacattctgaaactctgagctgcttgcagacgcggattgtacatatctcaggcatcacgtcagaacgcggtattacatgttatcgtgccctttataggttgtatctcaattgtgtgtttacctaccttctactggcacactggagtgattctgaccaccgtgagagttgccagataccacgtctgaagcgaccactccaggctatcagcggtttgcacacgtgtttgccctcggcgggataacga

SEQ ID NO: 1464 - DNA, 2166 bp, Toxoplasma gondii
  source 1..2166: mol_type = genomic DNA
gtccagctggatgtacagcggaggttctcgtgattccagctccacaagcgccagcactgccgccttctttgctgctgtggcgagccgatgcattcgcaccagtgatacgggataaagcgcagagaactccaaggttttttgacattcttccagcggtctgaaaacgtcggtagctcgtgggtcctctgctgtgtccaccgaacggtggagaaccgggttgtgttccgtagccgtatcgaggagcatacgcgaaggacaagaatctggagggttcagtctgcgcaggaaccgtcctctgttagagcgcgaacagcgcatgcactcttgagaattacatctcttctcgggagccactacaacgaacacgagagctgccgcatgacacagagatggagagagtgggtacagcagccagtcgccgccatatgcaaggccgtcccgaacgaagaagccttttcgatgcaaatcgacgaaaacacgagaccgagcagcctctgccttcctcacgcgtacactcgacccacccatggagatgataggcgaaggatttaaagcaggaagggacagtacaaagacggggagagcctcgcttgagcacttccaggggcagacgcgacctggttgcgtcaaccaagcccctacctcctttcccgacaccaaacagttgtatttctgttcagaggcagtcaggtctgccccgctgttcgcagcatccctgtgaccggaacatgtatggttctgccgctccacctccccaccgagtagaacacgagactggctagcagaaagaagaaaaatctccctttccaacttgaaaatgtttgtctttctccttccatctggccctagacgatgttgaccatcacagccgcccccctgttgaagccgcggtctcttcctcgttttctctaccaatggcttaaactggatagctagcaaccgatgcgtttccaaagcgtcacgtagacgacgcgaataaaataggagactcatgttgaactccgactcggaagaggacagaacgatagggttccgcgactgcgcaaggttgactggggaaggatcctgcgacgaagaatggccttctttcctggcgtcatcgttatcaggactctccaaaaggacttcagttccactttcaccttccgggacaaaaaagcgcagacactgggcacaaacgaaacccccgtagccacgcatcgccaaatgggtttcgtcaagtccgagggggaacgggggtcgcggtgcctcctcgcggctagggccaaacggggcgaactctggttcctgatcgagggtgaaaaaagcattctctttcctcgtcattttgtcgacgaagtccttctcagctgccattcacaccaagatccttggaacgcgctcagcgtcacaaaacaatcgctggcgcagacgccgcgatgaagaaagttgaaagttctgatgcaccacaatcgagcaaagagagatgtttgagtagggaaggggaaacaagttattcatttttctcacaataagggtatttttcgttgtctcccaaaccatatctgcgcagagaccgccgcctctcgattgcatgtgcatgcgcgtctgtcctgtattagatgcatacacgttactattgtcgatgtcgagtagctcgttttagcttcatgtccacagcgctaagtacaagacttgtgggacaagtaagaagtacggagattcgccgtactcgtaggagaaagttgagttttctgtttccttgtttttccaacattcaggcgcaaatgacctcaagcgttgtggcgctggtcgtttaggccgttgtctgtcatggtagaatgtgacttgaggcgtctacgatatcgtcggcgattgtgcggtactttctctttcgttttcctgatatctacctttctattacacgctgcagctggtctggtgttagccatgttgcaggggaatgctgtacgttttgaagcggtgacacactggatctgtcaggcggcctgttgacaggacagctcgcgccgttgcatgcagaagcctgcatcgggcactcggtagtgaaatgagagcatttcgtcaggcaataatcgatttcttactcgcaggaattgcaggtcttggccggatttgaattcacagctggttcctcctcggtttcgctcgccactgcatctacga

SEQ ID NO: 1465 - DNA, 3086 bp, Toxoplasma gondii
  source 1..3086: mol_type = genomic DNA
tataaacagatatgaagtggtacagaagatccacatagcgactgcagaaaactagcagatacatctcctgcatgcggcatgagatcccgacgcagtttttcgatcgtcgcagcttgagaagcagcaagacgatcgaaagaaggtgaagcatatcaccagcgaaacgaaaggcattcatcgccatcttgactacgagaacggtacaaaaatcctacacgaagtcgctgcctctcccacgcaggtgaacgcgtccttctggtgccgtacgccgcggaaactcgcccacgaagaaacccgacgatatggagggacgcttggcacctcgtacctttctggataacccagatgtttccacgacctccacgcttcgtttctaccgagaatgctcacgatgagcctcgtgttatccgcgacggatctgctatgcgatgatcagcatcctcttgaaggggaagaacccacgtgccctacagctagacactcgtcgggaatacagtaagtggcgctacgcagttttgacggctttgtgctcctgcgtgctgctcttcgtcgagcttcgctacgaacctgcaaaaccacatttgagacagggccaagtataagacgcttgcaacagcttgtaaaagaaacccggcttgctccaaacagcaaagaacaggcttcgagtcctccctgccactgcttgtgcttcgttgtccacactccacactcaaaaagagaatccatatttaccgctgacacacgggaaatgtctctcgaagatgggatttgcgttcctcttctacaaaaaggtaccagccggctctaacatccgatttacaaccctcctgctagtctgcgtcaaacactgtttgttgtctcttgatggtagcatgtacgtctcactgcgaacaagttttccctggtctcggtagcaccactgcccccgaggcaacgcttcggatcttccctaaaacgaacaatatctccattgtgttcttcgccacctcagcagtgccacctcggattctcaggtaagatggcgtagggtgaaggagagacgcacgatgaaaatgccactatatcctagacggcacacaaaagtgcgactttctctgcgtttttgaggaagccttcgggatgcagagtgtcccagaaccgaatagctcgggtgaggatcccaaagtaactcgtgcctcccgtaactcttaacggccagtatccgttttggtccacgcgggctcccctctactccataactcaattggcgcttttctgcataactcgacacttacttcgctgcggaaagaaattcgacaggcgcaggcgaacaccaagaaaaaagcctgtctcgacggttaggagtggaagtgaggcaccccatacaaccgtggatatatacggaggtcggcgatgaaacgccagctcgaatttcaggaggttcgaaaacaacttgtccccttgcttacactaattcctgcgcttctactcacggagtcgaagccggcaatctcatcgtattccctgctcgaatccacgaggaacaaacccgccgccttctgtcgtatcgtggagcaggctgggaggcttgtggagggagagtgcacagaaatgtacgggataccggaacgcagccgaggagaaacgactaggattcgacacactgtacaaaaaatacaaatccctccgcgatgaaccggtccaggaaacgaactctggcacccttcccgcgctcttcaccccgaacgcgcacagtagctccacactctgcgtgcctatacatgctaccacctctcctccggcacgctcctcaccccatttttggacgacttcgtgccaccagccagcctctttgttgagaagggggaagacgatctgagaaacggagcttttcagacagccgttacgctctgtagaattcgaaatttgcgctgaccgcagagaaacgcacactttcacacagaatacacgcgtcgacatcaccaaatacgggattgcgaacacacattcaacccaccacactgggggcggccaagaaagacgagactccagcaactgctggcgaagactgctctaggtcacagtcctgaacatgcaatgtacgaactgtctgtagaacttctttgcagctagcgaatttgacggttgcagaggctttcccaggaaatccagttaacgccgttgttcaaaaacggaagagcaaccactgaatgagaccgaatccccgtgatcaggtgcacgctttcgaggctgtctgtctccttgccaaatacgacacactaatacccaggagggttgcccacaacaaacagcaagcttcgtttatggagccggacttcgtttcttttgccgttatccactttaacgtcggatagccatcccaaaagaaactcgctcacatgcgtactggtttcagaatcgagaggtgactttttctggcaactccggcgctagttcgcaaggtgctcgtgactttctgggattctcgcactcgactgttttttgagtcatttcttaaatgttctttcaatcccaatccaatattagaagtcgctggtgctggccttgggatatgctgaatcaaagggacgaccgtgcgggcctttccgctttgcctcgtctcagttcgtcgaaaacaacaagcttcgacggtgagacggaccggccaaaagtgaaactcgtgtttggtgtttatcgcctggtcaagatctttaaggagtttctgaaccttcttccgtagctgctgaagcgccgcgatgtcttgcttgcggagcctcggttttacgaccaggctttctacctgcaacaccgcggaacgaaactgtggcgggcctttccaattttgaattcgcctcatctggatcccttattccttcttgcgtactggagccgtctaccagaaaggactgtagtggcgttgtacgagactgtgtacacaggcgccgtgaagtgactcgcctctgtgccatcttacggcgatcaggtgcagccttcgcagccgacacaacctgcctgagtggttctttctttgtgatgggatacgccgcttcagggaagaaaggacgaaattcgttgtcgacggcctactctccgtcgcttctccaaaa

SEQ ID NO: 1466 - DNA, 2221 bp, Toxoplasma gondii
  source 1..2221: mol_type = genomic DNA
agcatagctggctctgctaaagcgagtgatgcgaaagcgggtttccacgctacacgttcatattcgtagcacacggacagctggtaatatctggtgcagaaatatcgctgttttgtgaaagaacatgtgaggtgcctctgtgtgtctgtgcatccgcttcagatagccagctggagttgctagaagatattctcgaacttttgaatcccgagttgttcacaagttccgaactcctgccaaagtcgcttcacgcgctgcgcgtggccgttgcctcactaaacattatcaccgacgcccacacaattgttcgcgatattgaacaggctgtttttcgaaatgttgacccggtcaccattgttaagtcataacgggccaatcttttaaacattgcgagggacgcaaactcgatgaggggtatttccagggtccccgtttcgcattttcgttgttcgtgttccagcggggtaacttctgcttgataagggatgatgaaaacaaactgacttcttttttttacggagtcctcgtgttttcaagttagctcgagggagacggttgagtagattgtgaacgatacagggtccgatatatgcccttaagtggaatcctctcgcactccttgacatgtagcacggtttgggactggagctcaacaaagcataacgctgaggaaacggcatcacttctgcgacagttagaaacttaaggaacccgctgcacaaatgtccaatttttttccccaggcaattcctgtacccttcagctcctatgttccacgtagatccgacgaaatggtaactagtttgcttgaagaagaccactaggctgacgctcgttcaaatattgcgtgtgttcggtgttcctcgaacgttcctttctctatgggtttcacctctcacccgaaagaaacgagccgcaataaaggtacctagtgcgtagttgagtgttcttcgttgatattcgtgtgcaccatccgaccatcgacttcgtatctgatagatctcgtgagatcatgttcttcattgtagcacattctggcaaaatctgtggcagaacgccgatcaggactcacagaactacgcgtgcaacttctccgacctcgattccctataaatttgccctccccatggaaaaggagagtggcacagaacaccatcttgctttcagacttcagtgttcgtctattagtcaaccgatttgtttcgtgttctctaggagtctctcctcgtattaggtacgagcagccgcagctcgaagagctggcagtgagataccaacagcggccacggtgtacgcaaaaaagaaatgctgttccggcacttgtcctactcataaaacccagattgacgtggaaaacgaaatgacgttttccttcctttgtgctgttaatcggccgcgatactgtagcgctgccgtcgatgtctcttcattcggaaggtagacaaaactgtcggctgcaagaccccggcagacgccacacggatttagagaagtgcaccgcaggatttggcttgtctttcttatcccatgaaaccttttcagagaacggtgtctccgcaaactttctgaccccgttcaatgaattctctcgtttcgctagcagctgcatctgacagtgtggacgtgtgggtgcccacccagacaacacgcctctgcgcagtccaccctccaactctttccactatctgcaagttagttacaatccactacctttccttttctggatcaactagaagcgcgcaaacaacgccgcgtttccctccgcgaacacttgcgtgtcagtgcatttttcagcgacttgcgtgctcgatttttcccgtgctgggcttgggagtttcctcttgccttgcaagggtgtgacggaattccgggaattcaccgatccgctgaacagcgagcgtttccgcatggtgcgaccactaggtgtatgtagcgaagggttgcatttcttgtctgaaaaaggaaattttcttggcaattgtggacgttgcacaagtctctgaccagcgaatccgccctttccccgaacgcggcgcccgctgctggttgcgtacccgggcaacgacagagtgcgtagatgaggattttcgagggtctgcctcacgggattcgaaacttctttagactcggctcctacgggcgaaaggctttcacgtagatgtgcttttctgtcagcaacgacctacctacacaagttgtctttggggaaaggcatccaaga

SEQ ID NO: 1467 - DNA, 4603 bp, Toxoplasma gondii
  source 1..4603: mol_type = genomic DNA
ggccgcaaacgctggacgctgtggaaacatgcgccatgtaccattcagtgatcaacagtacgcacgtatgttttaaattgatgcatccgacagtttcggaaaaccagttccacgagcacaggccagctatatctgcgtcgatgagggcagcgctccaggacgacttggtgcggtgaacctcccacatctttcggctaggcaaagcgccttcagagcgacaaccacgaacaacgctgataagtcttcaacaaggtcctcctgatctgacacaccacacttacgtattcgatggcggcaggaatgttgaagtggtcgcagatcttcttcatttcatccaccttgggatcctccacagcgatagacagctgaacccgcctgcccatggccgctgtgcgttttttattgatgtacgcaggataaacaatttgccaccgactccggtcgaccccgtcgttctgcatcattcctgcttcatccgagtgctgatccatgcccacactaggaccgcctggcatgccgccgagcatctgcgctagaagctctggggataaaccctctggaagacctgcgggcattccgcctaatgcagcggcgtctaaacctccaggaaatccccctggaagtcctccaggaaatccccctggaagtcctccaggaaatccagctgggaatcctccagggaatccccccggcatgccgccgccttggcggcgctggtctcgctgccgccccatgacagtagaaaacaagaaattctccgcttccaccggcacgcctatactcccatagtaagctggcggtcagacttcccgatccactcacaaagcgcacttccgcaaaagacagacaaggcaagaacacggaagacgctggacaacggcagtcaggtggagctgcttgagcccaccgtccgacgacttccggtctttttcctagtgacagaagacaggcaacacgacgtggaaaaggtgcagcaaaacttaggacaaatcgccgtccaccaccgaagaaaacatgagggtatgcaacgtgagtatacaggcgacagagtactgtagtctctagttggaaatgggaattactcggtagatagcaagactgtgaaacgagaggcggaaccgaaaaattgagggggtggcgctgtaggacatccggttcccttcccgtgagtacggtttctcaaaacctgcatagaaccccacaaaattgacagaagttatgtaaggggaggaagaattgaacactcacgtctcttctcaaagcgcagccgacagatgccgggtcgcaaacgccgaggtttaggcctcagatggcatgcacacgagcagagcttctcctcgtcctcgtgacttctctcatcagaccgcaagaatcatcattctccggaccacactgggaccgcctccttgcaagcaaaacacgacttcctttacgcgctttcaccgttgcccttgcgaatttctaccccgacgtatgttggctgggccttcggccgaaggtgtcagattgtctgcaggatcttggtcactcacaagcgcgtgcatgcaagaaaaattttgatttatggttagcttgtaagaccgaacccggcaacggacgcactggagaacggcctataccgctgctaaagtttgtgaacgcatcgtaagctcgctcggtgcagtcatttcttttctgattcaggctggtgatgagttacacaccaatacacaaagtcacattaattgtatgcagcagcccagaaaagttcaaatgccgtgcaaggtcataaaacgcgctgccatggcgccaattgacgtatgcgattcttaggtcaccgtgaaatggggtaggaaagacgaccgctacggccaagtgtgttatctctgggacctcaaaagattccaaggcttacagaacagcagtagttccaagcaagagcgctacctaaaacagtagttaccgataccaccagcgactctctgttcgtgcatgtccgcccccttggtggccccacgaatttgctttcctagagatgcagttttttctagatagttcggaatttgccggacacggatccggttttgggcatgcaagacacgtgtctggcgacgttatcctgccaagcactggtcttgcctgaaggcccacgcgagcatcgcaccttggtgatcccggcagggctccttactgccactgatagaggatgtttcagtcaggaagccttttgagctttcgaataccgaaaaccggattttcctatgagcaattgctggtaacgccacatcggaatattctgttctgctcctgttgcaacgcagagcccgtggcctcaagtacctaccttctcagcacctgcgtttctttgaatttgttatcttctcgcccagcatatggccctatccggtgctacggtgggaatctttagggagggtttgtatagtaaaccccataacgttgggtggatgcagaactacattgtatatgatatcttcggaaccattcacaatctgtttcctacatttcgtagaatcacgcctgcaacaagcctgaccaaactctcatagtcgcgtcgcgtgccaactcatcgatacaaactctggcatccctctagacgcggtagttccccgccttttcggtccttcctgtttcgtgccacggccactgttgcacgattgtgtccgctggtcactacttagttttagcggagctctcaatgctagtttttcatagagccttgaccgtcaacgttttttagggtaggatagtgattagcgatgacctccaggtgggtggtcggctcactccctccaagacattccgcaggacgagaactggttccatttctacaatggttggcacctttacgatctgctaacacaaccgaacgcggatcccgtaaagtgtgacattcatcttggtctccattgcaacttgtagatctcacacttacgcgaggaaggctgatgccaacaagccaaatgttttactggatgccactctgttgggaaatcaagaccgttcacgacagtgcgaagagctggggaatcaggtgcatccggggacacgggataacgtcacacactgacaggttcaaactctacatttgtggactaaacctatatttctctccttatggcacgtagtcgtaactgttacatgagcgcctcggctccagcaaacccggacggccgatggcctgggtgcacagggacaaatgcgggtggaaagtggtcaaaagagagatgctacaaggaatcacaacatgcagggatacttgttgcgtagcaggcatgtcccgctaccaataatgcctctttgatggcgtagagcaacacctgcaccaccctcgagcaataagagtgggaagccgtgattagcgacacgatgccagagcataaactgacaaagggataccacaagccatggagcgaaatgaagaagcaactactggtgcggctcaagcacccgagctcgctgcgtttgctgaaccgtggaaaatccctttttctgatagactacgtgtcgcgataggttatgccaacgaggatgtctctggatcgacaaaccaactgaatacaactccctcactttcagcctactgaccgcacctacagatcctccacaattccaaaaattctccatggtttagccttcccccagctcgcctccccctccccctgctagtcccgctctcctggtcacaggggacatggcgttgagtaaatctacgacggcctccgtccttggatgagtgcagacggtttgagcgagtgccacaacaggctctctgttgcttttccgccattaactaaccttgccattcgaacttcactggtgccatcaccttcaaaatagcatgtgaactatcccttgagccaccacgtgcagatgcctgttattgtgcgggttaaacattctgcaataaccgtcaggtatgtggagaaacgcaacatcccaatgttcttgacgcaggatagaatgtcagtgcgcaggcaatcatgcctgacggggtcaaatctgtgtgcacctgcgagcgaccgcgacggtagccccggattgcgttgcagaacggcggcaggcgtgtacaagcatgcaccctcctgcagcggttgacagcccaccgttgtttggaagtgtatatagtttcttttttctacgagcacgctatctctcatcttcgagcaccgaagtaggctttttgagtcgcctttcttgaggcctcgtgaactggattttggtgtaccgcgcgccacaacattcctcaagttcttcctgactcagcctggcgagacacctgggcggcaatccaacgtcaagggagacagcgagatttctgttgaagtttaaaaggacaacaccttcttttccaaggagtgcgaagaaaaaccaggcaactgcgtcaactgtgtgagcagagagggtcagaggggccgaaaacttcgtttgatcaagcttttcgcgccgcgctgagcggactgtgcaggcagaatcggactaattgttcacgtccggatttcccgtcagcgatatagtcgtattttgcggagagggtaccatcttttatgtttccagaaagggtgtttagagcgtgtcatattccgttggtaactaagaggcaaga

SEQ ID NO: 1468 - DNA, 2565 bp, Toxoplasma gondii
  source 1..2565: mol_type = genomic DNA
cgatgaaacattaacgcccacaactgtctgctccagttcttcattgcttccacgaaggcgtgccatccggctaagcgcgagtcggggtcctttgtgtttcgtcatgttttttttttgtttcattccacgtttttaagaggagagaaactggttctgagggcaccgcagcatgtctttgcactaagcagaggcaaaacgacacatgatacaggaaacgaaacaagaacatgcttgctatacaattcatagtgcgttctttaacgggagagcgccgacctacacgtacgcattctccagacgattttttgcgtttcgtcaggttgtgtttgcgtttcgcagtttctaccacggcaaattccttttcccgggcgtttcttgaaacagctggttgctctcattggtacattttaaatttgttcttctgtttcggtggtcgatacacctttaacgacctttacaaaacgcagctctggctggaactgccgcgatgagatgctgacacgaaaacggatctgagagtacgtatgctctctcgaaagaactaaagaccgcgcgtagcctgaatcaaccgcacaatcgcatatctgtggatttgcctgcgttgaatcccactgccttcgtaaacccaaagctggtacgcgtaagatgttgaaacactttccgatggtctgtttgcttcttcaaacagtctagacaactttgaagtcgcgttatttaatttacacgacagagatgttggaattggtgtgctatacccgaggatagcgagagactctcgtaaatagtgtagaacgccatcctctggtccacaacgagcagcttcttcccctccctgcttgcggtaaacgcgtaagactgcattcgtcaaagcgcagctgctctgtctacctggaaagagaaacgaaagtggaaaagacacggtgaactaaaaacaggaagcgaacacccaccgaaacgagctggaaagcgaactggtgctaacgtgtgtaaaattcgatttgagggagttttgaatcgcggaccatttgcacattcacgatgtctgctgacaccgcattcctcgaaattagcgctcaccgttaccgaactcaagaagaattgtttcgtttcccccacaaacccatccggtggtaatgttaaaggtcgcagcttagagtccgaacgtctttatcagacggaaattgcgttttgccgaccgtgtacgttcgtgtacgcgcagaactccttcctatttgacagaagagcccgtttctctgctttccatcctacggtcgaagacaaacttttgtcctttctctgacaaatgggaagctgcttccgtcttctgagaaaagcgaacatccgcaagaaatccaccaaagagaagaagagctctgtcctgtcgcctccatagtgcgagacggtgtcttgcaaggggtggcgggtggagttcgcgatctgcgatgattcaaatctcttcttcaggttctttctcttggctttgtctttctttctctcctcgaagaaactcatctgcgggcttcaactcttttcggctgacaccacagccaccttcttcttcactttcgtctttccccctcagctcgcgacctgtcttggctgcttttatttgacaccccgtaagacgtctcgacacaccgccggttcccgcaatcaactccctgcgtcgagttttttcctgcgtgaaattggagaaaaagctttttcaaaggaattattgcatgcgccttctcgctctaaacatcttctgcggaacttgcagccaacctaaaaagcggcttggcaagacacaaccccgcctccgccgacgcgctcccagtttcttagttgagtcccggtgatttgtgttgaggtccctcgcgtctctcgaactttagaacttcaagaaggacatatttctcacatcgcaagtctcccagctcttttgcactgccggctctcggctgctgttctttttaaatccggtgcctctgcagaaaggtgtctttgcggccagcgcttctcttcgccgactgattttctggttctttaaagacaagaacgaaggctctgcaaagcgtttcataagtttcatcttctctccaaagcaagactagggattaccgctccctttttcactttgaacgagactcaggcgaatcgcagctcgggcttgtcggccttcgaaggaacgtcgttgttattttctgcaaccttcctcttgtctgcggagcctcggtttctctgtgcatttcctttcgagacaagccagacttgcgcaaagacgcctactgaaagaaagcggcgaggatccttgacaccacgcttctctgctgtttctcccctttcctatcttgtgtgtctgtagatatccccctgttcgagtgaaccacaggaagcaaacgtaacttcgctttcactggtccgtcactttactcgattcagtgatcacggttccccttcggcttccccctctgtttgtcgcttcctcgcaagggtggctgcgcagttcgtctcgcgttttgcccgtttgacgcgacgcttttccgagctcgctagcaagcgtttctgcgtttcttgaaagga

SEQ ID NO: 1469 - DNA, 3495 bp, Toxoplasma gondii
  source 1..3495: mol_type = genomic DNA
caaagacctcagcgtgactgtgaaggagagcatcgacacatgaaagccacacgacgaatgcacagacacaaggagaaacaatgattcatatacatacatatatatatatatatatacgtatacgcttgagcaggctgtgtgtgcggcgcggttctgtatgcagagggaagatccagaggcctgctccggagagggtcatacactgcactagagtgtcttcagaagcccgataaaccacgtaaattctaggtctcgacagtcgctgcactgcagatgaattgacaaacgtcggagtcggtggccagtacggagtctttactgagaaatcgacatgagagcgcgcccgtcagatggcgagaggccacccacacacaaaacacggcacggtcgataaaacctatcaactcatgatgttgaagataagggtaggtgtgcttcttcgaaaaaatgttcacccccttgggctaacgtctgcgtcaattcgtggattaaatatgtgtaaatgacgggagaggtatgtgggcaaagagcagtggcgacttccggaaggaacggaaatgattgacgaccagtagcttcagcagcataccagtccgtttacaggattcacgcgacactgatgcacaaacaatagggaggtgagttgcaaagccgcagcgacagtcgactgtggtactctgcctctagcctaaaaaggaacggtgaggggggagggggaactgcaattcaccgccgttcgatgaaccgtccgcccacgccatcgtcctccggccctttttccactttacccccctttttccaaagtagaaaatctagccgatgatgaaaaggcagctccgaaataaaatccgagggaatgtacgccggtactcgtatctattgacgcatttgagtgtgtagtgccgcgcgacggacgtcggacacctgtttcgtcgtcccctgaagtgaatttttcttttcttggccagttttctcggccgccacttctatttcgtacttgcggtttattctctcttgtcattttaaaaagctgacagtcgttttccccgacagtcagctgagtgaacgcggcgatgctgcgtgcgtccagggtggggagacctggcgaggcaggaaagccggtcactagcttgtctgtgcgttacgcgttttttttcttacctcccgcagaagctctggggcgcctttcagagtcgtggtgagcagaaacgccttcgtttgccttcttccccgcggcgcttccggcgttcgtcccggacagctgtttgccggtactttgcgtttctgctgtgggcacaggaggcgaagagagaatcacgtcctcttcacccgacgaatcccctccttcgctgtcattgtccgcaaaagctgagaatttattggacacgccaacggtgtagtattttcgttggggtgccatgttagagactcgctgagttcgccgtcaaaccacgtcgaaaagggagaaatattggccgttccgggtcgaaaacgagacgtcgcatcacccgaaaacttcccgggggttccgcaaacaatgcgcgaacgcagcacagcacagagagtacagacgaattgacagcaaagcagaagagagaggaggcggcaacaggagggagaaaaggagacgaaaaaacgcagtagtgccccctcgaaaaataatacgagcctcgggacgaagaatgcagaagcgaacaagtaggaggtcgagaattcgacccgctctcccgcctcgtatactagcctggatccaggtccccatacattccctacagcgctctccacctgtgtgcctgcacccccgcgctgagatcttgcatgcccggccgaccgctgtgaggggtgagacagagaggctggcctacgtgcaagaaagcgtggccaccccgctttacgcagcttcgtccacagcgcagggcgactgcagcaagttggcacttttcggaatgcacacgacacaaaacgattgtcagctgaatgctttaagcacacctcgatctcaagtacactgcgggagaagtgcggcgcagttgagggagtttgcttctggtttaaaacacaggcaaagcctctctaccgtccaaacgaggaaacgagggggagtcgacagccaaaagtcttgctcaccggcaatggtttgtgggggaaactgagtggcaaagaaaatatacggccaatgctcgagagggcgtgggccacttcagcagggcgggtcggacaccctaaacgcttggatcgatacgtcgatttcagctgtttctctgcctttcataaacacaaaacactcaggaaccgttttttgtgcacccgtttccccacccctagtcagcacggctctcgatagcgcacacaataggaagaccggtcgacgactcgaccgcgaatgagaaacgaggattcgctgcacctcgagctgacggcccggaggtgggcacgggtaggacgcatcagcttttttgcaagttaacggcttttccttggaacatcggaagaatagcatggcacacgacgacagctgacgctgtgactagaggcgggtgagtcgcacttcgagacagaacacacgacgtaacaatcgagcgatggcgccttcagcgtgttgcacgttgcagcacagcgtaccccaggactcatgcagggaatgacaggacagtccatctcgagaaaactgtccttgaagaaaccacaaaaaagtgccacagagtcaccatcggagcgattcttttcgatgatgagatcgacagcgtcctcgcggcgtccttgccttctcgttagctgtatgtacaccgccgggacacgcccgcgactgctttgtccatttccaaaaccgtgttccgatcgcggttccattgcttgtcactttttcttcctcgttcccacccttccttggagttttttccctctagcggatggtgagggcctgacgggtccaaaggacctctccaatgcaaaaccactgtgtgtggcgcttgcacatctgttctgtagtcgacagtcggcagcgtccttggttttaaggtatgagccgctgttgattgaaaaagctcgccggcttaccccaaaacagttgacaccgggacgtggttttttgtggccgccagccgttcgttgttgagccggcttttgcctcctccgcatggagagatatccgtacacggtgcggtgtttgggtaccgagtgttttgacgaacgtctttgtgcattgccgccgtatatccttacttgtccaagagtatgctactggttcgtgctccgggctgtttcacctgcggataaattcaggtgatctttccgaatggtgccacattttctcgacacacttgccgccggacaggccggagtggccggtccccgtttgtgaaactgcctttttaagcattcacgaggagtgtgcattgatctgaaggggaatccttagaaacgtgtcttgatgctgtcggcacggagcagctagcttgcatctgacttgtgagtgtcaagcagtcgccaggaaaa

SEQ ID NO: 1470 - DNA, 4431 bp, Toxoplasma gondii
  source 1..4431: mol_type = genomic DNA
tgacaactgtttggttaaacgagtgacctcaaaagcagcactaggtgcatgttgacactgaccagtcatccgtggacaggctcctgggggtattgctgtacttcagaggaaatacttgttcgacggaggaaatgtgcacgttgctgttcttctgtatgttttcgatttcaagagtaattcactcatgtatgccagttgtgcgcttggggaatcaatttccgtatctataccttttcttgagaggaagaaatgtcttaagtagccttcagctggcgcctgaaacgtctatcatgccttcagaggaataacggttcaaattcttggacgctccgctacgcagatcaaaggcaacaggcgcaaaacactcaaccccgatgttttcgccgactgtttgtatatatatatatatatggggatgcaagtaccagcctaggcgttcctagatcacaagaactccgctctcactggagctcgttacagccacgtgtaccaactccatctgcgaagccactaaaaaccagatgcgtattcgctggcaaagagtgacgccgagaagacgagttcagtaacttcctgtataccgtgtcacagaaggtaacatgtgcgcagtaccttctgcttcaccgtgctgcacagctgttcgtcggcgcttgtctcgactagcagggcgggtccaaattatacagtagcatttgtacgctaattgcaaccaaccgtctactcccacatagtaaaggagacgctgccgtttcgattttgttcaaagcagcccatacatctgtttgtgccctcagatgtcccggcgatttccccctgtattttggagcgaaatgttattaacgactgctgcccccagaattcttttttttgccgtaacaggcgagttgccttccagttcacacatgataggtgctggcctgtgttttcccccgctaggctgtgtttataactatcattgtccggaacgttccgaagctgtagtccggaagcacttttaaagagtcgcctgatcgttcacacttgtatcaccaaaatccaaagacgctctctacttgggttcaaaagcttggcaatcatgtttatccaggttttcatcaagatttgaccagactgtgaagagtctgcgaggaacaccgtcgcgctcaatgggtctaacgtcattgatgcatggagagcactcgtatgtatgcagaactgatatatttggagtgtttaatgaaagagagaatctggtgcgctgtgcacgggcatatactttttttttgagggcgatcactccaaagtagacgacgcggtttcgcaaggatgccttgcatgactggggttgagttacaacctatgttaactttacaaacgaacattcatcacaagtatgcgccagtctaccagcttgcggagcagtacctgcttccctcaagaatacatcaacaatcatcagatcacacagtcgtagaaaaaatgtccaccattcccaaccctcatgagcagtctttcccatccctgaaacagtgaaatgtcaagttctaatgccaagagaaatgcagcatccgtgaacgcaaacggcatgccacaaagcacctgaagtaggtctgtttttcctgctgtggccaaactcaaggggaccaaaaaggcgacccaatactgatcacgtgacaagcgaatatattgtatcccatgtgagacatggaacgagcatcgacattctggaatcttctcgttcgcttgcattgaatgacaaaaggatgaggtcacataacgcgatcttggactacgcctgcaaagaacagaagaaatcgcagcattttcataggcgccgttgcttccacgcaggaggcaagaagagccggaaggcatttcttccgcagaaagcaagcatcacggagcacatgtcatacgtcctcccatcagccatgaactagtgagaaacgcaagtatgtgcacacatctgcagtgagaggatttggtatcgtccggtggcacagtgtgacaagagggtttaacacaatgtacagccagtgcaagcatgaagacaaaatgctggtttcaaccgttaaagtcagatgcgcctggaggttcgcatttattaaagcgtaacttaccgacgagaaagacatcacatgtgtcagtccgaatgaccggctatgcttgagtgccctctcgcacgtgtcatgttcctccgaatggcagtctcttgatccgctgcacgctgtgccattgccgtctagtcttcttttgccagggttacactgagcgactgcagcagcgtggtccgctccatcgacactgtccgaacccaacgacggcgcgaagtcactcatgctgctcgtcgagcatgatgtgctttgcggagtcaaattccctgccgcaccggctccaagatgacccgacggcaccgcaaacccgtcacaaaatccagaggtgggcgtgaacagaggagttgattcctgtcgtctctggatgtattccggaccgtttggcccctgaacgcagacgtaggtgtggtgtccgtcggagtaaaggacaggaggcatctcctgagagcatgtcgcattactgatccacgtattcatcttgcgtgtattcaactttggttcagccagtctacgcaacgccgaccaatctctctccgcaaacgtctttgtcggtcacgcagtcaaaaaatgcatatgtaaatcgaaacctttattttccactccagcatttactcatagacggaattcgtcgaagctgggcattcaactgcgaatgagcacttgaccagagcacaacagtaaggcaacaataaatctagtcccctccaagagaatagggttctgctgtgactttgggtttgacgcggtaacaactctacagtccccttcgaagaaataggttcaagtctgactttattacattagtacgtgagagctcgcaagcaaacgagaacgcctcgtcactggttgtctctagggaacaaagcagccggcatatagtgtccaggacatgtggtgcgctccagctccagctgaaaacgattttcccgggtatttccgctgcgtttgattacgatgacgcgccaccaagcgaatccacgattcgatgcggtgctatctgcgggatgccagtcaaacaatgacgaacaacatggcagcttcttcgtccacggcccctcgcgaaaccggttttctttggtactagacggaccggaccgttagcgactgaaagaagtgttttccgttgaccaacagaagctgaaggcggaaggtgaacaggtaggcctcacacagcagacggaactcagcttgaagtccgaggcacgcgtgcctcatcaggaaatagctggtaaggtgtaatgacaggaagtgttgcacgaatccggtgagaattcgccgcgaagactaatgattttttcttcaccgcaacactctgttcatttggccaaaagtaaaacggtcatgcataaacaagaaatggtcaataatggccgtgtcccgaaaaaacggaagttcagtgtacggcagaaaagcaaaacaactgcacccgccagcaggtctttgtgccaccgatcgggacgccaccagctgacgattgcctgtggtatgctcctctcttggactctacaacaggagtgctcgacgccagcggtggaggcctgcacaggtggacggtgacacgtgttgtggggaggaaactggcgtgcgatttgcgtaaatcgagatgtgcgtagttcgtcggtctagcgtttccgagcagccgcggcacctcggaaagtggtgcgctgctatcaccggaggatttcccccaaaacgcatgcttgccataccgccgcatgcgagtcacaaaactcctccagcgcttacagtcacgttggcgtggaaacgggaaagagttagcgcttttccgtacgtagctcgatagagccacaatgaatgtctcaggatccttgcatgttttcccgaactacagtgccctgctttaggtaagagtctgggagtagcgggttttatggaacaccctctcggcattttctcctggggtacccggctccgcaactgcgtttgtgcgtgagtcacggctgctggggcaacgacagctcgtggatcaagaggcagtgccaagtgatcctcggaagccgctaccgttacaatttacgtatgggtgtatctgtgctcctagactcctttcaagagataatgtaaggatgtaggaaatattgataaagcatcctcgcacgcccactcgactgttctggtaccgtggctggatgagaactgtcagaatatcctccccactacaaatatctgttgtgaaagccgagtcaggcagcgtggcatgcccagatcctgaagcgaaggacacaagcgaatcatgtgcctgggctaccaagagagcgattgtcgtttctcggcgacagcgacgacgctcagtgctattccgtatcgttcgcaacga

SEQ ID NO: 1471 - DNA, 3233 bp, Toxoplasma gondii
  source 1..3233: mol_type = genomic DNA
ctgttgattacagtgaaaacagcagccttccgaaacagaaagaattctgtttgagaggcacaaaacgctcaagagtagattttccatgttatgcacagtcacgagtcgcggaagcacttatttgctatgcagtgtcatagcagatctcagagaatgttactttcagtccgatggtactgatcatactggcataggtacgcataggtacattaggaaggaaactatcccaatgaacagcaagatatttgtacaacttgtacacacttgtgccactgctgtgaacatgccagcttgacagatggagaattccccaatcgtccacgggcgcttcaatcggtgatgagcacaagtgtcagtgctgcttgcgccgtagccgttttttgtactgggcgttctgaagtatatgtaaacggtagaagtgcaagtgccatcccctttcacatatgcggcctttccggcttaaatttggttcattttcagtaacggatttcatgcagccaccgttcaaaaattgccgcctcttgctacttgaggcaacacgtacagatagctgactgaaggcaaggatcgttctgctcgtgcagaactggggtcaagaaaaaccgattaccgtagacgaattcagcaaatgatggagggtacactatggtatcggggcgtgtaggtgcctcagaaatcagctgaagctggactccctgttatacattgtaagatcggattccgaggcctctcgaagcgtcgactgagggtttctaaactgcaagttggactcctggtctagatctcctagatgaaaccagatgaactacgcatatatgaatacgtaggaatgttgcacattcctggaaaccaccatgtttttgttgtttgttgttggaaaaaactcgccttttacccctgttgtcttcaggtttcgctgtaccgtcggctaccaatgcctaggtcggccttctgctgctggcaagtttcttgcaagtcgccagacctttgttgtacgcgaacggctgctaaacataggacggtcgctgtatcgaaaacactgccacgatatcacaacggcagtctaacaacaattggaaagtgactagtttgacacttaaaatgagtttcggcgcatccgtgtccctatcgaaacccgaatgtagagccgtcgtttgctttgttcttccatacattttacacagtatcccacacaaatatgtacggtttatacgcgagaacggacacgtcaacagactccatgattaatcaccacttttcctccgtacacgttgctacagtttggctggacacgctgacggcgagaggaacggtaacttacgatgcatcctgccattcatttcgccaaccaattctctagttcggacctcctttacttccataacaagtaattccttttcatacgttgtgagatcctcttcactgcagcaaaatgctgttggttacagggcttgcactaaagtaaaaagggcactctactgtagttggaataccgtaggcgtttatgtgttggtaacacatgaggataaaatacaactttaagcgcaacacctgtgtctgcaaagctgctagaatcatttacacgtaagatgaatttatgtggaactactatgatcagcctatgaaaggcgatgggaaatgtaatgcgaaaaatcgttttaatgttacatcggatacatagtaccgcgaacagtggtgagatgctgaacgccgtaccagagaattcaccctttcatgtttgtcacgctgcatctctcatagtgccgtccggagagggtactcagtcagtaagcttcgctgtctgcctgtgtatccttgtttgcgttcctgaaaacctaggaaccccttttttgtaatgtgtgacaggaggtctagcctcatttgttatttgattagcactgcatgcctttttcttgtcttcaaagaagctttctgtcacttcatctctcacaggagagtcgcgaacccttctcaggtcggtgcgaattccgcaacgatctcggattgccatttgcggcccccacactgaggcgacccctaaaaagaagtgcctcgtacaagcgaccaagcactgctctgtggaatctggattaattggtggctgtgaacacttccactgcattcgttaagctcgtcaccttgtcgtttcttgagagactgattcaggttttctaacactcgtcggcggccctctccgacagaccgtcagactgtcttgctgctaccccgttactccatgattcagaaactggaggtcagtggactcaggtgaaacgttagttatggtttctgcagaagaaaatgaccgagaatgccattcctgtcggaactggacaaacgcagccactcccggaaggttcggtaaacagacgtgttttcaaacgactggcggctgtcagcagcaaggcagcgcagtatctaccatggcgtgatggggtaataacgctccgtcagacttgaataccgggcgtctcagggttaggagactctgggaaataaaacgaaacagcgaaaactcagtctgtttgtgcgctgtctggcgtcgcaggatgcttcgacgttgtttcgcgggcatgcatcgacgctaaacggccacatgcagattcgagggttttttctgcatgggttttggaaacgagcgcgtttgccactgatgtagtctcggtgatctccatttcccatagctttctttccgttatggcttctgcacgttatgatttcgtctgtggaagggcaagtttctcccgtttccagtccctcgaacctcgccttcgacgagtcaaagcagtgtggggcccgggacgccagacccttccgtcgtctgctgcggtgtacatacacctgacttcgtttctggcgctcacctttgaatggtcacttcctcacacttctcaggtttctcacagggtttcagttgtctcttcccaatcctttccctgccttgcgaggagctgtcgcgcccacggtgtagcttcacgctagcaaaccaagtggggagttgaggaggcgacagaaacgtctcgttttccagtccagcgttcctcaaaccgttttccgccactccaaggcaggaagatctcaggatctcgtcgctgtcatttgaatttactgcgcaaccatcctacgatgtttctccgtagaaatcgagttctatgtggtacagtgtctgctgccgtcgctcgttcggcgcttgatctttttttttcgcctgtttgttcgtcgcacttcttgta

SEQ ID NO: 1472 - DNA, 3888 bp, Toxoplasma gondii
  source 1..3888: mol_type = genomic DNA
tcgttggcgacgctttttgagcgaggaaagggagcattcagcagtggcagtcgctggcactcctctcccaagaagccaaggcttgaagggaacggagaccgcagaaggaagtggaatcggagactgatggccacagaggacaggaactggcgaagaaaaagaagggtgagaggacaagaaggacagaaggggacaaggatggaagaacagaggggaaaggtggagagaagaggaagggagcaagccgcgggggcagacttatctctgattgtagagttcacctgcaagagatgcgcgacgcggacgacgttgtcattaatgcgtagattgtcttggaagaactcgagctacgaaggtaaaaacgagggggaaaagcaggcctgtcgacaaacagaaactatctcaaagcattcaagtctacatacacgcgggtgtgtactggccttgttttcatgcggcgaattaatatctgttcataagcgtagcgatacgtgattacgagcgcgagaaggagaggggaggaggggggagaatgacacgacgaatgcagcgaggagttcaccggaaggaaactcagcgacagactctgtctgccgggaagaagatttcggagaaagcagcgagagaaagtcgagagcagaaaaggatcaagggaagaccgcaaggaaagaacacaacagagcaggcagaaacgccgaggaagctcgggagcacacagtggcggagagagagaaagaaacgccggagggagaaagagggaagaagcgagaggaaagagaagcagcaggaacgcatgaaaagatgcaggaaggtggagaaagaaagaaaggagagctggaagaaaacgggagagagaaaaagccttacattgtgagccgtattatcgaagaggcccccgacgcgggcggcgagatggatgagtgactgcggtcgatatcgcagaaagagtctctctgtctgggtgtaatccctgaagaagacaaacaccggcggaagcagaaggaccgacgaactgcgtcgaggaccagaaaaagatacgcgacatgaaatgcttgtgactcagaatccttcattatccttcattaacacttgcggagaaagggtataggagtttttgcgagaagcacgaacctgcgccagagagacagcagaaaatggcggacagagcggcgcctcgaacaacatgaaaacaagaaaaaagagatacaggaatcattcaacgaaaacggtgctcacatatacacatatacatatatacatatatatatatatatatatatatatatatatatgtataataattcactgcatgcatgcaggtacacaggtacagatgcacatccagattggacaggaggctctcggcgtcgacagagaggcgggggacggctgcgaggaccacagacaagagtgtctgtttcttgaacgccgcgagaatcacaaggctgaacaacctgtcctttggaatttgtagagagaagagacttcggaggcaaacacgagaggaagggagagaacaaagaagagtcctcagacgctagaaggatccgacccattgtcctgggagtgcttctcgctgagacaggattgtccgtgagccttttctagggaggatgtcctacgacgtggactacggtcatgagactcggaaggtatttgttcaccggatgcaagttctactgtgctacctcagagcctagttaagacgataattcgtgtagaggtcgaaccagttgaacaccctgtgttgctatagaaaagcgaatcgggggggaggctctcgcgtcgcgtcttttttcgagatcgacctcagcattcagctccactcgtcgcttcaccagccaagccttgaggtcacctgcccttccgccgttgccagggagagagacctctgttcactggctcccagcattgtgggggacgcctggcgaccctgttggcctgtggctttgaattgtgcatagctccagtccattttggctcgccctttctagagattgagaaaacacagactggagtcgcagagtcctcctctcctccgcatcacatccagcgaccgaagcggcagaacagagagacagaactttgtctcctcctgagctgctgcctgtacgttttactacgcgtttgccttaacgcctgtctggcggtgtgtgttgagcaagcatgtacacagaagccaggaagcctcgcatcaggcttctccgttcttctcttctctgttccgtttccttttctccttctgctgcgagttcctcaccgcaggtctgcgtctcgcgaccccacaaaaacgaacgcgacagctcgcgccgagattatcgtcggaccttcaagcgacgcttctcctctcacagtcccaccgtcttttccctcagagtccgaaggagaagaggaagaagaggatgaggaagaagaaggggcttgttctcggagaagaacggactggagagcttttccaacaaggccggagccgccggtgacgaggcagaccggaagagacggagaaacgcggtctcccgccatggagactgcctgtctgtacaccgcacagacactcgcattctgttagaactcacgatggaaaaaccagtagacctgagactgcagaaagctcattttgcgtattcaacggatttacaactcgcgcacttggatcctctctgagctcttcgctacttcgagactcaggtgtctccaggcctcgattcattctcaccatcaacaagaagctccactctctcttcttcactttcggctcctcgcttcttttctgtattcttttctctctgcttctctctcttcttcactttcggctgctgccttcttcgctctctctctctctgtctccagctgtttctgctgctctttcttcggcttgtcttggtttttcttcgattttcctctcgcttactgtgcgtggttgagagggaggagtggattgcgaggagtttcgccggagttcgaggtcccttcgcctttgcagcagctctcgttcctcgctgaaaacgttctctgttccgctttcctcttgcctctgcagagcaactttcgcagagacccagacgcagcctggcgagcctcccgcccgcttgcctgcgcgcagccgctcttctgcatgcgagaagcagctccatgtcctgccagcaatcgaaaaacgacggtggagatcgactcgcacagagctcgaattccagaaattcagaaatccggcgttcttcagggaggctctcgcccaagttttctctgcgacagaacggagaaacaagaggcggagagaggacgccgacacacacgatctcgtggggtgcggcgtaggtacaccgcaacccagaggctggccgatccctcgagtcggtttcgcgtttttcaacgggaaaatctggcggcaaattctccctttcctcgcttctgaaaaatggattagagcggcgctctctgcgaacctgccctccctcctccggtctcctttgcatgcacaggatacctgtgtccctccacgcattgtcgtctccgtcctccttcttcgattttcttccgctatcttcttctgtccgtttttctggacatctctgctctcttgttctctcttctgcagctgcgggcgtaggttcgagacctgccgcaacgcactgcactgaagatgcacctgtgaatctgcgcctcgacttctcgagcgctgtcttgttgctttttttcctctccctctccttctcatcctttctcccgctccttcctcgtcctcccactgttgctccctcctcttcgtgtgtttcaccttccttgttctctcctcctcccttctctctttctctcttcccttctctctctctttctctctttctctcctcctcccttctctctttctctctttctctctttcatgctcca

SEQ ID NO: 1473 - DNA, 3659 bp, Toxoplasma gondii
  source 1..3659: mol_type = genomic DNA
ccacaggcttcttctgatccactcgcaggcacaatgaggacaggaggctgctcgcagcgtctctgcagttcctccagaatccgccttcttctctcctccgtcaagaaaggcaccgagagagaagaagtcggaagtgcagtggcaggagagacagccgaagaagaggaaggagacggaagagaggatgcgagctgtcgtcccgaatctgggatgcatgcagaagaagaacgagggcgcagagcatcggaagacgaggaatgagaatcgagcggaccaggaacaggcgactgaggagaaaaaggagagttgggagcacaagacgagaaaagcgggtggaggaggcggcggaggacagaggaaaggagactggatgcggtcgacggagtgtctggagaggcggaggcgtccatcatggaaagagaggaggaaaggagacagacggaacagtggagaaagatcaaggagtcggggacaaatcggagcacgacaacgccccagacacacgacgaaccttcgccgcagcagcgggtgcttcttgagtgaggagagtgaagaggagcggtgcgaggcaggagagacccaaggcgactggcgaaaagaaagacgcgggatagacggagaagaaaaaggcgatgaagcgaaagtaaagttggagacgaaacccccgtttctcccccaaagaagaagagacgagggcgaagaacggctgctgtgttttgtgtagcaccgtcattgactcagacgaaaggggagaaagaccgccaaaacgacagagagagagcgtctccgagtcgaccagcggtgaccctgagagggccaaggccgacagacgaaggacagaaaaatctcgaaactactctggaacatgccagacagaggaagcgagaaacgaggggatcaagcctgctttttccctgcctcgaagagacagcagagagaggactcttccgactcctgcgacagtggggagagaacagagtctgacaaatgcggagtctcccgtcgaccgttccagcacccacggatcagcgtctctctcttcgtctctcgctcgaactcccagcgaaaagagagaggaaggggggagaggcagagacgtccgctcttctcaaaaagtgaaccaccgccgccttcctgtgtgcatgctaaacacgcgttgcagacagactccaacagatacgagacaacgactcgctctacttccttgaaaaatcgagaatgctgagagtcttctgtctccagatctctcttcaaacgcagacaaccaccgagaaactttttccgctgcatgcaagcgcctcgcgccgtctacacgcgctgcacgcgagacccagcatgtacgccttgcatgtgagagaaaaacggagtttggacaagtctgtgactttttctctttttctcgttcttgcagttttcggaaacactgaggaactcggaatttccaagcgtctcgactcgggtgtccagagtagacagaggcgagacatactgctgaatcagtcagaaagatgtgtatcggaaggaaaaacgatcgttgttcaaaggatctgggtttatctctgttattcgacgcttgcgtccacgtttctgcatagagagctctctttcctctcactggcatcttttttctctttgtcgatccagtcctctctttgtgtctgtccatctcagtgtatctcttcctctctatcgatctctgactcggtttctccctcttgatctccgtctccacgtctcctcggctctctttccctctgtcgcttctgagacttcgtcacccctgttgtctctccgcaggctgcactttgaaggaacaacggaattctcagcatcctctttcaagaaaaaaatgcattttgacagagagatacagattgcgtgcgagaagatggtatgggggttttcgttgacgtcaaataagcaatttccccttgtttcaaagactatattcaaatcagaatagaggcggagagtgtctcccctcacttgaaaagggaactcgaaagccttctgcctctagcagaggttcagacagaatacttttctttcttcataggaaatacactgacgatcttgtagtcgaaacctctcccaatttaaggctctttttctttctagagagatctgaaggagaaacaccagaaagcagaccagcggagggagatacacaggagaacttaggcagaacgtcttgtgccgcgttccactatacaaagcagtgtcgaggaaagccacagaaaagaagtcgtagggagaaacgactggatttccgaactaggaagcctgagaatcggcgagttcgagcaagaaagtcctcgagaaagaacgcgtgttcacctttttgtccctccataaaacaaacagaagatgcaaatatttccatttctcttagctacgcgtcttttttaaagaaaaaaggcgcgcagtctaacaccttcagacaggaagaaagtctgcttttcaaacgcctcctctctgtcgtcttcatggaacttctctcctcacaaaataacagagaaaacgaggacgaactcctctcgtagtctctatcttcatgtccttattttctttgttgaaagttgatactaacacctgtgtatgttcgacgcagcactacacacaggactccttgcccatcactgaggagccaagtccatacaaacagttttgacgacgaatacatacatatatgtatatatatgtatatatgctctgtttttctgtgcatgtacgttgcgtgtgaccgtttatgtttgtgagacgctgacttgcccgggtcgcatccgtgttttcttaaactttccttcgcgccgttagcatagtcgcagaaacgtatcagaaggcatgaagtttacagagtgtgctcttgcattcgaccgaacctgcgatagataagggggcttccacactctctgtgttttcctggagacacgagagagagaagggacatcctctgtgaagcgaccgagcgagggacaagcgagggaggaggaacgacagagatgcaagaagcacgacgaagcacagagggaaggggaaacctagaactgggggaagatgcagaaggaaggggaaaccaccgaggcggaagatcgagacaacaaagaaaagacgcttcataaggctgaggcaacagaagagctggagacaaatacggaggaaacaaacgagtgtatctgaggagatctctgctgtcgctcttgtcttgcgacagaatgcgagaaaaactgctgttttctctttgttttttcaaaaccctctgttaacagatagatggctactcactggatttctctcgctcttccctgtttcctcatagagaccctgtccgcagatcaaaaacagcctgcgtctcgtagcaccctctctccaatctcgtcctcacccttcctaccttctgcatttcccactggttctcctacccgaaactttctcggcagacactttccttctttatccttccaaaccaggagaaaactgtgcaaacaatcctgccggctgtcgactctttcttcgctgctgacgagcacaccgcgttcccccttctcccgcgcctcgaaaaattctggcgtcgatacacccgaacttgtgcctctctctccgcacgctgaagcgagaaagccacgaaaacgcaaaagcaaaagacaaacgcggctgca

SEQ ID NO: 1474 - DNA, 1951 bp, Toxoplasma gondii
  source 1..1951: mol_type = genomic DNA
gcgattgcgaggtggtaggtgaagcgcttgagcatcgtggagaactgggaagggtgctgctaggagagctcccgtgcgctatggctgagaaccttgagctccgttgtgcctgtattctactacaggaagtaacctggcactttctggtaaaccaataaccgtgcggatgacctccacggaaactgccgctctgcagatggacgctgaagccgggaaccctctcccgtgattctcgtaagagagaaacggacggcacattcgcgtatgcgggggttcgggacgaaggtgagccatgagaaagacagtgagcactagaaagtgaattcagtggaagacaatgagcagtacaggacgtgcgtttgaagagaggcttgaggctcttgagtgttaggaatgtggacgggtgtttgcatgcactctgcgataacgcaccagagacacagaggcgaatccttccctccttctcgccagagacaagaaacaacaagaaagccagcagagcaagattggacgacgcctttcgaaaccgagacggccacccgtgtctcccccaagaagacggggaaacaaaggcaaggacgacagccagaacgaaactgagcaggaggtgccgaaacctgaacatccacgtcagactgttaggatggaaaaaggggggcttcaaagtgcccagacgggagtgagtcatggtgaaaaactttgcgcaatgtccccggtatgtcagccttgcggctagccagactgaaggcgaatcagaatacagccacgagcacgtgtcgagagaaactggagagggacgccatagttcctgtcgcacagacctttcgagaaaagccagaaaggttcagaacgctgcgttccgcaacgtacgcgaaacaccctctcctgtctcgtgctcatcactctcgctggtagcgccgcaccgagcgtcgaaagcccaacagagaaaaatgttcttattgtggacgacaccccctcactagaacagcgaacacgctgaaatgtgcagggacaagtaaacgacggaccggcatgttcattgtcaacaagtctgtggcacgggtgcagctttggcttctaccgcgagtgttgtagtgtgtctttgatggaaggcaactactgcagacggcagtggcaagggaacctgtcaaagcagcgcaaatagtcagaaaagaacagcgttcaataaaatacaaatcacgacgaaaggcaatgagaaacttcctcaactgcccatggaaacaatggcggagacatgccacgcttctaacatggtccacgcgtcgccgaagttgtgcatgtatcccgccgacccgcagcagagaacggacgccgccacttgtacccgcagatcctcatttcgcaaatttataccgtagttcttttagatctaaggcaaagataaatgggaacagacacacttcccttactactggagaatcaagacaaactgtggcaagaggctgtctcccctcgacgcaatccgcgcatgcaatacaagtagtatgttggtggttggaagctgaattgaatacggacaaacacgagacattgcccctttattcgattcgtccttccaatctctgtgtgaggggatggcagtgatgaaaagagcctcaaaaatccctttttcgcttggttagcagttcacccggcagggagtggcacgcgcgacaccggactgcggtatggggaaacgcgatgaggcaaccgcgtagcccatttttgcaagcacggacgcgcatatctcttatgcccgctgcgttcggtctgctttgtttttcttggcaaagggtgccagtgtcatggaaaaggcaatggctgttttggtcaacttcgaaaagtcgcgactgttgcacagttagacctcctaccgtaccagttcgatgacaactagatgtactacggcgtttgtttgaagtagacatccttgtcgtgctccatagcataa

SEQ ID NO: 1475 - DNA, 2129 bp, Toxoplasma gondii
  source 1..2129: mol_type = genomic DNA
cacaaaaaggcggaaattcgacagacccgttcgaggttgctaaacgggagtcaaacgcgtagtacctgcactcctgaagaaaaaatgctcctttgtttatacaaatatatatatatatatatatatacatgtatatctatatgtatatctatatgtatatatatatatatatatgtatatgcatatgtcgacaaagagtcatttaggaggtacagcacaagtaaatagaggtcctgtaggtgtggatgccgtccggggcgatctggaaccttgtgttcgcgtgagttcttctgtttgtgatgagaagtggaatcatgtcgctgaaccaaaggagtattacgagttttcgaaagctcagtcgcaacgtcgagctcgaagaacttcttcaatgaagcgtttctttccggaaccggtgaagaaagaggttcgagtaacgttgcagttgtgcgttcacctcctggagagtctgctgcggaggatagaaagaagaaaaagttgaaagaagatgctgcgtatgaagcgcgatgtgggcgccctagataggcagcgcaggcaaaatgctggagaggtgtgtgtagtttaccccaggtgatacaaaaagaattttacacatcttaggcacagagcagaagacctgtgaacttgtttcgtggatcaagagagacagagagaagagaggcggtcttgttcgttacctcaaattccaattcaacttgaagatagactctcactttttgtacgcgtcttcgcggacagagttactacgatcggcccaaaaaggagctcgtgaacggtggtcgttgattcatggtcaactcccttccatccgttttttggatcaacatatcttcctgagcacctgaaaaggatctgacgatagctttcgtcttggttccgttccttctgttgtttctggaaacttgcttgtctttctcgaccgccgccgagagtgccttctgcccccaaggtgaggcgcggagtcaccgcagccattttagctgtaaactcccccgactcgaggttttctttcttcgctgtctctcgcgccttttccctgggttgtccactcttctctgcgtccttttatgaacgccatcttcctccaggctgttctgaggcagacgctggcgtcctctcggcgcttgtcctttgcaatctcggcatcgacagggaagctcgcgctcgcgcgtctccgcgccgtttttcgcaggctgggccgccgtctctcgccggccaagggcagggagaagtcgccgcgaaaatgatgcgagaaaagagagaagcacgaagcggaaaccgagcacaaggagaaggaacccacaaacttcgctgaggacgcacgaaggtgcgtccgctgcttttcgcgctctttttctctcgggaaaacggcgttcagcgcttccccgacatctgtgcagccgaagaagcaacagcaaacgccgcgcgctcgttcttttctcttaatccttttctctctgttttctcttctccggtggctgttgttttttctgtgacggacaaagaacacgggggaccggaagacaagttggacggggaaaaaaaatcttgcatgcccttctctggaggtctcacgctgcccgggctcagtctcggcgagtagctcgttctcttttttgacgtttcacaaattccttttctaattccgaaactcgcaaatacgcgtttcgcacctaacttccccgcttttttctccttggctgtggcgcgctcactctctgcgagatgcgcggcgcccgatgccagtcgcggttttgtgtcttgtgtgtctcgtcaggtcgacttcatctgtgcttcctttttctctccctgctcgcgtcctctttttctctctttcctctgcttctctgcactttttgcgagcgcaaaaaacgcgcgtcctccgttgacggcggtcttccgggcaaaaaaggacgcaggaaacttccacccgccaccactggcccgggactctctgagcactcgcgtcgcctctagccttctcttttcgtcgacggccatcgctcgtcttctcccattctcctctcttgattcctctccaaagtggactcgcttcctctctctcgtcttcctgttctcggtctccacgttcccccatgcctcccccagaa

SEQ ID NO: 1476 - DNA, 2022 bp, Toxoplasma gondii
  source 1..2022: mol_type = genomic DNA
aggctggtttttcatttcttgacagtcgacacggtgaaatgtgtttttatgtacgcaactttgtaatgagagctttctcgctcctgacgcggggggcgaggcagcattgttgatttcggttctcatgaaagttgatcagaggtggcagtgggtgcactaccggtttagatcgtcgttgttttttggcggacgtttcagaactgtgcaagcgttacgggtgaagtcatggcaatttttatggtttgagacgtttcagatgtggcgcgacgacgtcgaaactgagaggcactggtactcttcagagagagatgtctctgtgcaaccgttggatttctacaaaattgttaaaaggagaggcggcagcaaaggaaatcgaagaaagaagtcaaaggagtgaatcgagttttacctttggttgcatgaatcagtaatcttgaaaaacctcctgttcacctcgtctgtaacaggtgtcgaatttagcaacacgtaatcagagactcttcccgttaaactgaaaaaagtagtgtggaaatgatgaagcctccgcttcttctttctccttaaacacatgctggagaggcaaaccgagccacgatgccttcgatgtgattgccgaagctgcctctgcattcttctctggatctctccgtgaaacaacacagcgtagtcaattttaccaggcgaactcttcgagctgcagcaagcgctgctccctttcgctctcagatacttttctatatatttcataaatggagtcatattcactgtcctaggtgccaccgtgtcaatgtgcatttgacttgggttttaccaatatgggcccctacggaacgagccggttcaaatatacccaccaacgctattctttcttaccgtaaagcgagaatccacaagaattctcacacggcttcttccttgtagctttgaacggcagagatggtaccttgttcacaattttaaatggaggagagggaacacactgtccgcagacgttcttaattcagctcacatcgtgcatctgacagcgaactacggttttgaacggggtcctgttcgattacacgcaagtagtgagccggcacagaggtactgatacagtccgaggactcgagtttcaacattatctgacgtaccattttccattctatattggcgggcggttacaggtccggctcgttcaaacacacacctgtattggaaggtagacacagagaaactggattgaagaacagagagagttctgagctgaatagacagataataccaacgtttgtgtgcgtgtctgctcctgactttctccttgctgtgtcttcgagtccttttttttcttgtgtcttcacagtccattgttatgccctcctctccgtggctgcatgcatgccgctctttttttaaaggccatctttgctcgcgatctctctccggggcttcaatgcaaaggaatctcgttctgccttccgtcctctccacttcttctttcggatcccttctttcgttctttccttttgcctgggctctcgtccctccccgctgcgcgtgtgcttgcctgagacactttttctcgggtgaaagcaggcgtaggacccgacggcgatcgaagccacggggaaatcgacggttgcttctctttcggggaaaaagttgctgcttcctccccggctctcctttcgttttgtttcagacacaaggtatacgcctgttctgccgtctctgtactctcctcgccgttcttccctcttcctcgcgagagactggactgaaagaaccggaaaaaagggacaaagaaccagaggaacggacagttacaagaaagagtgtgacagagtgcgagggggtgagagacggaagcccgggtgagcgacaagagaaacaccgtcagcatatgaacgcgcgtcggcggtggaaaaagtggaattgactcttcgctttcgtgtgaggaagcgtttgtctgtggtgaagagttggacttttctacttgagatgccgggaaccaatcccaaaacgtaaaagacgtcgacacca

SEQ ID NO: 1477 - DNA, 1966 bp, Toxoplasma gondii
  source 1..1966: mol_type = genomic DNA
gaattcgacgtttttatagcgcaccgtctccacattgaagccaatcgctgcacagcgcaagcgagacacagagaggtcgagcaaaggccgagaaggtgactgctctccggcgacgcggcccaagacagcaaggtgcgagggaactcgctacgtcgcgcagagtcacgggcaaggcactgacagcacaacagcagcaggcagacggacaggaaggcgggcaagaggagagaagagaagaagagcggggagagccttactgggaagcgtttcgacgacctcgttcaaatgcagtcgatctgcagagagaaaagcaagcgaaggatttcttgagatgtgaggaaacggagagggaagacgacttgcgaagcgatgcaggtgcgagcgacgacgaaccagttgtctcgactccttgacgccttacagagaatcgtcgtctttcctgcattgtccaggccgagaatgagaatccgaacctccttcggacctataaggcgtgagaaaagagctgagaagtaacctcccatagtagcaatcgatggagacggacgaaacgaggagggagagacaaaaaacggaggaaatggtaaagaaaaagaagaagtccctagagacaaggcgatcgcgctctgcccttcattttaaaatgccgttcttgatctcccttgcggccattctcttcttctctcgtctttgctgtttcctcgcagtcttctcttcttctcctctccttctcgtagcccctccttccgttccctctatcctctctctcctctctctcctctctctcgtaaattttcctctctctccttgcactcttttcctttctctccttcctcgccgctcgactggacgcttctccttcgttgtccagcgacgcggcttagacttgagttctctggtcttctctcgtcgtctacttcgttctctcgtccgctgtgtcttctggtccctgcgccctttcagctgcttttcttgtgaccggttctctgattcccctggaaaaaaacaaaaggagtttccaatgaagaggacgcagaatgcagtcggaacgcagaagacgagcagaacatcgggcagcaagacgtcgcggaaacaattaaaacgaaagagtcggaaaggcctggcaatgctgctaacggtgtcgccagagttcgactgaagggaaagacgaggtcgacaggatgggcgccgctcgactcacacggaaaacgaggaaatagagctttctatgtccacgaaagacccagtcgcaggtcaaactccagaaagggagagaaacaacagagaaacaacagagttacagcaagacaaagccaagccaagcaaggcgcgctaggcgcgaaaaggcgaggaaagcgaccatggcttctgccacggactttacgcaggagacctaacgccagtgctgtcgcgtctctccctcgcagatgcgcacaagaaaaaaaagagaagacaattgtctcttcttcacttttgtttctcgcctgggcttctcgtgtgatctccttcttgtctactgctttttcgccttccttcatacgccggacggaagcgaatctcgaattccccgaatataagccgacgaaccggcgcgaaaactttgtgcgctatgccccagagcagcgcggtgtctcctgccgtcttgtcgcgtgcgtttgttgactgaaaaaagattttctcccgtcacagagtcagggagaccatgcggcgcctccaaggaggttcttcgtttccgcgtctcttctcgccaggagttcgttttctgcgtagatgcagaggaaaggacgctggaccggaaccggatgagctactgcggcgttcctcgcgctgtgtatctatagacggcgctctgcgtctgtctcgccttcttcttctttcttgcgcctcgctctgctcggaaagcggcatcagagtgtcgacagggcgccggaaacagatgcttgtccgctgcatgcaacaacgcaaa

SEQ ID NO: 1478 - DNA, 2809 bp, Toxoplasma gondii
  source 1..2809: mol_type = genomic DNA
ccccgttcgtcgtcaaattgcattattctcttgtgctgcaaacagagaagaaactgtgcgtgcggccagctcagccatttgcttcatactttgacacacacataacattcagcgcttgggacggctgcggcaaaggctaactctaagcgactatgatttaccttttcagcatcggagaggcatgcctcagcattttgtagatcatgggtgagcttcattacgcaaacgcacaaacagcttacgaacgccaacatgaaagcgctgataaacgccagaatgcgtgggatgctcctgaagtgtatctaaacgttagagggtgtcttccgaacatatagagacaaggaagccaccatatcctcagtacaaagccggcgacgatgaatcgcgtcgctagagaactgactcatatgatggtgcccttggcttcctgttacacgcagaaatcacttgtgcgagttcagtcgccaattgggtggcgagtcgctgcctacctccgagcatgcggcaacaaaagccgtcgtatccaaatttaccccttgcagtttgcgggagagaagaaagtcttccagggtttgcggccacattttcctgtagcagtgcgcttgaggtcggaatgaagcagctgccgcgacagcacgatggttttcgatttggtggctcggcactgactgccataaaccaagcaaacccggaggctaaatttgtacccagcaaaacttcaattttgaccaggctgaccggttgcccacaaattcgaccccgtagctgtccccactatggtcatttattattgctgcacctctgactaacgttgagtctgtgcttcaatgatgatattcgaacagacacaaatcgccaagcggcctttaatctgattcgggtcggaaggaggccgagtccagcatgtgcttggatcgagcagagcagaccagatatgatgcctgcgacgtcggatgttgtaaaggaacactcccgcaaggacaatctctgtcacactttttacgtcgtgcgcgcaggacggcggtgggttcacactgcgtgagagccggtgaagaggctgttcggcagatgcccgggggcgctgggcagccacgcatacctagacaaaaatcaagaggatctccggagacccggatatttagtaggtcgcaatttcacctattgattgactgaaaatgagtactgtttcccctgctctgcagggcaaacgggcatgcgtgcttcctcgccctcagcctcttctacctcttagtgccacgagagacaagccgacgagcggacagtcttttcttgtacagacacccggcagtacatgaccaggtgactgaatctgctccaccgagatatgccactgtcggtaagacttcgtagaaaagccagcgaccgacacgcgtggagacacaacgaaccttgaacggtgtggccactcggttgtcccactacttccagccacactgtcgatggaaaggaacgccgactggcactctggccaacaggattagggggggcataggcccattacgccttttcaccgaaggaaatcaatgtctatgtacatcaagagggtctcttacaatgcccgacttgttcccgcttatccacagcctaacattcggatgtggccatgcctcggggctgtctcgagttcggaaatccagttcgtgcttgcatgcagatcggtcttgcgcttgagaaaacgttgtcgcctgcgacatcgcgtcgcgcacgtgggggcgcacccatcgtcgggattcggtttcgggcttttcgccaccttattgtgtgctttgttgccaccgacctgtgtggcacgtttggtagccttcttggaattcagccaaacttatctcgagtttcgtccggagaatgccaacgagtggagaactgagacctgtgtcccctcgtattagcggtgtcttgtcgggaggttcaaccgctcgcggccccgtccagctgcagacgactcagtggttccgatgatggcacactcgacgcaggtgaacgcgtgcatcgatcacgcttttccatgtccagaagagctgcttttttcgcaccagagtcagttgctccctctaatcacactttactcatcggttgtttcgactccgacgtttatgattaccttctccagacctccctttacgtggctagccgtcgagttgcccagagataccgaaacttcgtccgataccgaccagtgattccgaagagatgaattcgtggcgagtagtggcagtctcttgatctaaagttcagaaatcggagggaaatgagcaacttgacgttttcacattccagtttccgccagtgcacgtacttctgctcacggcaaagactcatcatctcttacctgaagcttgcggacgacgtcgccgccgacaatcttaagtggacaacgacattttttgcaagccccgttgagtggtttccttcgtcctctggtcccgtctttcggctacaggatgaatcttggtgcagctggcctgcttttaagctgcgcaattctgttcccactcctggccagctagtgcacgagtgtctcctggccgcagcagggagcgaggtcaagatttttttccctccagaaattctgagcgccgggttcttctctcacccaccagtggcttcatttgcttaccgttttcaggacttccatgggcggcaagggaccgagcacccaacagaacaggagtcccctcgtttctgagtgaggtcactcacgcttcagtcagcagtttttcccagcgtgtcttcttccacggcgaccaattcattgcgacgatatgcgtcttccaggatgtgacaacaa

SEQ ID NO: 1479 - DNA, 2921 bp, Toxoplasma gondii
  source 1..2921: mol_type = genomic DNA
tttccagttggagctgaagctgttctgtctcggattcgatcgaaatggaagtcgacttcttgccctccaccacggcaactccagctgacgcgagcgtggcaggtaactgcaggagaacgtggaggggcagatgtgtatccttcaggctaccgccaggcaattggctgtgctggagaaacgaaagatacctcatcaggcagtactccggagcagtcaaaacggggatttggagaagaggaggcgtccgtttgaggtccttagttaggtctccacttgcgagcgtcccgccatcactatgtgcagcagcttctctctgcagagcgtcgtcgatgtgaagaggcgggacacctcgcagctcgcggagcaaggcttctctttcatgatgccaccgtcgtgcatctttgtcacaacgcagcgacgcagagagttgaagagagtggcgcacggctcccgtatccagaaaagagctgagagcgggatagacttcctgctcatcttcgtgacgcgacaacttcacggggtagtccccgctcaagccagccacaggtaccagggacgcctgaaagcgatcttctgtcgacgacggttgtggctgttgagatgctgaatagggcgcagaagtagcacatccgaaactatctagcggcccgccgtagagccgcgcttggaaaactctctcataccgatgtatcactccttctacatctggccgggtgtgccgagagcgtgacaatgaggcgtgatatccatacgctgctggtaacgttagctgcaccttgggcttgtttaccagtggtgggcgcttaggatgcatttcagtcaaatccccatatgcccctaaacccggtgcgtttcgcgagccacctcctccggaagggatggaatttcgcacacagtttctgagagaatcagcatcattgtacaggcaagaaagaactggtggagcagaaatgtttctgagactacatactccagtatttcgcgccgacagagatgccaagtctattgtgggggcgacagggagtggcggtgtggacagagcaagtggctggggggagactgctacagggaccggcattatccctacacggaacacgcctcaaaacaacaaaaaatatagcgaacaaaacgcgcaaggcaaattccagaagagagtgtcgctttttcttccaaaacaagcaaatcaactgcttctccgttcgaaaggagtgccgcgatttttcgatgtcgaggaatgaaaagatgtgcagcaacaaagaaatagcgttgtttttctcttgaaacgcatgtgcaattaaacggcagaagttgtgttttcgacgttgcaaataatgaaatgtcgactggcagcaggacacgccctggttctcatgataccggttttccttccatttttaactggaccgaagtgtggcaacacatcccctgaagaaggaagtgtcaaatatgtctctaaagacgtcccgacagacgaacggaacgcaaggaaaaagcacagtaaactggtgaatcgtcagttggcggctcgcagatagcgacacaggccaattccgaaacggggttttcaacgaggaaacgattacagaagagtggctcggatgaccctttttctcactccgacccggtgacccgatttggatgcgagcgatccaaggggcgtggcaatcgacgctgctacactacaagaaagcggctgacgaactctcttgttagtgactaacgtcccaccatttttttcgctgtcatgattcttcttcactgcgaaaggagacctctccatatcggtgtcgagtcagtcgtttggcgtacacctgcatggtccaggagcgcaaacaccctaacccacagccctggcggttcatcgactgcagactggatcggagtcagctgacctggcaagacaatgaggaagcctcgcaaaggactggaaactagataagatccctgaacgtccagtcgttggggggtgagttccccgattgactttgatcgaaaacagttggcaacaagtggtgacggggcgatcaccaccgtcgagttaaatcttccattttgcctgctcctgatccgagttgctctacaaattcgttccgcggtgaaacagactcttctacggcagaactttgtattttagcttcccagagtctatgtgcttcctagatgcacctaaaaatcccaacgtaagcgatgaaattggcgcagtgcatgtcgatacggtccagcatataccagggtcaataatatgtcaactagcggcagcgccagtccggaaaaacggttgcactacaatttcaactccgctattaccgctactggtggagtttatagcatcggctgcagcgtctgtagcctctggcaaaacagcgaataccaattgcccaaaagttttttacgcgaatcatacgtggagacgcagtgaaacatcctcgttcgcaaacaactgcacggcgtacccccttatttgatcgataggtctaatatgcgcgtttccatgtgcttgttttcttcaccctaacacgttctatgctgttgtatctgtattatcacttgctgacgtagcgttatcttgaatacaccagactgccacactggccttgttgacagcaagcttcgggcggcgacactcatcggtaaatgctgcgccaaaatgcatcatgctggcatcgccgagccgaatgcgaactagcttatttcgttatgatcgcgcctgcaccagtcgtcgattgtgctcgtatgaaaccgccagcataggcggccctgcagtagccatggctaccagcgaatggttggtaaacctaaggcaaacagccttcacacttctgcttagctgtgcgttgtcgatattctctgcagattgttttgtcacctcttgcacagtcctctataacgacgtctgctgacgtattctagtaatagtatca

SEQ ID NO: 1480 - DNA, 3259 bp, Toxoplasma gondii
  source 1..3259: mol_type = genomic DNA
tgtcgttttcccgcaagctgaaatgcaaagatgcaaatgacaagtgtttctttcataggggccttgggcggctggcgaacaagacggtgtgctggacatgcagggttttccccaggttttgcgtcacgttcgattttgagcctgactggctttcggggtgcgcttctgtttctgtttgagtggaaaggcgatcacgcaatgagggggggagtgcgcgggcgtccatctggagagagtctaaaagtgcctcagtgcaaagtccactgtttgccgcctggggaaaaatttcctctttggggtcttcaaaagtccgttatcggtggcggtttcgcgtgcgtcgggggtccacagtcttgcgccacgcgagtccgtacctctggaaatgttcgtgtatttcccggggaaaactagacaaaagactgccgatggagggcaacttttttgataggcggatcccgtcaaagaagttacaaaggaaagaaccacgtttcgaaaagcaccctagttccggcgcagaagtcgaatgccggctgatcactttcccatgctacccggaaagaattcgatgccaagccactcaaggtcctcggactgtatcagcacctacatgtcggctcactgatcccttgttactgtacaagattccgtttcgaacggtagttcagcgtcagatgcaatttgtgagagcatcggtacggtcccgtttttacagacacgcggtgcactcgctcgtgacgacactttccaaacagccacagcaatttctgctgcttctttcaaacggaaaacagccgggacatgttcgcagctccgaggcggtaagcgacgcttcttcccattccccctgctctcgtgagtgaggcgtcaacttcacttctggcaaatgaactaggaaagctgtgtaaggctccggacttcagaacgatttacctcgtgctcgaaaggaacttccacgctgacctgtagctgccccatcagcaggaaagggggcgtcatttgactttatagagttcccaggcaaaaacccccgagggcggttcacagccgaggtggacgaagcaaacttgagcactttgtttctcagaaaccatgcaataggcttgtgatctttgaggttctccatttgttgagacgaaaaacagtctgcatatcccccgggaagtattatcgtctacgggcactctcttcctgccgagtgaacacaggttttgaggcagcaaaccagaagaacttctcagtgtctccgattgtgacgcgttgttctagctaaaaatggcgccacaaagttcaccgccacaacattgttgcgctgaggggaactgtatccgcctcgatggccaccttctgatccaaattcatccggagctgtggtgttaggtttcgtgtgactttttggaccagcgaagcgccacaggccattcgctggtcccagcctctctccgttcgcgccttctgctctgcgtctatgctaggctcagatggtgcccattcttctgcctgcacggaacgtggttgtctgcccgttttcccagaagtggtggcgtgctttttgtgaagccgagaatcaacgtaaatgcacagtctcacgctccttattcgtgttcgtgtgccaagttccgacgccgcctggcaaagtaggaaagggcgcctagaaaaaggcaccggtgaaactctccgtgcacatttccagtttgaccctcacactcgcttcttcggcatcacctatcaaaaacatgaagttcatcgccaggccatgtcctggtgctgccatattacgagtaggtggtgtctcggcaccaatgatcggcgatccagaactggaaaactcacgtccaatagattgttctcaaatcgtccactgccgactttgtactccgggctcccgacaggactaaagtcgatctattggaaagttccctcttgggtgtgtctcggtgtctctgctggaaaactggactctggaagttcgggagggagagaggtagctcttttgtgaaggcacctctgagggactgagtagcagcagagagggaggagggtagtaggccaagaaactgacatcagaatggaggaaatgtgtctttctgacgacggggagccggcactttcgcctggatagaacgaaagaacgaactcgacccaataaacacaccagaaagaagaaaaatgcaagaaaaagaggcgaaggcagcctctaggagtgggtgccgagagactgcgcgctggcactagagagatgggtggaattccgagtctccctaacggcacctactgcctttttacctcaggttcgctctgcaatcttttgcatgctctcttctgctcgtttgtcgcgtttgttttcccctcccgagttcgtcttacctccgtgtttcttctcctctttgtcgacgaagaacggttgcaaaagtcgccctcctccctcgttttcttgccggactggacaggctcctcgcacgcgcgaggtcactttttaggggaaacttttcctgtcaaccggaatcgcgcacgacggttctgaagagggagattgcagtgaaacacagagatctacagagccttcctcttcatgtttccggtccgttctctgtctttcccggacatcaaatatcgccccccatgttgcgggtctcccttttgtgtcttgcagcgcaagcgttttcttttgttcgcgagagcatctccacagttgcgtctttgcttcctttccattcttgcccgcgtcggtttgcatttcgagaagcttcactgttcccggtttctctccaggtttccccaaggcgtctgtcccttctctccgccgcgacggcacgcgcggcatgtgagaaagccttcgcatccggtgtctgtccgccttttcccctgatattctttgtccgtttcattctcaaaaaagagcgctttctccttttcagcggctctttattccatctgaacggggacgttgcaccgcgagacccaagccgcaaacgctcgaaaacgaacgcgagcgggagcgcgctcaagccttctcgtttttccccgtttctgccgtctcgttccctccctgtcgtctaaagagccctctgcgttttctcccgtctgcgttaagccacgtatctccttcttttttttgctcatcacacttccccttgtgcccgccatatttgccgggtgtttccgccttttctccagactctgtttgctgctgttctcgcggctcgttgcttccacttcttgcttccacttctcgcttcctttctctcctctcccgtcatca

SEQ ID NO: 1481 - DNA, 2529 bp, Toxoplasma gondii
  source 1..2529: mol_type = genomic DNA
ccgatctcttctcaagacacacgggcgttgaagcttaccattctggaaatacgcgagaaggcggctgagggccgcgttcgtcggcaagcagtcatccgcgaagaaacggagagctcgcagaaatcgacatttcttgcatgtcgacagattcgcctccttctcctcgttgtcctttgagaagtctcgctcttcatcgtgctccaccctgtcgcggcgttctgccggtggctggcggagacggcctttcggggactcttgcactcgacctgcttcgctccccattccgggacgccgccgcatcgactgattcgtctgcccgctgccggccttctctctcactcatcgacaccagaaaagaaactcgatacgcttcttgggctcatatgtaagcagcaaaaatgggcatttatacatacacgtcgaaagccacctagagaaacatcctcagagcagaaaagagtataatatccatttgcacagtacgtatacataaaatatgtaccaattcatatatatatatgtatatatatgtgtatacatacttatgtgtatatacgtgtatttggatacgtagatatatgtgtcgtcgtttttaggactgctgttcttcgatccacgcttctctgtctcccgcttgaagggcatgccgaggagtcaccacacagcggtcgactacgggcgttgtcgttttatttgcgcaacgaagaggcgaagcaaatgcagagggcttcttcagaagacttaaagagagaggttttcaaaaaaaaagtcttctcttggtggagcgaatccggacatcgttggccaaggcagagacagcgtcagaggaagacaccgcaaagagaaggcggaagggaggccgaaaaagagagagaggagatggacagagcgaagacgaggagatacggagaaaaagaggagagagaaaaagaggagacacagagaagcgatagagagagacacagagaggcgatagagaggagggaaagagaaagagggacaggaaaaggccggaaatgcacacacagatgcagagagaggaaaaacgaaagaggcaaaagctggacagatcgagaaaaccggagaagaaggaagaagcgccggacagagggaaatgccggtgacagaacacaacaaaagaggaccctttcgtttcgccgtgaaaaagccgactagctgcggatctccgagtgttcattcttgtacccttcgagacaattaaaatgagagagaaaaaggcggaaaacgagaagagaaaggacgttgcggcagaaaacggaagcgtttctttcctcgctattgtttctctggacactcgagacagctgccgattcaggttcaagtgaactatacgctgcatgcgactatcgattggtacgacggctgcagacgcgaaagctgcagtttcttcttcgccttttcctctggactgtttcgcttcctgtttgaaagcgagtcattttccttctccctctttctgtgtctctttccttcttcttccctcaactcttgacagtaccgaggcggcttgcatgcatgcgctcgcgaatttttctcgcgttgttgagactttgtcttctgcaggtttttccctccgcagtgtttccccatttgtcccctctgctgtctcctccttcagttgacttctttcatcgcattcgccttcaagtgtctggctcctcctccttctgctctgttcgtctctcgcgcctcttatctccctgccgcttcctcacttttcaggtctccagtgtccctatttttcggctctcgccttttcaagagcctcgacagtcgtcgttcctgcgagctttctgtcattttaaagaggaaccactcgttcttttcagttctttcccttcgtttggtcctcgactcttctcgcttctcctttcctcctcccaggtgagccgtgtttcttcgttcttcctgtggtgaggttgagtatccacttttctttctcttttactgggaagtcagagacagagagaacagggaacatccggtagacgaatcagcagagtccgtatggccctcccgagtccctcttctcttcctagattacttttcttctcatcttctcttttccacttcgtctcctaccgttttgcctctctttgtccattccttgcggagactctacgcaacctgtagaggcgccgccgccgcagaacggccttcctggctgcagtcgttcgtttcggacctccgcatataaggtggacgacaaaacactacagaaagaacggggatggacttccggagcgcttcggcagaccactgcctctgagatgacctctctttctcttctttcgagagacagaatatcgcagagtacaaaacgaggggatgcttcctcacgcgcgatccgagccttgcctcgcgaatgacggaggggctttctgtgagagagattgagcccccaatttcgctccacgtgcatgcagtcacgcgccccatatactcccatgcggagaagggagaaagccagaactaggtaaggaggactcgcatctcctttctgaaaaa

SEQ ID NO: 1482 - DNA, 2502 bp, Toxoplasma gondii
  source 1..2502: mol_type = genomic DNA
gcgcttcctcagggacttggtaattcgaagtaaaaatcacgcatgcacagagcgcggagacttgctgtgatggcgccaggaaaggtgtcttgcagattggagtgtctcatagaattcttctattcttacagatgttttgctcaaagtgtgaaaacgacgcgtcttacaacgattgttcctctgggtgacagagaattttttggcttccaaggacgacatacagtgccagtcgggcgacggctcctgcaggactgaaaacgtacttgttttcccgcagtcgccatctgaagagcacttttcggtttaaattcagttggctggtctgtctgacactcacgtagcgcgtgcgacttcaactgcttccagaaccggacctgaaaaaagcctctttcaaaacgttacttcctaataaaaatagaatctttcgtcaggcgacatctcctacctgcagcagtgtcgcgcgcagcctttccttgctcttagattacaagatctgtgtattcgaaaaagactcgaaacacacccggcagcccttgggtacgaagaaattgccatttatcgtccgtgcgaacgcgcgggcaaccagatcacaagggtcacagctaacgcaggtgtattccaggtggatttcgtggaagacatgaactgaaaacaccgtccgtgtgttgagcatgccgttttccgcgtgaagacatttggtttttttcgggacgacagtcagcatccggtaaaagcgttttttcttcggttactggttacccactgtgtgccttttgtcggcgtcggatctcgattgtgttgtggcgcatctacagtctttccccctggcgtgagagtgtcatttctccacgactgaatcctgttggcgaagtgaccgaagtacgtttcatgggcatctagttggtggaagctcagaggcatcaagcctgaaatcgggcggtacaagaattcaaacctgacacaaatgaatcggttcgttagatacgggggggatgacttctctgtcctcacacctagtacgactgcactgattaaaaaaggccagtgtgacagttgtttattgcatctcaacgtcgaagtgtggtctctctgttctaagtgtgtctaggtgccgagtttttcgaaggttgtggcgacctgcttgtgtggaaagcgtctctccggacacctgttgtcggctgcactgagcctgtaggctttgttcttatcctacacgctccttagcttagtcagtgttgctgtgttgtcagaatcttttctggatttcacagcacacttcctctgcggcaagccctgttttgtcttgaggaacactcttgatgcagaccactaagaagaacgtggaaagcttcgtactccaataatttcgggtatcaaaatagctttcagacatacttagaagcacctttttgtgcacttgctagcgttcaacttttattaaggagagatgtaccagcagaatggggatctaggatgttacctgctacaacggcctagccatataggcacctaatcaactgaaaatttcagtacctgtgggaagaggaatgacagttgtcacagctgagagtacgttcgtgtatcgacttccagacggaaaggccgaaggattctagaagaaccttcgacactgtgcgtaacatcccccgaggtcgtgttgtgtgtcgcctttctcctccccagctgtgaacgacgaccgaagggcgacatcctttattacggagagtacgcaaaaagaagccgcacaaagtgtctgctctgctctcggtcgctcacacgttgttgttgcgtggtacagacttgtggagttccagtccagcctccacgtgaagaagtcgataggttgcggcaacacaactcaccggaaagaacagattcccattttcgagtcctctcgcgtgattcctgcactcgccgcagtgtcacactgaacatgattgctaaacttttcgccactgttgtttcacgtaaggcactactgagagttttctgtctttgcgcgattcgtttcactgcctcgtttctcgccgctgccttcctcgcttttctgatctttctgttccgactgtcttttgtttgctagttcctcttcctgagggatcccttgagatccgtctgtctcgactctcgtctctgcggctcgcacaaacgaaccacgacgaacagccacgtttcgactgcaggagtgggggtggtttttccccgagtaaaacacctgtttccagcggtgctttcgtctgccaagttgaggacgagttcccaggtctttcggattctgtctcagcaagttttcgcggaacttccttgcgcgttcgtccgcgacttggtctgcgtcgtgcgtttgctgtcgtcgctccgaaaaggcagccccgctgctcgtttctgcatgtcgctctttttccacatccccggtcgctggcgctggcgcgttttcctcgcgaacctttcgcctggtccttctcgggtcgattggacccgcaattctgcaagtttcgtccttta

SEQ ID NO: 1483 - DNA, 4657 bp, Toxoplasma gondii
  source 1..4657: mol_type = genomic DNA
actctctacgcattttctgctgctggaagagggagctctgtttcgccttgctcttggacagagttggggacgcggttgtctcttcttgcttgcccctctgccgccactttgagtctttgaaggcggacaaaagaacgctagaccgtttatcttttcttttgggggcgactcagaagctgcactacgaaactgttgccccattgatcatggacccgtttgtatttatgttttagaccaggtctcactccaaaagcctttgcgccgagcgaaagagagacagagagaaaagagcgaaacagaacagcaggcggcttcagagctaatctggggcgtcaaggaacgtgcggcgccgcgtcgaaaggccatggtttcacccggagttttctatgcgagtacctttttgcaaaaacggaaaccaatgtgcgttggtttcgaaatctccacttgtatgaatgcgtgtacgcggcgagttccagagacatggagaagtcgtagaaaagtcaaaagagtagagagacggatggggacagttcgctcggcgcagccgtccgtcctttgttgaaagtctctgcttcttctcgccggtgcagatccgctgatggccgcggacgagaccgcattccgaactgtgcagtcaaaggcgtccaagtggagatctgcatctctgcatgcagctgcgtttgcagaacgtcgtacgcgtgcttctctctgcagatcttcgcatgtctacaccgctggtttctggaggctagtgtccgtgaacatttgtctatctgtggctttgctcagagcggcgtttcccagtgtctggctctcctctttttccgtttcgttgagatgcgtgtgtactctgtggtgccgggcgcaggacgtcggtgggggaggcccatgcaggttgtgcaggtctggatttcgccttttggagggtgtcgctcctctcgtttcgtctgcaaaggatcagggggactttggccgtctgtttgtcgtttatagacatcgggcagtgcttgtcaagttccctgtatctttgtttagctcactgtgcacttcggtcagaccaactgagttcaccaatatggtactaggaaataggagatcgcggcggcctcgctgacagaaagaaaagacttcacctcagaggaaagcggtgctcgcggtggcggcgaggaacagggagaagaggctacgcaatcgagagatgagtctcgtcttagaaaactgggacgttcgcagcagaaaagagttgaaaacgaacatcacctttctggaacggaatgctcaaggcaacgttacagagaggacgtgagagtcgaaacgaattcggagagtgaacgtacaccttcgtagctgcgtttctttggagatctccaaaatccaggcaggacacagagacgctcgcccattcaggtctgcattcaatattcactgaactattcatcaaaaaagatactcatactccaagcttccacgcacattaataatatctatagatgtatgtacaaatgcagctgcatttgggggtcccatttgagtttttgaattcctgtccttccgtcttttgacgcttccttctcttctccttcctcgttcgttgtgtcgtcaacttccttacaccttcgtttacttttcggtctctacacccctctttcgattccccctctgtgtcgccgttcccttcctgcctttccctctttccttctttctttcccttccgttcatctttcttctctgtcttcgctgcttctcgtgtctctcgtttctctcatttcttctcgcgttcctgctgtctcaagttggccggtttggggacgcgcggcgttgttcgtagggagtgtagggcacataggcgatgcggccggccttcattattcgacagatcgactcctctcgcggttcgttccgcctttctctcggagagtctctctctcgcgcttccgggagagagagaacgtagcgcttccacatttgcttcagcagatgaggcgccctttcttcttcatgctcttccctcggcctccgcccacactgagacagaagcccctcaagaatcggatcagactccctccatccttctcgccttcttctctcctccctagtgcactcgttgtcctctctctcctctcgccctcttctctctcgcaagctgcgcctctcccccgccttcgcctcctctcggcttctcccgcgccgcgctccttcaagaggctgctgtacgcagcgcgcgtcaaacaaccccgcgtcgatcccctcgtggactgcagccgccagcgcttgtcgcccttgttcgtggctcaacatttcccgaatataagccgaaaactcggtgtcgacgcgttggtgcaagaccactccaagctcggaactgcttcgcctgacgcagtgcccatccaccggcggttcgcttcgccctctgccgcgagtgtcgccgccgctttcgctcgcctttctggagtttcttttcggctctcccctctctctgctcgtcgcgagggaccgctgaacccccttggctgtacagccgcctctcctgcgccgtcccctccaggcggcttcgtgcttcgtgtgtatgcggcgagagcggaagacggcaaggaggaccttggacgcgaagagggagaaggagaggcgtggaaatcgaacaagggagacgcagagcgaagagaggatggaacatcgaaaggacaggggaacggggaaagaggtctcctccgaaaaaggcgaggaggaggagcaggtgccgcagaagccatgctcaagaaggagagcaaatagagaggagaaaatggggggggaggggcgagcgggtgagtgaggtggaaagcgacaacgctggcgagagcgagacgtcgaaaaaagagagataagggcaaaggacgaagagaattgcgtcgccacggtgaggggatgactctcgtctacacggagctcgagtccgacatagttgatgggagctaaacgcttggtcttccgccgcttgagagattcttcggaaaaattccagcagtctcaaaaatcgcgacaaagtccttttgaccgctcgaaaaacgctcctctctcaactcaactccccttcctgacttgcgatccgttctgcgcacaggtatacaaatggcctcgaccatatctctctctctctgtcgctatcgatctgtgtagatgtatgcgtatgcgtatgtctatatgttgatatcgacgtagatgtgagcggttaagctacacctctttgtttgcgcaaaattgtctacgaaggcgcttgcgctcctgtgtgaacatgtatgttttcgttggcgggtgtcgaaaactcgacggagctagctcgctagcctgattgcagtgcatttagagactctcaaagcattcttgttgcgatacccaagtctcagtgtccctcctggccgctcgtcgtttttttgagaggagaaggcgcggggacggacgtcgttgtcgatactcgagtacgcgcagtggcaatttcgagttcctctttacggtttcggcggggccttcctttcgctacgttttctgtcgtgatcgagactgttgacgcgtttcaaacgagcagatgcacaaatgcatttctgcactctcttctcttcgcctgtgaaacttcggtgccgatacacaaggcagagtgtcttgccgctcttccgagagcaggccagagcgtcggagtagagggccgctcttctccgttccttcttcgattctcctctgcgcgtccctccggacagaaccgttgttcttctccgttccttcttcgcttctcctctgcgcgtccctccggacagaaccgttgttattctccgttccttcttcgcttctcctctgcgcgtccctccgagacgcccccgtcacctaagagcactcggcgcgctcggcgtcagaccgggaaggggaagcgaggaagccgcctggagtctgagttcttcctctcggtctctccagaaagcggcgcgagaagagaacttgaaaacgcgctgtgcttcctctctgcaagtccgaactctcctctgaggcgccgcctctctttgctggggggagggggggggcccacaagcgctggcaccagatgcgcgaaagtttgggcgggggggggggggggccaaggcctccggaggggacgaagcaggagaaatagacgagaaaagaacatcacaccgtgcgttctctgttattctccgaagcgactcctgtttcgctttggcctcggacttcccagctttaaaagagcgttccttcctggacgaacaaaaacgccgttccttcgcgctctccaggaacagctccccctccaggaggaggatcgtgcagcagctgtttgagttgtcgagacagccgcgcgcgtcttgccgccgcattgcctgcgtttcttttttttcagtgcaaacggcgcctcgtccggaggataaaacatcggatttctctccattcagaattaaaagacgaaaaacaaagcgcggacggggccccactcccagagaaacttccaccgcccgttagcgaactgagaaccagccgcagttgaggcgctccccaacaatgtacgccagcgctcaaacgcaccgcgcggttgctaccatgtctgcgtatcttcgcttttccgctggaccttagcagcatacccgtgtcttcttttcttctctccacctaaaaacca

SEQ ID NO: 1484 - DNA, 1594 bp, Toxoplasma gondii
  source 1..1594: mol_type = genomic DNA
ttcgttttcacaacagggatcaccaacggtcaggagcaaagctagcgcgtgaggaagggcaagactatccactacataattctaggagaccttaacatctggcgaagcagcagatgccaggtagttattctgtgtaaaccgatctaaaatcgtgacggtgtcttgtttccactgaacttcatatctttgagtaagtggaatatacagttctggatcgcagatcacgtgtacatttaccggttagatgccagtatggtcagcccagacatgcaacactagtcagacacaactaaagtcgttgcatattgaaactacatactgatactacctcagtgttacttacggtagagagtcagagcaatcactcggttcactagttgctggtggcctgtcaacaaaaccgtgccttgtgcaaacggcaaaaagcgtgccgcggggaaagtagcaagcgtgtcagagtgtcacatcttgataagctaccgcggacgctgtgtcctgacgacgcctaccgttattttatttagaagaagcgttagagtggggagggtccctcagaagttcgatttggagttggacagcaacacgcgaataagaaacccaagcgccttaccggttttccaccaagctggctaatctcgcaagcccttgtggtgtcttctggaggcacccgatcacccaaaaagcctagaaaagtggcaggttcgcttttggatcccattttctcgagaaaggggcggcaacttttcttcggttgaactgagagctgccggcaagagacttgcaggacgaagaaccgagaaagggaggcgtttttggcgtagagcgaagatcccctgtttgcaattgattggtagtcgtttttttcggacgttgtctacaggatgatggaaaaaaagatcattactgtttaactgtgagagttgggaaaatcacagataacacgctttcgctgtgcgacaaaataggcaagtcttcgcagcactgctcgacaccagacatccacgcctcacacatccacacgactgattatgtcggatgcaaagttcccgtaccgaaaagttgtttttgccttctcaccagtacagttgcagaggcagctgtaacaaccgcatgcttcacaaaaaaagaagagtgcatgcgcatgctttaccttcttcgctcccgtgacttatcggcgcaccatatgggatacacttagaccccgcgaaaaccaacacaaaacatttttgagccgcgctcgtttctctggaaatagaatgttaaatgcatgaacttgtgaacaggagtcaaaattacacttatgtcaaggtttctggtcccggcgtggaatgcggcacgttcagagaatcgaaagaaccagggacaaaccgttgacaatttgcgttgcgccctgtggtcgctgtacgctaactcttgccagtttcattgacagggcagtgccgctttcgcgcggtgttatgcggtgatctttttcaccctttctcacttttgcagcattcgccatgcaatttgtcgtaaataccagcgcagcgaatggactgaaacacaactctgattgtccattaaacatttacagtatctcacgggcacaata

SEQ ID NO: 1485 - DNA, 1873 bp, Toxoplasma gondii
  source 1..1873: mol_type = genomic DNA
tttttctgatcagcgactgagcgatgtacaaccgaacatgcaacgtttctaatcttataagcagccatcgatttttcgctcggaacgacagaagttaacgatgtactggtttgtgccttagataactacgatgcagttccgcttccaacgaaacatcatgccattttcaaagccatttaacacaggcacgaatatatagctgtatcttcagcttgcgaggcaattgacccaccgtgtactctgcacgaatgaactcacagaaaggcgaaatcagctgtcacgcaccagacataagacacattacgcgggttttcacccataatgaactgttccgacctcccatgtgtgactcatggtgcatttccccaaatgtactctactaccccactgaagacacgaaatgggcaaaaatgttttacaatattaattgcgcagctacaggacgtaaatcgtgggaaaaggtgtggtgtttactcttgaagtgcactggagcgcgctggagcactggtgcgtgctggagcactggtggagaccattgggtcactgggcacgatagccccttcattaggagtgcaacaacagaagatgtctgagaaggcactccgtttttgcgaccgggatctgaaaacaatgttatacacatgtgtaacactgaactatttcaagagggtattctacgcattatctctacacgttgctgcagtgcacgagtcttccaaaaacttccaatgccaagactcactcttcaatgggtttggacgccattttgcttcacgttagggaaaagttggtaggcggtaagcaacctctgcacggaaacaacaagccacgcaaaaacaccactggtacagcaacatgggtaacggacaacacgacctggacacaaccacggccacttatatctccccgacgaacgaggacgaagtatctctgagccaaagtccgtatacacctatgtatatagagagaagtaaagccagaagctgtaacaaatactgtagtgtcctcggatggtccgtgccgcgacaaggccatgcaagcggatgcatgcatgtgtttactatgcgtgtggaaatttgcgacacggacgaactagatatagcggcgccgccagtggaattacgaaggcattcggcacacaatgacatcgagttcagtacaaacgcgcgtggccaagcagtgcctagtcgggacaaaaaatgaggcaggaggaatgcgtgtagtgcccctccagcggggaaaatggaaacatcgggatagtgacgagacttgattcggtgcaatggaatgcttatggacggtgacatgcacgcgacaatcactgggccatggagtgcggaactttacctcccgcgataagggcaatcgacagagaggcacggagttgggtcgagagaacaggcgtcctgctttgccacagacggggtcaaacgaaaacgggactgggaaagagtggtaccagcgcacactgcagtttgcttggaacgacggcgcgtcgtagtccaagcgactgtggcgagagcgaagaaagaaaaatatgattcgtcgccttgggcattctcgacgggacatttaccccatgaacattacttggggacgacgcggacgtgggagggacgaaggtggagaagcggacgcagaagcgacaggaagggacgactgtcgccctgcggagacaggaggcgcacaagcacgacaatccgaaattccgaaaataaggcgaaccactgtgttcggcaccgggtccgccgggcaacggcttctgcgagagacaaacgcagccgcgcgagcacccggaaaagcgaaagggtaacccgacaacccgaccgcgagggggaccaggcgggcaccttggaacaggagttgaacggaa

SEQ ID NO: 1486 - DNA, 1274 bp, Toxoplasma gondii
  source 1..1274: mol_type = genomic DNA
atgtctccaggaaggtttctggtatttgacgtatctcctcagacacttagagatagattctccaggacccagaattccctgtttcgttgtctcttctttcaactgtcaattgccacgagcagtgggaagaggtttcatgaactttccccgacggcgctccaatggtggacgaggcgcagagacgggatgtcgcagtcatcaataccacgggtcggctgtggacgcccacaaaagacgagtaagactaatgcggcttccgaagtgaacatcccgtttcgggatcgtgagttcagccttttctttcatgcttgtgagtcttcttactattttgtgttgaattgtatcccgctatgtggcgctagtgcgtataggtcgccttgagtaatatttaacacatgtatcacgaagagcaccacactacgagtaaatgcagtatccgataggaaaattaggagcggttgagaaaggatggtgctcagtattgttattggagtcagatgcagcgcattttcttaccgggattatatttaccgaatgctctctattcgtttagtctaaggcagctatgtctgtgtcaggtacgtctcagtggatttcatacacgtctggaaaaacaccaggattcaggtcaagcttctcgtcgacttggcgttgagctggtttccacacttcggtgttggatgtcagcaagattcaggtgtggggagaaaacatgtgccaaccttttgggcggtgctgcgaccctgcaacgcactgacaaaagccacactgacagtacttctcacgccgttcctttgtccagccctgctgcacacatccgtttttaaaggttccttctggttttcaaaaagtgtcacgtttgtttccctttctccgatgtatctgatctagagggctccgtgattttagaatcagaagtttcaggtatctgaatcccgacgtaaaaaaacaggttctgatttggcgttttccagtttctccgtagcaggcacttcactcggtgaagtcacttgtttccacctcaagggaacccggtccggaaatgctgtcagtacgcttctcctttgccctactgtgggcaacactgtgtctcaaggcacagggtaagactttcgctctgtttaagcctgccatcctgaagtttttcctcagttactggtggttattcttgctgtcctatgatgaacgtccacatgagctcgacagtcgaggagtgcaccagcagaagcaatggagctatgagcaggaattacggatatcctcggagtgactca

SEQ ID NO: 1487 - DNA, 2044 bp, Toxoplasma gondii
  source 1..2044: mol_type = genomic DNA
ccagtttcttgcggacggcggtagagaagcagggaaagaagaggagaggaaagaagaggagagatgagaagagcagcaggaaaaccgggaagggaacgaagatggcagagatgcgaacgacggggaaaagagaaaggagaaaggtccggatctgtctggaatggcccatgccctcctatgtctttcagaccttttgtcgtcgccccacagttctctcggtcgtagtcctcctcttctatctgcaaatcgggaccggcggcgcgcactgctgttgacgggagggcggagcctggggtccccgtgaggcgcatgtacactccacagctttcgcatctctgaggcctttttctgcttccgcttttcctcttccttcgacgctccttggagactcggcgtggacctctcagtctctcgttcgcctcccgatgcaggtgaccgaagaggcggcgcgctcaccgaggcccagcggggaagccagagagaagccgccttcagaggaggtggagacgaacgcggaggcggtagactctccctcgctatgtgaagggaaatccgcggggaacatggcttggtccgccgagttggagacgcagacactctcgagaaaatgcttgggtcccctggaggaagaaggagaatggaaagagaaaagaggacgacagcgaacactcgaagcaactctgctgtagtccgcctgccgccagcccccgtcgcctcccctccacgaaggccaggtgtacgtacacctgaactcggagtctggagcgcgttcatcatggttgagggcaaagttgagaggccgctgtcaacgtcgacattgaagcgcagcttccgcgtcttgcctcttttccttcgcgaattctgcctctccaggcgggcatctccggttctgacgcgtgatggacgaaggccgaactccaccgccttctctgccccagagtcagcctcccgcagtccggtgtacgtacacaccgcacggagcgggctgagagagggagtcgtcggtgggaagagacagctaaagcggatacgaaaaaccgtcgttttctcctacgtcttccgcagaaaaagcgaccaaaaggagaatgagaagaaggaaacatgacccgtctttctccgttcacaggtcttcgtggttttctcttggcgctcaacgcggccccggccgctcctcatctgccccgggagacacctctccatgtctctgagcctctcgcaatatgttttctccgttcttcgacgcgaatcctgcagaagtgaagaacaggcgcgcgaaaagccgcgcggacctctgtcgcctctttctccaggtcgatcttctcgaacgccctctgagaggagacgggacttggggagtcgaggctgcatgcagaaaaagattctgtcatgcacacctacgattgttgtgccaggcatctcgacagtgtcttcttgcgcgctgcacacaccgtctcctccgtcgtctctcctctaaaattttctcttttccagcaaatgggcaccttcttgtttcccctctggaccctcccccgcgaagaaacctcttgcggagcttgtggctagtcgaccggcaggcgagcggcgccgtcttgccgtcctctgcatctctccacgagctttccttccttccaccgtccacttgttgctgtttcctctcctctttctcttctctcctgtctggcacaagtcgacgcatgtggacttgtcagcggcgcatgcaccatcctagtggcgccctctccgctctctgtctgctgtttcctgtccgctcctctcgcttccggccgtcggtttgttgactcttgactctcgtccgctgaggcatgaatgcggcatcgcacacagttgaccgaggcagccgaggtgcagacgagcgaaccttggaaggatcgcgtcgcctgacagtctgtccgagcccagcgcgctgcgaggccaggagagcggaacacagcgagagagacaaccagttcttcaccgccttgctccgttcctcgaaagctttccagttactctttcaaagagatcttctccctcgcggccgcga

SEQ ID NO: 1488 - DNA, 2378 bp, Toxoplasma gondii
  source 1..2378: mol_type = genomic DNA
ctgtcccgtcacgccggtcaaggtgacgatctgtttcttggttgcctggggtgcttcggcgaagacggccgagaagcggtcgcgagtgcgggtcctggcgaactgtccactgaactgcggtccgccgttcgtctccgggaggcggtctgcctcagtctgcaagtctccagatggagcgcgcgcgcgctggatcgtcgtctccctccgagctcgccgcgcacggggagtgtacatacacaacgcacagccgccaggttctcggccgggcgggagctgcaccgttttttcgcgactgccgagagactctgtgcacgctgcttcatttttttgtttctttttcttgtctcttgtttgcacggaccttgttcagtcgtgcatgcgttgcgttctctctctctctctcgtttcgcgactccgcgtcttcgcatgcgcgctcttgtgcgcactcttctctctggcgacgtttctggaggcgccgctctcctggagagcggtgccttgtcttgttcacgcctctcttcgacgcgcttgttttttacttttttgcttgcaaagggtgcagcggagagcggggcgcgcgggagagaaggtggagtcaccaggggtgtgtttcctgtcgtcttcacgcacgtgtgatctttcgagtggcgacgggatgcgcctcgccgctcgcgcctcttgcgtgcatcttccacaactgacctccacatgcccgggaaatgctcgcaaagaaaagagagaaaacgaccagaaacgaggcaaacggaggcaaacggagacgcgcgagcgactgcggacgcgtccagcctgtcgtcctgcggggcgaggcgacgagcagatgtgcagactcgccaacattttcgactttgtcagagcaaaggttggagaactcaggaatcccacactgtttatcttcagtcaaaacgccgcacaggagtcgacgaagcccctggcaaacatcccacagttcgaaagcaaatcgcaaaaacatgcttcagttcaccacaactgacgacacacagggttcagtgtttagaacaaaacactctacatatttaggtatatatacacatattcatgcacatgcatgatgcagggtataaaataacgttttctatacatatatacatatatgtacgattatacatatatatatatatatatatatatatgtacgatatggggttttacggtctaggccgcactctggcggttcggtttgagtgcatgcatgtggacgccgcagaagttttggtgcggacggcgcgacagataatttccctgaagcactgaacctctttcctcctccggagcccggcaggtgatgaactggacgctggagcgctcaaggtttttgctgcgctggtgcggaaagtcttttgttcttgagtgacttttcaccgaggaggttgtgagtgttaaggcgctgcagctttgtacgtggcggaacatccccgacgatgaatttcgcttttcttttgtagtccggttgtcgctgcggccgtcgcacatcccagctgattcacacgggatgtctgcttcacgcttgtcctcgctgtcaggacgtcagtccttggagccaaagacagggtgaacggcgggtgagatgaggcaaagccgtgcatgtgaggctgcaggggggtgttggagaaaactgcaaccgcggacatcgagatttcgctttttaactgcagaaaacgcaatttccgcctcactattacactggatgcctgctgatgcggggcggatttcaggcaaagtcgttttttccgcacatgcacgcggcatcgatgccaaagtgccgtggctagctagagcgaactgtgtgcgcatggataaatacgtatacaggtgtgtaaatgttggcaggggtcctactgccatttcgctttctttcgactctgctgcggattctggagtttcaaaacgaattctttctcgtcgcctttccctgaaaaccgagaaaagtctgtttgcaaagggagattcaagagtgcacggatcttgtctggcgaggtccagctcgcggacgagccttcctcgctttctgtctcatcccggggtgtctcttccatcttttcctcgtttttttctgaaagtgcttgcctgcgagagccactcagcagtaagagcggcctaattgctgccctttgcttgccggcgagacagaaaagccgatgtctcgcatggtcctcgcccaggaacgaggctatagatacaagacactcaaaagacccaggtgtgtgcaggcttggactcaaaagacttgggtgcatgtacactcgaaggctctgtgcggacctctgtaggtcgtagttgaagagtcgagaagctgggggcgcggattcgagaaaactgtcattcaaatggcgaaaaca

SEQ ID NO: 1489 - DNA, 3097 bp, Toxoplasma gondii
  source 1..3097: mol_type = genomic DNA
aaagcaaatagccgtccagtctttgaagaaattttgacattgttcgtgcctatccgaaaacattctccatcatgcataaacggggatagaactctgagttttgtttctgcccgaaacctgtgcctgggaaaatcaaagtcgaagcaatctcgagcatcaggcaagtgaaattcctttaggtggattgctttagtttcagtaacaggtgcgcacgccacaaatgtgtcgttctgccctgattcccttttcgtatcttctgcatgctgtcgataagtacgggcaggtcgtttcagttgacaagacaacaggaaacaaaagattttccgggtatacacgttggtcacttgcttcagtctacattctttcaagtgtaactgtctattagctcaatcagtgaaagaagtctctgttcgattcactcacacgaagacaaaaactgaatggtgaactaaacaaattgcacgagtccgatctgtggttgttcgcttttctgcggacgaccacacaagcagcgatggctgagagcagtattgactgtgtcacgtatcgcgatttgtgactttgaatgaccccctttttctccagcatctgcaacatggaatcgatgcaagaacagcgtcgctttctccaagtcgcatgcgtatctaaatgctatcttggtgtgaagcaacaaggcaccgaatcaaaacgcagtttcagctgttcgctcacatggtatttggtggcgttctcctagactgacgtctgaaataaaacggaaagtacaaaacgatttcctaacagcgactgctgttttgtgtatacgcacatcagctgcattcttttccggcgcactcttctagttccagtactacctttttctttcaacagcctggcacaacggtgaaaaagataatgcgcacggttatcggttttttcacgagcatgctgagcgtagggaaaagcatttggagagcggtaagctccgagtgtgtttgtagaaggcgcagacagtgcagtcccgtgacgcatgttatgtgacagaatgtgatactctgtgtagcatgtgttcaacagtacagtcaaacttgcgttgcggtgaaaccgcaggttttccgcgacagtggatttccggtttgtccgaggtgtccgaaaacggacacagaagtttcagtgaatgtcttacacaacgcgtcttcgccgaattgtacattgtgttcaggtcctcagagccgctgtctaaccggatgtaccaggtgaatctcgcggaacgaaacaggctatgctggtctatccgacagtttttttcggtcgccgagaggatattctcttgcatcacgagacacaccgttcatgtttttgttgattggtgcttctctcctctccatttgtgcagtagcttatagtctgactgaatagggtccgtgtcatgtgaacattctggcatgcgatggtgtatgcaaaaggtcgcgtcgggtcgtccgtctgtggtgttcgattctaggggagcgcttctccggttggtttttgttcttcagtcgcaccgcgtctccccttcagaaggaaacccgacaaaaacgtgtctgtcgtcgcgtcctttattctgaaagagaacttggtatactctcctgcctccgctctcgctgcgagtgtctcgcgtgtgcgtgtttgcgggtagaaagtcatctcgcctgtggggcaacacgtagagtggtgagctcctttttgtgaggaccgcgaactttgaatttctttggcgatcattttggctctggcgcaccgtctcgttgcagccttctgccggaaaacgaagagggtggaaaatccactttccccgaaaccacgcaccgcaaacagccgaccggggcatattctgtctaatgatgattgtagacaggtgctttctatacctgaattgggagaagcaaattttgaaacggtgcaaaaatagtatttccatactcttagtttctcatctttgccgagaaaaaagatttccacgcttggtgcgatcttctgtcgctgtttctcgatagcgggcagcttctttcccgtccaggtagaatgtcactctgctacgcagatccgatcctgaactcaagtacttgactccgtgttgattagaaaaaaaaagtctcgacagcctgtgacactggaaagcacaagtagccgtgaatgtttttacatgtctgaacataacagctctcgaagaacagtcgcaaaaacgataacgagtagattgttttgtaatgacggacgacatcctgcggtggtgtctgccttggactggagcaaatcagattcgggatctccagaggttcgcatcaaagatcagttcagtaaaaaggcggagctcccttgtgtgttgctcgtcctcttcatatttgtgtaaaggtgctttccctacagacataccttttccacatgccgcccggtgaaactctgctagtctttagatggaaattgcagaggatgttatgcgctgtccctttttgcgcctagcaggcttccttgctgaaaactgccctcgagttcagaaggacagcttttttagaggtcgctacttttcaccagaggattgagtttacgtataaagatctactggccagcccgagatacaccgtgtttcgtccatctagagttttttacaaagaggacgtttcttcatctcaagggaatctcttttctcatcccatggacgtgtggccctatctgcatatacctattagagcaaagacgtgtctctggaattgcgcacgcaaactttttccaacctgtcggtctcttcgatctcctctgaaaactctcaaaaaccttgccactggagtaaagccgtgcgcatcccttctttgtatgcactgacatatgccctctaacgtttgtttctcacgtgtgtcaccgtccgtttcggtttctcaagatctccacggagccaaaacgcattttgtccatacagcctccatcaggtgacagccgtgctgcctcgttcctgcgaacctttcatgaacctggcaaggagcaggggagaacgtcccccgctgttgcattccgtctttagagaaagttgttgaaaagaagacagcgagaaaaagagcgagttgcagatccctagcaaaca

SEQ ID NO: 1490 - DNA, 2015 bp, Toxoplasma gondii
  source 1..2015: mol_type = genomic DNA
aggcgtaaatacggttttaggacagaaaagtggtgggcatcaccaacgatactttcggtttctgttccctatccgtgtgctcgagctgtgccagtgacctgtatatagataggaggggaaaatcaagacaagcgagcgaagagaacagtagaacaggaagtgaagagaacggatctgaaaaatcccacacatcgcgaacacacactattggagttcgttgtattgcccgagatgacttaggtggcttacatacgaaaaaccattgcttctcaagcgcacttccactaaatatgtagcgtgtacggaaaatggagagacggcgaaacgtcacagatgttctccaaaacgaagatgacggtaagccgacaaccacggtttgagggtaagttggagactacaaaattgtggcggtatccgatgttgtcctcccttgcggaggtcgtcaagggagagggccagttcgcttctgacgtggatcctcatatggtccaaaagaaaccagcagcactttctgaatcgctacgaccccatcctcttctgccttcaatggcgcacccgacttttttgagggctttcgggaaatgctgcttcccaccttgccgcccaccttgtcagaagtcatgggcctctgcggatgcctcattccatatgtctctttgtcatgtgagatagcccctctggtggacagttatatcactggcctaatggatggacagagacatggaaaacacaaggtactgggtcattaaccttaccagagaaagtctatgaaaattgtacgtttcttaagttttaaaataccagtagtgacccttgtccgcgctagcacgggcatccgctgtggcgttcccagaccgaggcaggggcgacggtctgcatacagcaaagccctgacgcaacgttaaaaaaaagtatctccaccaccagaaggcgtctatatacgctgtgattagccacatactgaagcgttagagaaatataaatactgtcagaggcttgcactgagacttgcgtttccaacatgtggcttgctatctcacttccgatgttcgtcttcttggtaccgccgcctctgcgaaaattccgcgggagtgactagccacatgcaagctgggttcgctggagccataaaagctctaacatcatcgttttgttaatggcacagcaggtgctgtcaaaaaaagaaatcccgatctttccagtactgtggaaaaactgaacctacgcagtcccgccttgcatgctagggcctcatgagacacagatgtacaccttggaaacgcctgcgttgccgcaaccggctacagtcacgagacgtgaatgtgttttcacttttctgtttcgttaataacctttcagacgatgttggtttaatgcgacggtgtgctctgctttttccgcgtatggaattgccgtgctgcagtctgaggtgtacacgtcctgcacactgctgtacagtgagtagtggacgctttacgtggacgaccgcgtacatctgaaggactttacgaatgccgttttgcgcagatgcgcttgtttttcgatgtttcttcccctcctgtgcttcctctgttttctgagaaaaggagaaaaaactacgaggtggcacccttgttcccacttcgccttctaccactctctggtttgctcccggcaggctaccgggtgtgtctctggcccccccgagcctaatagggatcagggtcggtgaaagggtctggaagaacgaaacagtatataacctgctgcactcaggtttcctcagtttttcttcagtgtcacatttcgggtagtggagtgactgtggtagttccggaaaataaatttgcacacgagagacgcaacacaaaactaatgtgagcaatacttgataatccgtgaggtctgaggggcacccgtcgactaagcccttgaacaaggaaactttcacttgcccctcacttacgaaggactccctgagcgtgcatttctttccccaaaacgcttcataaacaaagccattctgctaccagtaa

SEQ ID NO: 1491 - DNA, 1771 bp, Toxoplasma gondii
  source 1..1771: mol_type = genomic DNA
acacctggtacgttgttcagttgattccagtgctaaaaagatttccgtctctcaaagagtattgcccctcctgtggcagcgaccttccgaggcaagcagaccgcacagcacgagcctccgttgctgggttgaaccgagggaactacgcctacaacaatcaactgctgagacaagaccatgtcacaccctcttgtgcagactttatcattttcagattggtattttaccgttttttccccgtcgcctcctccgtccccctcattcgagtctcttcagtgcccgcggggagtgaaaaggaccccccagatcggtggacttggacatcctcaaaaagaacgacgcccgagatcggcgatgccaccgccgcttcgacccattttttcaaggtcccccgccgccccccaaacgtcacgtggaaggacagagctgcaagacctcaatgatttccgcgtccggagttgcgcgacgagaacaaagcatctgagcctcaagtgagcaagacatttcttcctcacgcactccggcgattgcggtactcacggtgccatcgtagaaacggagaagcctcggcttcccgtgattgttcaccacgataaccgccttgatcatctcgggtatcttttctggtcgaaagagacaaggaaccgtggttgtttttgcgcgataactcgcgtccttcccaccagcgagacgtcgtgctttcacgcctttctctccttcctagtgaaccgcaagtagcaatggcagtgcgaaccgtacgaaggatcgaagatgagctgacagaagatgcacgcggtggacttattcctggacgcttacggaagaaatgcccttgccaccggcggcgattggcgtttggctcacgactccggagtcttccacgacctggaactggagatgtcttaccacacggaaagggatgagacaccgactctcccttcaaggcgcatgcatcgccggcgtcatgacaaggaaaacggaaccgtcaaccgtgttacggggacgaaaatgcgtgtcagcttgtacacggtgaactcgccgtacgcgaggacccccaaactcgaaagccgacacactggagtctcgacgaagatagactttgaagcgctccccaacataaatgggaagacaggtgtgtctgttgaccattgaaaagaaaaaaaacggcggggtggaggctccgaaaacgtacaatgacgagacacaagtggtcaccagacacgcatgcgcggttctagaatacacagaaagtggatgtcgacgtctgtcacgtcttcctgggactcacgagcttgtcagcgaataggttgtgtaccaagtgaaccaatcccgcgagtagatactcgcattgtcccccgatcttttgcgtgagctcgacacgccgttacgggcagttaaaaggcgcagaccagggaaaggagataaaggaggtatctgcctcgacgacggaaaaagcgacatatcattgaccactgccagaatggattaggatagaaacacacacttgtacatcattcgcactgctatctgtgctcgagccgtccatggtgacctagacccaactttcatcgggtagatacgggttgcatgcaaaggagcatcctctatccttcgctgttgcggctcaggcggaaaaactcgaattaataacttggtacacgaaacgttttcaagtcactctggaaaggggagcctctaaaccctgagaatgttttttcgtggcaatggaggctatccgcttatgtcggctcatatacgaactgctatcacg

SEQ ID NO: 1492 - DNA, 1175 bp, Toxoplasma gondii
  source 1..1175: mol_type = genomic DNA
ctttatgcgtttgtatgcgtggacggactgggtgccgtctctgaaagcggcaggccttcagtaacgaagagggtttttatgtggagcatgaagcagaaactaaaatggtgcgaactgtgatctttgcggattcactgtgatttgcggaagcaagatctgggcaagcatgctgcaccgtcggagctcaacaacatcagcgaagtccttgttaatccctctcggctggaccggaggggaacaccgcattttgctcgcttgcattggagcaaacgactttacttttatgatttatccccgaaagtcaaggacctaatgaagactgcacggggaccgaagacacacacgctcatgtgcacacacgaagaacctcttttcagacacactggcctagcctagttcgccagcaacacagttatcgacaaacatcaataagaaccgacacattcacatgtgattcaacgattgatcgcaagttccaaaccacaagcttcccaaaacaacaaggtaagctggcattcactgcagaaccatcaagtcaagcggaatgcgtatgcatcccttattacatcaatggtaatggagttggtaagggcctgtctgcattcactggtatgcatatcagtcttgtgactgttgctgccggaaccgctccacagccgcatcgagcacaacaggcagggcagcgagcaagaaaggaagctcgaaaaccgtgacagagagacagcgtagagtagccacaagccaggtatagtgctttaactgagacgaggacaaaggagcctacacgaaaaatgagaagcacgattgactgcttttagtccccgcttcacctcgctcgccttccgttcagcaggacgcttttcccttctcgtctcgctgcactgcaagaagaccaggaacagatcccatcgaatgaatggtcaattccacggggaaaaagctagattcttttcgcgtcttttcttggctgtgaatgccttggccttccattcccaccccaggtggccgtagacaacggactgtcttggctagcgatcgtggtaggagttgcgttgagtccctggcttcggctccacaacggtggagaggagagctgtttattttctcgagaaaggacaacctttctggagacgtacagttgggccagaatgaggattctcgagttccagaagcca

SEQ ID NO: 1493 - DNA, 1528 bp, Toxoplasma gondii
  source 1..1528: mol_type = genomic DNA
aaaaacgcgtggaaatcgtttgtcagtgcctcagtttgcttctggacggatacggatcgtcagatcccttggactggctttcgcctgacagagaatacgtgaattcgtcttaatgttagggacgtacagcggaacaaaacgtcgttgacggggttgcgtgtttcttgaggattttagtagttgtctagccagaaagtgccagcacgaagctcaccaaatggacattcgaaatttcacgtggatctgtgaggctgaaacactgccttgccctcctggaagggagcgtgccaagttcgttgtttcgtcaaaagcatccacgcaaggcaatgacagcaagtcgggaatcatgagttatcggtggttgaaatggagtgtaaaatctagtcctcactaacaatgttgttaaaggatacagggcatgagtcatttggtttcgccacgattacgttgtcactaccgagatccacggaatggatttcatgcaagcaacaaagtcaacgggagagagaagcgaggcacatgaacacgaagaagctaaggagcagcagcgtcgcaagcctcagtctggctggacttctcgaacgctcacagcttagacagtgacggacgcctgcaaacttccccttcttgttcctgagagcgtccccgtgttactttcgcggcgttctctaggtcactaagaagaagcataatccctcgtcagtgcttgtaacaagaagacgactcttcgtgataccggtgactgccttcaagcagactttcggagttgctcggttttgtgtgggtgctaatacagcaaacttgctacgcaaaaatgtgcttttgctgcttggatgcccgttcttcatgtgtcggaacgttatgtcacttttttcctgatgaattcaaccgggaccaaaaatgtcagagcccctcgaaagacagcgcgcttttcaccgtcacccccactcgttggttgagggaattgctggagtgcactttggatcacaagacggttttccacgcgcgtcacgtttttcctggcaaaaagcgggaagggaaacagagtttttcaacattcaggaaccttcccccctccggcttttcgacccgccagttagtcgtggcaagccgtcttggagaaagtgagaggggctgtaatccacttcaatgagcgagaaacaatttgaagaagtctcgaatttctgccgccgcggaactgtccgctctgaagatgatctcttactacctttttttctgggggtgacgacttgccgccgcccccactcgccacagacctcgcacggtcgttgtggcggaagtgatcgttttcaagtgtttaagaagtccatagagatttttcggcaacatgcagtttgaaaacatcgcgggcgactcgcgaagagtactctgtctactgaagcgtttttttttcgtgaaaaacgctgcatgcacacaagcccttctcgtctataagcgtcgcggcctcgcgagcgccgcggtcggacattttcgagtggggtcgacgattttgtaggttctctgttga

SEQ ID NO: 1494 - DNA, 5043 bp, Toxoplasma gondii
  source 1..5043: mol_type = genomic DNA
ctttgagagaatcactcatcgagggcgcataactcgggatgttgccatctcgtgagaaaggcttctctgtgtccaggcgaaaagacgagccttcgcgctccgctcgcgactccgcgctccccgccagggatctgtgcatgcgcctcgaggccccaggtcccccttcttcgccagcttgacactccgagtggaaagaagaggaccgttcgtcgtacggaggacgcggcctgagagaagcactcagggcggtcgaccgcgacagcgaggccgctcgcatcgtggagactcttccagttattaggggcctggaggaagtcgagacccgagagaacgcgtccgtcgcctcagcggtgggagaaacgggaggatccgttggagggcgagatgtcggtaactgggagcgacagaagtcgctggctgtcgtctcagtcgaaaccagacgagacaacgcggcactcgaacccttgaaataggtggacggccctcccgcgccttccacggcaacagaagactccataagtcacgttggtgaaatcgccgcgcagagtcaggaggcgggaaaaaaggcgcgtgaaatcaaaaacgcgacgccctcgcacgccgagtgcagccgagctcttctgcaaggcgcacaaactacgaaacgagacgagtttgttcgggaatgacgccgatgtcgcggcgggaaacgcggagagaacccagaaaaccgactgtgaggtccgcatgtgatcacctcctcgcaaacacgagggacgatgtgtcgtcccgacgcgaaaacaaaaactgcgaagcagcacaaaaaggttgcttcctggccttacaggttacacatggaaaaggctatgggaaccgaacctgcatcagctgctaaccggacacggaagaggcagctgactccgctgtggtccaggagctcgaaagtggagacaatgaaagatacaccggagatgcgattgcttaagagggcaaaggtccccaagagaaacgtagaagcaaagaaatgacacaccctgccggtttcagagggaaaacgagtgactggggtgtcgagacactcggaggagggtgtagcgccagagaggtgcttggaacagagcaggataacaagcacacaagcgggtagacataacagaacgtccactgaatacgtcttgcgagccttttttcttcgctattcttggcattttaaaagtggacacgggcctagcggcttttctcgcggtatatgcgcattcaacaggaccggtttcccccgtgggcactgtctgtgtcgccagttctgcagtctcagaaaagaatctgaagacacacacttggtccgccgcctttctctcgagcgaaaaagtccacctgtggtgctaccagggactagcacatcgtcaaaaacgaggtgtgggctactgagaagctggaaaaaagaaaaagggtggaattttgcaagacgcacgctggaagcggcctcctcttcgccgagcgggaaaacgcagaggggaggcagttgggggtggttcgtaagggttggaggtttgcggtcgacaaggcgggtagagcatccgcgtgcagtcacaggaaacgtttttcagttaaattcttggaacaggaagtcgcttaccacgatactgcactacccaccggtttgcgtggtggaaaaccggaatacacttttgtcttacaacatctgaaagaaacaaccgcatttgtgaacaccgcttcagatgtgagtggaggtctactcttacgttcccgtcttacccgtgggatcgctttgtgtttttgctccttactccgcctcgtcagaagctgcacacagggggggcttcttacgcgcggatctgtggagaaaaaggtgtccatagagggaagtccctactgaagaggctcgccacagaacgccgctagcgtgaccgggggctacactaatgttacagtttctgtagaaagataccgcgtacctagacaggagcggcctcactgctagaatgcgacgcttggagtagagttctagcaaaccaaacgggtttcggtcagaccgcgaaatgcactgaagtaacaccactgaacagaaagcagtcgatgaaaacctggcgcggatgtctgtcaacgaaagcagggcagggagaaggcgcgcgtgtgcagctgcgagcctgtcaagagcggattttcaagataaaccactagtccaacgcctcgcatctatctacacatgacgcctagaacataaacgacgtggaaaatggtggatgtcgggcattgaagtccaacacatttaggaaccccactgtagcaacctagttccccgttattgctgcaccagtatttcatgttgagctactctgcacttggggctgggtgtccgtgtagcttctcattgctgaaactccccgttacacattataaaacgggattattcccctagataggtatcggtagtctagtaataggtgtcatgagtaacgctgggtttctacccgggaccgcacattgaaacataactgtcgtcagcgatctctacggcttgcatttaaatatgtatgggattgaaattgcttcccttttgagtgggaagcgccaaaacaaaagtactctgtttgttgttctgccactaaagcggttggaacaatgcgatggaggcgccttgtccgcctctcagaaaagaacaaagaaactggagggaaaatgcacactgtcagactcattgaacatcgagaaatccctcaaggaagcagacttgaaaccgtctgcagacgtgttgcgtttgaaggaaaaccaggacgtatacagacgcaccactgaagcaaaacgttcaacatcggcattgtgtgcaaacaacgaaagaaactagaaagggttccacggtgtagcaagtgactagatcctctttcgtgcctgtttgaggaacagggaatttcttgagtggcgttaatgtttctatagatgcgccaccggcacgcgtgaaatgcctttcaaatcaagggttaatagacacatggtccaatctctgtgtctggtaggttccctcactggtgtctgtaagaaaaacgacagacaggtttcttgatatcttctgggaaaatgacatctctcgttttttcccatgaacttcgtgtgaacaagactaaaccggactgtcgctttcggcacgactgcgctaacgggtgtagactagatccacctgcacacagggatgcagaggagctgtcacaaacgtgaaaatgtgacttcatcaaagctaggtcttgtctatacatctctaagcacgccaatctacatatctcatatccatgtagagtttcaccggtttcacccaggtgggtccggtggttgtatgtcaaagccattgttgaaactggtcaaggttcccagggagtgacctggtgagtcacaccgagtatttctacccttgtttttccgactgcaacagaggccttctttggaaacgtcaaaatccggaatgggctccgacacagtgtgccaaagccccatcgatttgctacttggggttaaatcgaaacagcggtgttccactcgcgtcccacttttctgctttatttgcgattcgtgtatgcaggagagagagaggtacgcctatggatctacttgtccgcgtaccacaacgacaattaatcggcgtcccgttggctttctgtgttcttctcatgcatgtcgcgaagctgtccgaacgagctctggtggcttggctactccgcgactcagaaacgatgtttgggtcctccgaggcttgatcaaagacttccgagttttctgcgcgcagtggcacttttgaatcgcacccttttccctcaagccacctctactcgtttgccaacgctgcacacaaagtgtatccgtagtgaacacgaaatcactttcagcaggcagcccttgcgccgctgtacaggctatacaggtgtcttgcgtatgctctacaggtttcgctgcttttttcgctgtctctcgctcccgtgtccggacttaaacctggattgcaacagaccaactacagtttctggaaagcccttttttctgaggggatcttcacaggttctgttgccaccccaaaggcgcctcagcccgaatccgattcgtggctttttttcggtacgactgcatgcacgcagggttctttgcgcgggtgtagacagtgcgcggaacatcgaccgttctgaatagctcgatttccaggtctctagtccgcgagacacgctgtttttcacgaggcaagtcgagaaaagtcgtctcagactggtatatcctagatgccctcgtcttcttttcagtcgcttttctctaaccgggacactttcctgggtgtctgcgagggcatgcacctccaagactcacattgtggctgaggaaactgcgtcttctgcccttcggtgtcgctgtctttctcttgtataggtgaattactggcccgtctcttgcttcttgcatctccctacttgcgtctttttctagccagagcttcctggcgcatttctgagccgtcgcagcttgtggccgctctcgctcgacttctgtatgtacccttgtcacactcgggggctttcgccccttccgagtgaccagaaatggcgtgcttcccgtgtgtgttcttgcccatggtgtcggccaagacaacacaaaaacactttttccccgaagccggtcgtgctgcctgaagtgcacgtccatgtactggcactctgcgcttcactaatacctcggcctctgtgcaccagtggtgatgctcggatatgttgttatgtttgttagaggctaactacccggcgaaacgcccctttcctttgtaacacgcttctcttctcgttagtatatttgacgggatctcctctccaggctctgcgcgtgatgggaagcgctttccgtggcagtcgacatttcgagtaacgctgcacactgcagatatttgtatgacgtgattcacggcggtatcaacttgtgttttgcccgttgtcatgagcaaaaaggcagcgttgcctctttttccggaaacacgtgagcacatcgcattctctggttgagcggaactcgacagaa

SEQ ID NO: 1495 - DNA, 3376 bp, Toxoplasma gondii
  source 1..3376: mol_type = genomic DNA
cgacgcaaacttcctcttgcgcgtacggtggagcgatcttgagtatccaacaatgaagcatgagtggtttgtcgcaccgatgatgacgtcgcctgtgcacttccgggccgtaggttggatcgcctattacggagtgcccgagagatgcagcatgcaggcgtggcactataggcggacctgcgtcaagcaccacgcaaatgtcccagaacaaggcaggtgcaccaaagagggaaaagacaactttcagtgggtgccaagggtgtcggctgcttaccttgaacgagccgtatctcgacgagtgttacaggatgcgcctccaacgcagcttgcacaatgggccggaaaatggagtaagcagctttcccctccgtcctttctcccgccagtcgccactccctggaccccggagaagggcgacacacagacgatcggcagtgcacgacgtcgaccggcatatgcccccggaggacagcaaggtaaacaggcacacaccgcggagtaccgagattagacaagctcagaagggatgagtcccgaaagaacgcaatcgctccacttgcttgtacgtcgatcccattgaataacctgaacaaatgcgataacacatgtatagaagcgtacttatgttgtttcaataaaagcgcacgcatgcgcaacagctgattttttacgacatcgcggggaggctgtcggtggaactccggacagctctaaaactgtggtcttacagattgtattcggtgtcgtattttcttttcttcagggcctccatatacgttgtcgggacaatgaaagttaacgaagccagtgtatgtgagttcggagcagcttccagtagaaatagtgtgctaatgttctcctctcatctacgaccacatgctgtttgttaaaatcgaactggaactgcaccagtgcgtgagtatatctccgcgtgagaacacaagctgtagtctcttcagcagacgcattcgaaatagcgtttgtggcactgaatctcttcgataaaagaaagcgcatgtgcaacatcaaaaagacttccgaacagcgagttcacgacggtcacggcgactcacttgagagattcgtttgcgaccttgcccggaaaaagccacgaccctgaagaagcgcgtctctgtttcggtccgccattccatgcactgcggtctctcctgtccttattgaaaacgagagtagtgggcgtggacagcaatatctccccgatatccgggcactgttctgagttttcgacatagcctgcgtctactggtttaccaatgcgaccagagggagggacgaatgcttcatagcaaacaccctcctgggtggcctctgtcctttccacatccgcacgaggaagctgtcggctcacgttcggcgaaagcgaacgccccttgtcgctgttcccagtctggtaacccgagggccacggcgggcgggcagttgcgtcgccgggtgcaccagcgataaagccagaaaacgccagagtttgccgactacccagcagtgtaatcgactgcaatcccgcagatgaaaacctcgaaagacaccgctccgttctttcttgctgtggtctactgtcacagctctccgtagttgaggactgccgccgccagacacgggctccgtctccgctagttttcgttttcaccgaagtaaaaacccgtttcccgcaggagaggaaagatgcttgtgatgcgagtctctcggagactctactgaaacaaggggacttaagtgatggagaaagagaaggcggaaaaggaggcagaggcattgtcacaagaagaaaaagaagccagtactacgcggaacataatgcacactacccccctgaaaaacaaaattcattagacatgggaagcaaacagatgaaaacaatgtaggttccagaatatgttgcagagggaaaatgcgtgtgtcttacaacagcgacgaattgaggcagaaatgcagagtcgaatcgaatggacgacccacaaaggagcccgcggtgtctgaagtcagcacatacccgcctaaaggtttccgacgtggaagacctactgcaagagaactccctctttcgtgcttccaaaagaccatccaagaagcaaccttcgctatcactttggtcctttcatcatcaagcaacgtgactgacggtcttatgagagactatctccgtcaatctcgactcatattccgacagaatgccactgcacgagcacctgttcctgtgcatgcacaggagttgaacgggcacagcatgtttctcgcatttgcttataaaattcaatcgcatttccctccagtaatgaggcagcctggagctgcgctgattcttttaagttttcatctggacgcgaggatatttgctgttctgcagctcggtcggtgctgtgtgaggcaggcgggacgacttcgactgccgattggttgcttggtggctgaggaggctcgtgttttttcagaagcacgtccaggactctgcttttggacaatacgcgggcaaatgaaagcttagcctcctcataaagttcgatttccctgattcaagtgcgccgcgaaattgcgttgttttgaacgcggagcggagcagttttctcctgtgatgtcgcactcctcccggttgacaacgaggaggcaaaaaacgacaacgtactcttcgcccctctctgtgtctgctatctcacttcctccatttcttggcatttttgcgagagggagattgggagtgtccgattctacacttgtgacggagagctgacctgtacacgtagcgaacgcaatgcagtttcatgcgcacggaagcggttttaccagtggtaccagcgacaccgtgtaaaataattctaactgtaaatacctgttttcatgatgtgcgccgttcccacaggcgtacacatgcgtgtgtttgatttagttccttctgcctgctgttcttgcccgttgtttctcttttggctggcgttacgcgcattcaggcccgcaacaggctcccgcccgctcattcacccctgctgttctttttcctcttctagcacacagcaggcgtaatgcgttgcatatctatatatagatatatttatttatatatatttattcaagcttatgcgtacataaattgtttttttacccggcacggtgatcatttgcgcccccggccgctgaggcagcggtttccgatctcatgaatctgacgacaaattcttgaatcgccgggtttgcttcggcaccgattactgtggcgaaatttcctgggttgctgaaacaggagaaagttgaagagttggtgatgctgaaccttgctgcgtcgtacccgaatagtcaaacggtggctgtgtgaaaggctgccgtacgcacagaaaaaaccgcgtgtgtcttcacacacattgca

SEQ ID NO: 1496 - DNA, 2067 bp, Toxoplasma gondii
  source 1..2067: mol_type = genomic DNA
gttgtccgtcgcagcttttgtccacacgcagagtgttcagaaggaaactggacatttcttctccacattgtctcaacgttcgtgtttcgaccttctcgtctgctggccgcgatccgagtccctctctctccctgcgcggttcctttctcgaaagtctcttcgaccgtcctgtctctttgggggcggggcttctcgctctttccgcagcttgaacccgtggaacagcgagagtctgcactggaattgccgcactgcacgtgaacactggatcctctgcacaagtgatcgacgatccagaacatttttcgaatgaaaaagaccttctcgtccttctgaaaggctctgtggagaagcgaggaaggaggaaagtgttcgatttcaggatcttccggcgtagagtggctccacgcgaatgtctacgcataaaaaaatcggcagatgaatctcacggaacagcgaacaaacgagttctgacgacagagttcagtgcgtcttctctctgctggtcctctcactggacgcacagccgttgcgacccacacgcctaggtttatacagagccctgcacaatcgaatagataaatacatccaaagaaactgcagaaaacgacatacgcatgcagtgcttgctgctgagacactttctaaactatctatagacatacagagaaaactacagatataaatatgtacatatctacatatatatgtatgtatgtatgtatgtatgtatgtatgtgtgtatgtatggacatgtgtgtaaatgtgtatatatcggaaggtgaaagggtagacttggaagagatggattcgttctgcttctcgtttgtaggtgcatctgaaggtctgtgggttctgttcgttgacaactcttccgtgttttttggacaggcggggagacgcgaaatgtttgttcgcgtttctcctcggggcgcgcttgaccagcggctgtccctgacacctgcccggaagagtgctctgtgctttcgagatctcaggtgtatctccaccctggagactcctagttgggttgcggttttctgtgtcgagcgagaatgaagtgcgaagcaaggcatcttgcgcggagaaggccatcgacatcgaggaggccggttcagagacgatgcagggaaacaccgcatgttcaggctcattgtttcactccaaccttcgcttttgtgccatttttgccagactcgttccctctccgaaacatgtagaaagaactgcacccaagtgcaccctcgagcgtgtactccaaaaagtctcgggaggcgtctcctttcctttttcgcggtcgggtgagcgtctcgggcatggcagaagttctcgacgtcgctcctactttctgtctcaagaggggggacgagattggtgagaagactttgaacaccctgggtcgtttttccttcctttctcagggaacattccttgattctctgcgggtttccttgcaaggaatgtgacgagacaggaccgcaatcgctgcggcgccgctagctgatcagacacagagcgcatgcgcgagggatgccaagacactgtcggccttctttcgtttctccttttcaggtcgcgatcaaagtcttctttcacttcttttcttctgcagagttcgtcttcacactctcacgttcccctcgacgcatgcagagcgtgagtctgctcggtctgcggcgcgcgtccgctttcttcgggtgttctcgaaagtgtaattgaccttctcgctctcacgctccttcttttcccctcctctagctgctgtgcacagttcacttctctcttcttcacctttcgtctccttttctctgagggctgtcgagtctttcatttgcggctcccgcggtctttgagaacgtggatttcgaggaactcggaaagacttaaggaaaggcgcttctcttcccctctttgtctcctgagatcccctctgctttttaccgtgtttctcttcttcacgtgcatgcgtcctcgcctcgcctcctgctcttttggagactcgctggagtttgctgttcttccgaaatgcatgctcaaaaggacgacgacgcgacggaagagaaaaga

SEQ ID NO: 1497 - DNA, 1800 bp, Toxoplasma gondii
  source 1..1800: mol_type = genomic DNA
acagtttcttcgaaggaatgctctttgtcgagactgtgctggagcttctcctcgcgccgcgcggactcggcggaccgggcctgcctttcgccagcgccgtcgaggagacagctgtctccagcctgcaagcgtctcgggggagaccagcggcaggcgagggaggactgacctccgaagaagaacgcaaagcagaagatcctgcagccgcagggccgcgcgcagacttttgcgcgccttgggatgacgaagaactcgacgagcttgcagaagaaactcccgccggagagggagagagtagcgaaggcgaaggcggcggcgccggcatcttgaacgaagaaaagaaagcgaggaggaaggagaagaagaccgaggcgaagaaaacagggaggaagagactgacaggggaggggagggaaggcggaggacgaggggatcgaagaggaagagaagaaaaaggtcgacgtttgaggcagagacgtatttttcaccaaggagcttttgctgggattcctcgattgagagaagtctcgcgttttgttcgagtgacctctttcggagcatccacgcagcgaagccaggcgttcataggagagagtctgaagaaggtgtaggcaagttgagttcctggaagaagctgcgtggacgatttttcttctctcttggttcgtccgagaggaccctgtatctttgcgcgagaagccgtcgacgcctgtcagatgtgcagaagacggaagtagtcaaacgacccagtgagaaatggaaatgagcgaaccggagccatgagaagaacagaagtccacccttttaggggagaagcagaagaagcatccacaaggatgtccgtcgcctgctcgcttttcttgtctcttttcgcgtggtgtacggcgcccagctgcctggtcgtcatgtgcagcaggtgaagaggcgttttctttttctctcgctttttgccgaagagacacactacgcgtcgagttctcgctctccaaaaagagaagaagacgcggtgtagacgcagaaaagggaagagtctttgcacagcgcaggcggaaagagcgccacgggacgatgcgtgctcgccgacattcttgcggctttttcggggaatctctcgccttctgagagaccctttggaaattcctgttcacacctggacactgaaccactgtctgacgaagaaacgcggtaaaaaggaatgttggcaagaaagaggaggcgagaaccgatgcgtccacaccaccgaccgcgacaaggcgagagcgaaaaaataggcgatatatggagggagagcgagagcggcgcgattctgctcatcggtgtcgtccggcgcgcgtctgcgggtatgagagccgcgcagcgttcgcgttgcatgcgaaactcgacagaattgactcgagcctttcaaagggcctttgaactcttgtgggaggcggcgaatctcagcagaacagaactcttcgtcgttggcctcctttgcggtccggatttccctctgttctcctcgctgcaacttctcgtcttcctgacctttctccccttccctcccgttcactcgagcacacacccgacaggaaggttctcgatgcttcttctctcgttcttctctttcttccactggactttctttcactctcagccatctccagagagacatgctgagatcacaaaggtgaaaaagacgaggcagatgcttccgaacgcacccgcgcgcccaatctgcttcgcctccaagttgttctctcgccgtccttcttccttctctttcgaagtcttcttccaaaattgttccaggagtcaaga

SEQ ID NO: 1498 - DNA, 3064 bp, Toxoplasma gondii
  source 1..3064: mol_type = genomic DNA
acggcggactggtcatcaacctctcgaaggtgtttgtgtttgacagcctcaaagtctgtcgcaaagcctggggctcctgttgtttcctctccgcccgtggatttgctctcggcggtcgcgcgggcgcctcctgcgtctttcacgccgttctcttcccctgcatctctcgcgtctggagtcgcacaccctcggccgccagctcgactcatttgctggcgcataaacgcctggagcgcgttctggtcaatctgatcatccattgccgcggcagctgcagcgaggccggcggccatggccaccgccacaccttctttctgagccatggtggtgtaaacgaggaagcaaatgcaaggtccaggaaacctagatcatggaaagttaggtcgtgaaaagctagctcgtggaaagctggccgcaagcaaggaagccagactcgcaggtgaacacgaagtcgtagagtgtgagaagcactcacggaccagacggaacgcagcagacaagcaaatgggttgccggaaagaggggggaggagaagcggggtgaaagaaagagtgggaacgggagaaaggcagggaaaggccggagaaagcacgcgtgtcaggagaaacctcaagagcacaggtgcaatggagtgcttgggcggggagataggcgcactcgcagctcagaatcacacgggaaggcaaacagcagtacagattgtgtacacgaagtgggagaatcgggagagacctcgcctgacgacaggtcggaccttaaaaagaggcaacggctcggctgttgccctctaccgtgtggggaagaaacgccgggaaaggcaagttcgagtagagctggcgatatatccacaagaggcactagcatcaacgaaggaagaaaccccacaggggatgcggagcggcaaacgtgaggcagacgaattggtgaccggggaaaattggaaaagaccgagatccactggtgaaaaccaaagaaatcacggaccctccttcactcccgacacctggacctggcgggctttatcagaacacgcacacaacgagcacggaggggcaagaaactgcagaggtcaggaacgggaggaaatcaacagcgtcgagaagagcgggagagccaacgccgcgctgccgacgtcactcccattcgttcgtaagaaatgcgctcgccggccgcttccttgtatctcagtgcacaacaacaaaagcccaggacgaagcgagactcgcatgtgattgcgaaaaaagacagccaggacgaacacagtggagagagacacgcaagagcaatttcgggtgaatgccttgctcccgcagtgccggacaaacggagattcttcggtggcgtactgaaggatgacggtgaatgcgagacagaggaatgccgcggcaaacgttcaccgattgtgaatactcgacggacaaagaaaggacggcctcaagaaagccagcacagcagcgcggatggtgattggtgtcctccttcctccgttaacaaaatacaggacagacggtcacggaaacaaatgtgaaacagaaggctgagagatcaggtaaatcgcatgtatgcaaggattgcaggcgggtccatcggggaataaagcttgcgcagcctgcgacgaaattggcacccaggcggtgatccgatgcatgcgccactgcctgccgaaggctcgtcggaaacgcctcctctaccattgctgaaattccctagacaatcataaaaaggcaactactcatccgaaaaaacaaagaacatggtgtacaggcagcttcttctttgctccaggcaatagggaactctgcgttccggacatcaactgctccgtaccgcagttgcatctctggcgtctgaagtacaacacaaacattgggagattttccttattcgtgaggctgctacctagcataagctccaagaaaccacccaacacccgtggattgcctttcctgacatatgcgctgctctgcgggaattctagcaagtcgcgcgtcaagagataactcactatccgggcaagttctgaatcacgaaataaatagtgtcggttgtagcgaggtactcggctacagctgacgtgaaaatgggaacactttttggtgtacagcccccgtttaacgtcccgctgtgatcttttcgcataagcggacgggagccctcagagtccagtctgttctcccgtaactcgcttgcaaccaatctgacgcacagagtataaaggagtttcattgctgcttttggttcacattagtacaggagctttctaggtttccaactgtttcgactttgttgcattgagccatcgccttgtggggtgaatgccgtatttatccaagaagcagaagctactgtatcgccaatagtcatgaagttcattagttctagaggaagtaagaagcaatacagcttcgtcgaagcggcgctcgcaggtaagcacggaaaaagtgttcctccacgttgttctccattgcgagcatgcactagtcatgaggctttcttcacacttttcctcatgcctttgggatagaaactggtcttgttctgtttttcaatcagagcccttaaacttgttctcgtttccgaatgacatcgctcacatgtggactgaacgaggcatcgcgaatgtgaacttacgcgtgagcattcttatccggcctcaatgctggtgacaaattagtggcagttactcctgaatcgtgagagtccttccatgatacggaagaatgacaccagcgtctcgaatgcgtgtatgaaaagtgtgagagcacctctgcgttgggaacgaaagagaaaggaacaagcaggccatatggtcgccaagaaagtgtgatgaagtgcgtatgcttgtttatgaccaagaaaatggcacccagggacagcgcgtatgagacggggttgctgtccacggtgttccctagatggtatgcaaaaacctggggtcggcttctctcagtgacttttagactcgaatgtgcactcgcaggcggtgagattgagacggtcttatataccctttcttttagctcgcttttttttctgtcgctctctcgccaggactcgccgacga

SEQ ID NO: 1499 - DNA, 1494 bp, Toxoplasma gondii
  source 1..1494: mol_type = genomic DNA
tacagcttcatgcatcacttccagagaaataggcaacacacagagaagcagccagagaggtttgctacatcatcacatatcctcgatgcatgtacttacggttacatatatatatatatatatgtatacatggagaaagagatctggtatgaagagtcacgcataattcacatccaaatatttgtaaataagcatgcatgtatatatatatatatatatatgcatatatgtatgtagtttggcttggagcacgcagctgcgtccacgatcatgcctggatttgtaggagtgtatttttgagagtggaagagctgtggggagtgcttggcatttgccagaggggacagacaaagaaactgtttactgcctcgaacgcctctggcctgaaagaatgccaccccccaggcctggcacactctacgcgtacctccccagtgtacacaaatatgcatataaatgcgacaacgtgcgtatatatatatatatatttatatatatgtatgtatatttgtattgtttcgcaagttgtgtagaggaaaggaacacgatggagataaagacgacaagaagaagagaggagaagaaggaaaagaggagagagttgaaaggcaacagcaacggccgcgaaacgattctgtatcgaaagaggagattcctcgcagcgaaaaggcgaaaagcctgtagaatcgctgcattggtgtttggtgcgttacagtgtttccttttcttgtgtaggagttcaagtagaatggtgcattttctctccaagaatgccgctttcgtctgtcactgttcgcgtttgcttttccctgtttcgaagcgttgtcaggtgctctgcttcctcagccgcagagaaaggggcgcttctcatttcttccgctttgagttccctgttgtgtcttctccctcctcttcatcgctagcatctcccaccctgaatttcagactgcatgcgtatacacgacgctgtctgctttttccgctcgacgcagggtcttcattcgcgtctcgttttgcatcttttctcgctttctccctctcgttctctttcttcttccaccttctctcgccctgtcttttctcgactctccatcatatgtgtgcctgttttctctctgttgttctgccgcttcttgcccgatagagactcttgccgtgtctgctgctcttgcggcttttctcgcggcttttcttcgaattctccttctccccgaatctctttcttctcgaatcttcttgctgttctcgaattctatttgccgttcctgcaagagtgctgactcttcttctttctcctcttccttcttttctccttgtccttctctcctcgtctctgcacacctcagtctctcgacgctcctctgcgcgagcttcggacagtcacttccactttttctcgtctcgtcaactctcaagtcttttctctttccccttcttcctctgcgcctctcgttgtctcctttgtttcctccgtctttcgcctcctctctgaca

SEQ ID NO: 1500 - DNA, 3271 bp, Toxoplasma gondii
  source 1..3271: mol_type = genomic DNA
tttttgacgggcttgcctgaggaaatacgggtgtgcagggaagcgagagcagaggagttcccagtctcgcaattgggcggtgcttattcacattgaacggacgaagtcgtcgtcatttccgcccaaaacattgcagaatagacgacaccgaccgccttcccagtgcaagtgaatggggtcgagtctggtactcacgactagccagatggaggtacattcgaacacacactggaggcagcgtttttttcgtttcaggcacctcgacacctcgttgatcctttctgctctaatgcatgaagaagggattcacaaagtgcttctcgctttgccacataaatggggtgcggtagcaccggaatgctgctatcttccgcgatgaagtgaagaagctggggctccgccctctctgttacagtgccaataacttatgcgattgctggagtttcttatataacatccacaagcattccagacccggggcgagtcgggctttcatctgatgtgaaagctcacgaagctcgacaaacacattataaaatagggtggcacaggcgacccccgcgagccgcccgcgattgccttaataccgcgattgctcttgaacctgtagccgcccacacaacccccgtgggaatcgcgaggctacagtgactgccgacagattatatgcacgtcacgtgacaacatccttttgagcagtggtcgcgatagcactacgacgagttcctcgaggcgccccgccaagtttgagatatatcttgaaccttgaagtgagacactgcagggattcatggtcagacatttttcctagcggaagcaacaagggattctgaatcttgtcgctccgcctacgcggaagaacggcggacaaaactatcggcgtagattccgacactgtgaacatcaaactgtgcttgccattggcgacctctaactgatattcgttctggtggtgagatggacaaagcgccacggaaatccttctgcacgtgacgtcccctaatcgctgttgatgctcacggagaaaaggctgaggatcaaaggcaaaaacagcagagctagcctgctgtggtctacaatgtcaggtcccgcccagcctcgacgaagattttctctcaatgaaacggagtgagccatctgaagagcctcactgcatttctctgaccgaacgctcgcttgttagcatctcaaagactgttcataaagagtgtgaatctcttatactcgcagagaggaaacgcatccatcctttgtggcttcctgggctgcaaagtgtcgcctcggcgcccagagggcttactactaacaacatgatctcggaattgcactcgggttgagtgagctgcgggcaacgttctgcagaaaaaaaagattcagttcccatccggggttggtgtactttggagttcagcatcgtctctatccattgttcagtactatggctattctcagatcaccacctaggaacgaactgaggataattacaagacagattaaaggcggcattctatcctcgagtgtttttgctctacacgttgaacctcatcgcatctaccacctcagtcttgctgtcgccaatacaaattcgcacgtggtacgcgtggtgcaccgcaatccttccccttgcatgaccttccccccgtccccccgctcttgttcccgtaggactcgcggatgcagcacactctttcatcccgtgggcagcggcactcagctatcatcatcttcagtgctgagcagttttgacggcgagctgtgctttgcctttgctttcccgcgtggtacaccgattccgcgatctatttaacattgacactgtgccgttcagctctggttcgcgcgtcaacctccagggtgccacttgtcggatccttaaccctatcgcgtacaaacattccctgccccgccaggtccaaggtgagttcggtttatggtgtgacaaaaattcggcaccgcggagcaaaaagcgcccacctgctttggtgcttgtgtgctggctcaacgaatggacttcatttctgtcccagtggtttcgaggtcaccgactctgatgtgtgtagcgcgacgcttttgcccgggttcaccgtggacactgttctactgcgctgaaagaccagccactttcgattgcgtcagaaatgccagtcgttgtcatacagactttccctagcttacagtaccgcagagggcacttactgcgggtccgggcgtcctcccagatgcgctgaggctgcgccgaaggcatgttcactcgcacaggttcagacacctccgcgtgatgggccagcgctctcagccacatttgaccgttcgcagctcaggtgcgcggagtcgaccttcagcttccgtgcgcttggattgagcatgcccgttgcagtcaggcgtccgcgattgtcttctaaatgctgtgcgtctgcggttcatttctccacggaggcgtcaattgtgtgtttgtcatttctgtgatgagaacaggtgtgttgaagctttccaaaacgcgtatggctgctgtgccacaccggacctcgactctggtgctgccgcggctggcgtcgagttggcggtgcacagctgcgccctggaccacattcgaattttcccgtcgttacagcgcaacattgtgtttcgcacttttgtcgcaggaaattcaaacctttcgaacgaaacatggcataagtgcgtggcggacacgcctcgtctcgtctttgctctgacaacagagcgcttccgacagaaatgcacgccgcgaacccgcaagaaaactccagacactgtagaaaagaggaaaggcggccaggaagagcagggccctgctgcatgcgccggcggttggaggcgagagtgcctcccggcttgggtgcccgcaacgttgcgttttttctccctgttgcacgaggaggaagcagcgactggaatatcctccagtttttccaacgacgcgcggttgacggagaaaactgccgcgtaggggtcgtgtacacaggccgaaggcttgttccaagtcacagtctcacccgtttcttgcggtccacggaatcgcgcgcgcctcaccgtccgaccgacctcactggaagctgagaagccacaaggacgcagcaccttttgctcaagtgctgtctcgtacatgcggatcgcctgccgggctgccgcagtcgagaaacgctcttttccgaaacgtgtctcgtgcagcgtactctttcgatacgtttctctgtccggaatctgtggtgctttaccgaaaggccgttggagattccttgtcctctctcca

SEQ ID NO: 1501 - DNA, 2202 bp, Toxoplasma gondii
  source 1..2202: mol_type = genomic DNA
gaaggagttctcggagtcaggaacgctcgccgacaacgcgacagtggaggtcaaggctcgtggatgacgcagcagactctcgcgctcgtctcgcgactgctcagaggacgagtcgttgtcagtggagtccgcaaatgcatgcgcctctatcccggccttctcgcccgaaacctccatggcgctcggaaacgccttctcggcctcagtgagcgccatcttctcaagaagaggagagagcggggtaacggaagatgccagcgaaaacagtcgctcagacacggtgtttctccgttttccgcactctctctagttcggtggtactgacagggctgggggtaaagaacccttgattagcggggagtaacggcggtaaatcgtggggaaaggcttcgtttttacgatggaaaacggaaaagggcaccgattgacagaaaaaatggccgaaagacttttaaaatgacagaaatggagcagggcttgaacgaaaaggaaagggtgtcaccaagaccttccaggaacggcgaaagtgcggaagtcaagaggttaaaatggagattgtcgatttatctttttgcaggaaaggacatgagagaaaacaaacgcatacagatgtgcacacaagccgcgaacagaagcatgcctacctccatgcactgaacaggcatacacatacgcttacacacgtattttgaagaagcagttgtgtatggatgaatgaagcgatacagagtggttgaaatgcttccaatttgcgaaactcgcagacttcctgccgtatgcgtcgccactgcagtcggttgctcgttcaggttcgtagtctggaaaagtcaggctctccatcaccagaaagaacagttgcgagttcttctgcgcggaaacgaaaataggttcagcacacgactggcaaatgcctgcgtttcctctcttcggaggcacaaacggctccgatgacaccagggaagtcgagaccccaagactggaaggtttcgttgcctgcccacggcttgtcgcagacatccctctgaacgttgattcctggagtcgcttcgcgacttcctcccgaaggaactgctttgaatcgcctaggcgaacaatgacgcgtcacaaactggccaaatgctgaaaatggccatggtttcgtgcgctttaccacctgcatgcaacgtgagaaaccaaactcttccccatcgccccattctccccaactgaagtaggatcggcgaaacggcagagaaggaatttaacgactcagagaaagattcttttctgaacgcgaaatcgtcagcccgagcgagcatatcacgaagcagcgtctcgtctagagctgcacccgaaactcacttttccctgcatgcgcagtgttcgtacactgcacggggggtgttgctcggattgcacatggctgcattccgtgtgaatcgaaagcatgaatggcacaaacggacttttcaaccgtgagaggaggccggaagtcgtccgcgcggcaaagagttcttcgtttctccttccgactctccttggcttatgccgttctcggtccagctagaagacaaaccacctggcgtccttcgggggatctgtcttcgggcctccgccggtgcaacgcccacctttgttcctcgcccttcgccttcttcgactcgctgagtttctctgccaggccctgcgtggtattctgtccgctttcccgtttttcgtgcgaacctgcgaaaaaactcggaaggcaaccttaccggtttcgtgtggcgcagccagccacgagttttcatcgaaaagttgcccagttttggtctcgacgtcgtcacccgcctcgctaatttttcaggtcgagaaacgcggctatttcgttccagtacggcaggggccctcttccgaattttctcagcagttcctggttccggcaaaggatcgacgtttttagtgtcccgttcaaaagacctggcttctaagcgccggaacgtgtcccgtgagtaaccagttacttgtcaacccgctgtgactggatctcccccgactctgttacagaatcttttcccgcagatgtccctcttcatcttccacatgtgcatgtgttcatatagaccccattgcgtagttccgcccgtgaacatgcacatctaacaatgtgtagaggtccgcatctctgctggtaagtgtacgaacggtctcgcaggattgtagaattcctttttcttgcgacca

SEQ ID NO: 1502 - DNA, 2031 bp, Toxoplasma gondii
  source 1..2031: mol_type = genomic DNA
ctgatagatccctctcctctgtgcgattcacaatatcgtagacagcggaccacgactgacacagaccctccggtaccacctgggttcttggatacaacggaacataaaggtctccaagttgtcctagtctaacaacctttaactgtcactttccaaacggaatgcagtcactctgaaaagtggaatctgcttccagagagatcccgtggcgtctccgcgcttctctggtttgcagaagatattcttgatcagtatcagccgaccacgtggtccgctgagagcttcctgctagcgactcacttagagatttttcgtggcaaacgggcattaagcatttgatttgctaccctgctgaagaccgcagacttgcatttcgctgtgtacaagcagaagcagtgaccgatgttacgtgtggaaggaaacggtgcaccttgtggtgcacggagtcacagcaagtcaaccgaagttcaccacagttcaattttgttccgttcaggctgttccaaatggaaatgacacagcacttaggcgaattgcttcctgaattctacttgccagggagccggcacctccagtttttaggcacgctttcttcgcggtggtatacaaaagctgcaaaatcctggaggtgatccactgcgtatatcatagcgtcaaacttaggtcgcgtgcttgtcctatctgcacaatgcgctgtaggttggttttctacgtcaacaaatggatccaatgaatttttcacccggccttcagttgacccgggcgtgtgctccgaagtggtggaagcgtttagaggtccagcaacgcgcacccccctcctcaacgagtcagcaaaacaactacttgacgtcaagcgagttacaggtctcacaaataatctgacacaaagccttaggctgctagaggtcactcctcattcttttaagactgtgagggtgagtatcgattctcaactcgcagactgacaagccgttaccacctgccctgtcgccaaataccttggtagggcgctttgcaaacgcgacactgttcgccaaacgatgtctatcaagaaatgtaacgttgaatcactgtggtgcttgaaaaactacctcgatgttccagaagacattctgatttcgcgacttcggttgtcgagttaaacctcagatgggtcttcccgtcactcgcccggcttgttttccgtgagctcttcggtgaccagttcctgccgtccggagttcgtcttcgccgtccaccaatcgattttcgtggttgctctttcctcgtaggcttgaaagttacgcagagaatctgccatgtcttgcagcaaccgcacctttcccgcatgcgccaagcacaggcagcatgcatgtaacgaaaccacgacacaatgtgatttggtgtgactacgtcggacgcaaagtgtcctctaacatgccactctagtcgcctttttcgccagaaataaacgaaaactgataaatatcatttgttccgcgtggtgtggcagatgtttcctttaccagtctaggcgtggaaggtctcacactcagggatcgcatctctcattgttgaggacatcgacgagaaatccctgttgttgttgttttcctcgatcctgtaaacgcctgcttttccttaatttttctgaactacgacagcttttttaccggctgaactgcctgtaaactgcaggtccttccgtgtggaagccgtccggaaaccagaggtactccgaaacgtggtgtcacgctctttaagcgcgaaagcgttgtcgtgtcggccgccagtgaaaacgacaacttccgtggggttttttcttcacaaaatgcgtgcacgctgttgacaagtccgcgacaagtgagccacgcaggagtgctttgaaaaacaacaaaggaaacgttggcgagggcctcgtgcagtcggacgtctgcggagtctgtgcggactgactaaggaggggaagaaagaattttccccccccaacgcaggcaaatagaaggatttcgtcgtcggtttgctgctgaacaaagaagaggaaagaggtta

SEQ ID NO: 1503 - DNA, 1910 bp, Toxoplasma gondii
  source 1..1910: mol_type = genomic DNA
atccctgctcacctctggaagcgaaactttctcctttcttcttgttcttgctcggagtacggctcgaagtggcgagccaggcgttgctgctcctgagcagtcgggaggtagaagtcggctccctcgacaagcgtgcctcgactgagttgtctcttgtagtccacagcggggagacggtacgctccgctcggcttcagacgatccagaaccagctggttgcgagcctggaaagttctgttcaacgcgacggactcgctgtacacctgcttctcgtacgacttgttccaatgctgaatcatctgctgtcgccactgcgcagagacagagagaaaaaaacagaaagcaaatgtgcaacgtgcagagtgcggcccagacgctggagccgacgagggacgcacccgcgaaacgaggagagagacacgagagaagatccgcgaggagacaccgcggcgcgagtgaaaaagccagaggggagggagagagaaaagaacgtgtgggagagattcgccgggctccgaagccgcagacggcacctgaggtctgccctgtctggtaacaggcgccgagggggttccactgcattcgttcacgatgcctttcttcaggacacacagtcacctctcggatagtaaacgcacgactcgctggctcctttctctgccctgagtcacccctgtgtctttctcatgcctctgatccgctcgctcatcctccctttctcctcagcacccgcttcctcattccgggtcacttcccccctgtagttcccttcttcctctcctcccgttcaccttcccctgtgcagaaaccagtggacagacatctctgtcgcgaggcgagcgccaacagagggtcgccttggtgggtgtcctttctgctcctttttgagtctccgactgcattctcccccaccggggagtcatccctttgcttccttccacctgcctttcttccgcgttgattccctctcctttatctgaagcggagcagagagacaagaccgagctgagacgcctgtcttccactcgaccgcgcacagagcgcgtggaggggagtcgtcaaagtcgatttcgtgtgacgggagagcctggatcgctcgtacctgaactggaactttcatccagatcttgtccttgtatccagggaacagcttgttcagcgcgccgcctccgccgcctcccattttgccaacgcggtggacagacagagaatcgcggtcgaccaagtgggtgtttcgcgagaaaacgcggcactcaggaaagagactctccacgcagagagtccgaatgccagcctgcgtgctccaggtcctcgccgtacgcgacagacggggcagagaacacagtcagagagacggcgaggaaacgcgagatcgagaagcgcacaggaaaaggacgaggcgcgagactgagaaaggacgcgaagaaaagcggataggcgcgcacatgccacacgcacatatacatacatacaccacagatgcgaccatgcccaggacgcctcgaaagatgatttggacctcgaattttcacgggcgcaagcaaatcgtctcgcgagatgtctttgtcgcgttctgagccgacacgcaatttgcacagagagaagagccgacaatcccccaactttttcgccgccaccgactgcgaaaacaacgcacttcaccctcgccttttagtaggggacaccgtgtccccgcgaaccccaggtgacggcctcccgctcgcacggtcgcagaacggagtgcatgcgcgtgcggaaatctcggtggtgcattccgagaagccgctaaacatctacttttaccagacactacacgagcccgggcaaaggggtcgagacccggggagaaaactcgagccccccagaagcaaatacagcgaaagtccgactccacgcggaaaacggtcgca

SEQ ID NO: 1504 - DNA, 1542 bp, Toxoplasma gondii
  source 1..1542: mol_type = genomic DNA
atattccttttcttcctgagctttccttcgaatgtccgcgagggtcatattgtccttgatcccgaaagatgcggagtagggcgaagccgcagggccctgccccttctgtccaacggctgcatagagagcatttgcttccggcgtcgaaggagagaatcgcgttccgaccacaaagcgttcggcggcatctacatcgccgcctggactcacgcccataggattgggaggagatgccatggtggagagagtcacaaggtgaagcaagaaacgcgcagcaggcagaaactcaagaagcagaggtacgcaggaaacacaggcaggtgagccccacacagaggagaccagactaaagagggcagcaacatagaggaggccaaagagaccggtagtaacgaagaggagcgacgagacggggaaaaaaggattggaaccaccgaaaacgaataagggggagccggatcagtgagacggatgaaggaacccggggagggtggacaaccacgaggagtcaggcaaacaagtgttgcgagagaaagcgcctccgttggtcctgcttctcgatggcgtcgggagctcaagtggtgagaagttatagttgcggagaaacaacgggacaaggaacaggattacgtgtttgctggaaaccggaggctataggattcctcaacccgacaggaagtgcctccaccgagtctctcctccccagccactaattcgaggaacagcacaggccgtcgcatacacaataccccgaaaacagacaatggaggtgacgaaggatcttgcctgagacattctcgcgcattgtgtcgagtctctgtggactcaagagggtccgacaccctgctgccccgatgagagaagatgtgcaggatcgtggttggagggtacagaaagatactggacacaggggtgggtgagaagatcacgaaagaggagcagcaaagtggaaaacagcaactgaatgccttggaactctcatccaacaatgacttcatctcgcggctgcatgcagttccactttttctcccgcttctgtgcaagagcgctaccccgggcaagcccgaaaaaaagaagacactggcatgcgcgtcccgtaatcatctatagtatgtttctgactcatttgtttcaccttcctaccttcacgtcccttcctcactaaaggaggaagaggggaaatcgtcacgctggaaaagtggaaagcactgcatgcatcaatcgaggctccagacagaagcgcccatagcacgcggagagtatctgtttatggtgttcgggagttttgcttggccaaacactagtgaaaggtaggaattagtcaacagaggacactggcaagcatttctgccgttagcctgtcgcacacgggatttcaagcgaggttctggcggagaaggacgcgtctcgtcgcgaggaactcttgataataacttctctttggccagaagacagttgtgcgcagtctttccctcatggcaattttgcctcttttcaatgttctacggaacagataactttacatactgctatgcgtataca

SEQ ID NO: 1505 - DNA, 1858 bp, Toxoplasma gondii
  source 1..1858: mol_type = genomic DNA
ggtatgtgtttgtctataacaataaatgaatatctttagctctattcagtaaggtgtgtgcacaggagtagggacggagtaggtttttcgtgcgtcttcggagtcatctcagggagcgcatgcagcaggttcccctgtgtgaattcttcgtcttccaggcgttccgacagccggcagttcaaagacgcatcgctctctcttcagtcgatccgaaatgaggtttcaagaatgtcgacgctatagatatctggataccacgtcactgccacagaccttctaggtatctctctgcccctatgaattccgtggatatctctatactacacctgtcaaaccgaatctcacgtattggtgagtgttttctggatgtagtccgactcatcttcccctgtcgtacctgcacaactgcagccttgcatttgcatttacttgttctcttggcacacctagcgactctgcagagtccattaaatcccctggagatgccgacagacctctgatccctttgtatgtctgtcagtttcctattgctcactcgctactgctaagggaaggaatcagtgttactctcttttccgacttctcgactctggatgcatgcttaactctcccaacgagtctctttcttcgagtgagtcccacgtagggagaagggagagaaaagcgagaaaaactaaagagaacgcacgaaagaagcggaacgtcaggtcagaagcccgcacaccacggaaggaacggagaggacgaagatgttgagaagggcaccagagaagagaaaaatcgaggacatgcatgagagggagaaagaacagaagcgcggcaaagtggaagaagacatggccaggagacagagaaaaacagacagaagatctgggcaagacgtcccttttttctccctttttctccctcttcgggccggtgctgggtgcacggccgatgaagaagctgagagggaaaacgtccacaaagtgtgtttcctttccttccacaatcgaagttggaagctgagtgtgaaagaaaaacaaaaaaaaaacgttcttcctcagtcgtcaaaccaatacggggtctacatttttcacagttgttggcggacgttcgtgtcttgtcgccccggcgtctctcgggcaggctgcgtgcttgcatgcagtgtgcactgcaaagttctgaaacattttgtggagagagaggcggtgttcttccttctttcttacgtttctctttcacttttccctcgctttttcgagggcgagatgaaaaacaacagtcctcgtagtgagcggggcaagtaggcctcctcactcgcgctcagccacatcaagaccgagctcgcaaaatcgcgttctccacgacacacagtcgattttctcttgtcttttcttctttcttctgccttcttttctctcttcttctctgtctttttctctgtctccgcgttttcgttattccctctgcccttcttctcgttctttccgctccttctcccctccctgtcttctttctttctcttcggtggacgcccttccttcgctcgttttgatctgcggtcctccggtttctctcctcatctctgtcctgttgtcttcgcattctgcgttttcatctgtctccctgctgtcgaggagaccgtcttttcctctcgcttccataagaggtcagataagatccctcacgtcgatgctcctccccgcatacgctgccttccgtccacgccttccacccgttgtttcgtctcgtccatgcatttcggcgaactgtctcttctcgtttagcggcttctcaagtcctctgccccccgacgcgtctgattccgaattgtattttcgattcctttgcacatgaagtcgcgacacaggcacca

SEQ ID NO: 1506 - DNA, 2528 bp, Toxoplasma gondii
  source 1..2528: mol_type = genomic DNA
agaacacacagaaggtagtgtaggtgacgaagacgcaagactggtgccagctccgtgagcggaccctgcacacctagtcttatgcatgaatacatgtggaagtatatatatatatatatatatacatatatatatatatatgcatctacacaaatgcacgcacatcatgtgcatgcgtgatgcagaagaggcaatgggatgtgcgttagtggctctcgtcgttgcacgatctcccttcaaagttttgcatatctctgcggacagactagatgcatgcttatactaaatgggtacgaaagtctctgttagtgtgcctctgcggtaaacggaagcgtgtcaggtatctaaaggggagcacgtccacccgttgaaaaaacgacgagacgcaaacacgaatcgcaaaaatagaagtttcgccaaatgtctggctcctaaaaattccctgttgtgttgagaactctctggtgcacgaatacgaacgacgcgacatttgcgggagacagaggacaccgacgactgcctgtcggtgccgattgactggtccgttcgtctctctgaatatttgtaaataccagcattttcccccccacaagaaagttaccggatttgtctagtgaggaatcgagcagcacctaaacaaaaagaaagcaaatcaacagagtgcgttaccggatttgtctagtgaggaatcgagcagcacctaaacaaaaagaaagcaaatcaacagagtgcgatccacagcataaagactgggacaacaatgggggagtataccggtatacctgaatatcggtgaaaggacttgcgtctgcacagagcaagagttatatgaaggtggtagacgtagatacgactgcggaaaacatagtcatacaagtcttcaatggagactaacgacacgcagggtgggtgtttctgtaaagtcctccatgggcgaaaactgtccattacatcggatgtgcatttttatcgttgggtcgagcagaggagtgttgacgacggtgattatagacatttgcctccagagattgcagttggcatgtagcaggggaagttctggaggtaactgttgtgatcccttttttctgtccaaaaccatagactcctttcgttcgagatttgtttgattgtatacgcggaggtgtgaagtgttctgaacccaggtctgcggcttgttgtctgtacgttgttgcctcatcgtttcgtgttctctcggctgtaccgctgctaaacagccttccacggtgtctctcttttctgtgtcaagagaaaccgaaaccatgtgacggcaactttagtcccatcctctcacagtttctaggtcatcttcctccattcgtgaatgctcaatctttaatgttgcgcagacccagatgggtcaaggagtggaagctcgttcgatttccgtcaagttctggatctgtaaacgtggagcctctggttctgtttatacatccacaattttcaatggcaggtcgggaacaaattgtcaccaggtgttcgtaccgcagctcatgcatcagatctcacagtgagctacagctcctaggagaagaacggaggaggacgaacggttctcaggccactttgtaccctggacaactcatcccagatgagacacgactatttcaacacttttcacacatagcattttaactgacaaaggcggagcttctccccgccgtccctgaatgaaacattcccgtgcagccttcaggttgagcgtgtggggtggggaaagcgtgaaaaccaagaacttctttttttttactaatctgaataaaaaggccctgaaagtgacaaaaggttcatgagcacgtcggttctcctggctggcttcttcggttaatgtaccagcgctcgctctaagcagatgtgtagccttgtgccgcgtctcgcagtcgtgtgcaacgtgttaatctcttgcgaatttttttccgttctcctgcgaaatcacgcagaaaaacgcagtctcaccactgtagactcccgcaagtttgcctaattgccatgtctcaaagaagttctcaacggaacaaacaggcctatgaaacagggccctgaggacatgtaggccgcgcttctttcactttcttgccgacgctaataccaagctgcccacaaaaagagcgtccgtttctctgcaccacgccggtgacaatctcgtaaaccaacaggcgccttggcacgcacgtcggtggtgaggaattatgtgaggctctcgagcgtcggaaaggcaatacggcagcaaccagctttctggctgggccaatctgcccgcggaatgctgtcaagatctcgccctctcaccctcttcctccgtctccctccgtgacgccctgcgcacgcgtttgcggggaagaatttccgtgatgtgcatgcgttggccaccctactacagtgatagagctgagattcgccacgacgcagcaagaggacctttgggaaacagtctgtcctgttcttcttttcttgcgcttttggcttcgttccgatcgtccgcgagtcttcccctcgtttttacacaa

SEQ ID NO: 1507 - DNA, 2950 bp, Toxoplasma gondii
  source 1..2950: mol_type = genomic DNA
gcatttcctcctttgcaaggcaatcaggagtatcggagtgctcatgtgtgtcgcggtgattggatcaagtcagcaatggcttttccccagttgcctttctcgaagtgcctctgtgttgcacgcgccctgcgcttcccttccttgtatgcgtcttctctcctttcacgccgacttccgctcttccggcttttcaaaaaatgcagtgcacgtcttttacgaatcgacggttttcaggggctctctggagagacaccacgcgtgttcatagcaaagctttccacttgtctacatgcgtttctgtttgtctccatttcgctgtcgcgagggtacggcggtgcgtgatatgctgttttgtagtcgcgcgtttatgtggacgacgtcacgtcgcttgctgcttcttcgtctctcggcttcctctccgtatctctcctatttgtctcgtaatggacgcctgatgtaaactgtctcctatttctcaagactttttttcgcctctttgttacgtcttctaggtatcttttgtcgcgtcgacggccgtctactgtaccccaattgtgtccgttggagccgatgcgtttaacctgaatatagggactttctcctgtggtaacgagtgttagcgtcttaaatgtttgcgccagtgcgaattttcgcgttccagcacgcattcgcctgcggcgaccctggcgtggaatctccagtgaggcactgtactgcagcggtcaccacctcctgtctccgaatctgtgtccacctggagcacaaaaaaccaatacttccatctcttcgactttttcgttttagtctgcgatatcggagtcttgcaacgagacgcactcgcgcactcaacggcgcctctttgtgatacaaatgtaccgacgatcccttggcaacagccggggaaatggcaaatttccctgctgatggtctcccagtgacacacgcttagaggcatgtcgtttgctctaaaggcgcgtccgtgaagcagacggttgcttgctggaaaactcagacgcaaagaagttaccgctaccgcaaaagcaggcaaggtgccccgactttgcgtctagtctccggccctcaaactgcagccgactgactggcgagctagatctgttcacgtctgtgctgagcggtaacgccgatacgaattggcgtatagaggttctgcaccaaaggggctgaattcggtagtggtcttggttggacaatgctccccccattaagtactatcttgatggagctggagacgacgccgttcacttctttgaatagccgtttttctttgagggtattccagggcctcatcacctgtcacgaagctcatgtctgaatttcttttttctgtgtggagcgctggcggcactcttgtgcctgagcgaaaacggactgccgcgaattcatccgcgacttccaggaacacaccgcggtgcacgcacacctcaggtccagtggcgcagcacgcatcactgtaagttctgtacttttgcgatttgtggattgccggtaagcgttcgaaattcggacgtgcccgctgtggtacgggtcaacgattgccgtccaacgactcttcaataccgaacgcggaatgtggcaggaaaatcctacgttctttgcggggaacttgcagatgcgcatccagtacgagagtggtcagtagtgacagttccgacagtcaacaaatgcatgaaagctgcgagattacgaaatttgggaattttcccgctggatgccgttcctcaacggccagtgcctcctccctctgcagtaaaacggacgatgcacggacttccagttatgctacgctgagcagcttgacccgttcagacgtgctcttcatgtgagtgggcgttccaccgttcgtcgtcgcgtaacggaaatgtacgcgatgtttgctcaggcgagctttactggcctcccctgtcgagaagaacatttacagcttacaggttcgaaatcaggtgtcgcgtgttttccgccgtgcattccattagagaagccggctagtttttcaaataagcgcgggaggccattgtacttcacgcacttaccatggtggtcatgaacaacacagtagaacttggatattgctcttttcaagtcacttctcgtttgtccttaattctctctcttttatccccgcggcacctttatgacgtgcacgcaggtgttcgtgtgtcgtcgtaatcgaaaaacaacgctcagatcgctcctacgctacgactccaaatttatatacggtgtctaactcgcgtgtctttcactcggttgatcgaaaaccaacgaacccgccggtggaatttgagcgttgtttcgagtgaacgaacagcttctgccgcactctcaaggcggtcgacagtgcgggtgtgtgggggttctactagctctcgatgcattccagtgatgagcagccactcgtgggtgtggcgaatacgtcgctttgtttccttcgtatcaagctgcctggcagtgtataacgacggcagaaaggggatgttgtttgcttaacgccctgctcacttaagtacgattgcgcgagctgtgaaacaaaatcggaactcggctaacttatctcgtacacatctcacgattctctcgagctgaaactcgtggccagacagaccgagagcgaggctgctcctctgtgtttgcaattcagtagcgaacgctggggttgtgcgtccgtccctacataacggagatcatgcctgaagtgtcactgggtcagtgccagggaccagtgccgggcactgttccggcacttgacagtgtgtccggcgctctgcctttggtacacgtctgtcgggggacacctgagctagccacccatccccctaagtgagttttttggagttttctctgtgaattctctaaagaaaaaactatgaggagacacgcgagaagaagttcgggcgcggagtgaacaatgccgccatcatagccacaaaaa

SEQ ID NO: 1508 - DNA, 2958 bp, Toxoplasma gondii
  source 1..2958: mol_type = genomic DNA
cgcgacatattcacggcttcccacatacggaccacattttccttctccccccgcccttcacgcctacgctttcgtgtgatccccgatatcgactcagacttaccttttctgatgtagacctccgcgtaacgtggaatgtcgtccacgctgatgtcacgaagaaagctgctggggatgcccgtggcggggcggatttttttttggtgccgcgggtcgtttgaccgcgtacagttgcggatgtggtggcctctctcaccgcacatgtggcaaatgtagtcttcacctacggggacgtagccagccgcagtcgggaggttggagcccacagcgcctcggccgacaccaaaggcagtctgtgccgcgcctgcagctgaagcccccagagaaggcgcctggtacccgcgacccgcgctgaatccccagccccgtccgcgtccgaatcccgatgaatagccggcagagaagcgtccctccgaagaagcaaagccaccaccggcgacggcctgcgaggagctggtctgcggtccacggtgctctgcatgctgttcaatgacggcttgcagtagggcagcttcatcttcctcgtcgttatttgcagattccccagtttcaccttcgagagccgagcctccggaggcgaaaggaacttcgcgcgtcgacagagaaaggccgccggaactcgacgaaggatctacttggtcggtacgggcgggggtaacaacattcggggtagctctcgagccgttgagggaaggtgccaattgtttgctccctgattctttttcggcagagacatcgtggaagtctcctacggacgcagaacgcacgatgtcagtgactgcaggtgtgctgtctttctgccgatgaaaagctctgtcagcaatgtcaagggcagcctgtgcctccgccgcactcgtgcgctggagaagcagtgagcacggatgccgcaaagggaagagatctgaaagcggactcgacggatcggactcgaggaaaagaagcgcgtccagctggggagtcgcttccaagcccgtctgtttcttcagaaacgcgcgaatctcaccgcaaaaaaccggcagcggcaaagacaccggcgcatacggcgtgttgctgcctttgaaacgccattgcacgaaacgcagcgaagaagaaaaaccagtagacaccattggacgtttcgaggaaaaagttaggattcgaggagacagggcgccgtcaaaaaggtgccgctcacataagggaacggcactgcggcagggaaatcctgcagtttccgcaccacaaccgcaaacaccaggcagaggacaccttagacttcctttttcagtgacaacggtaagagagcgatgggaataaaaaacaaccctgtgaccaaactcagcgattcttggagaaagggccccaactcgcacttcccacggatgcgaagaattccacgaaactcgagttgacgtggacaacgggaaaaaaactacagacgcgaacaggaaactcacagaacccggcatcacagataatccaacaatgccatcctgcgcctctgagctttggaaaaggattcggctgcccgaacaaatgctctctagttttttttcccgttctcttacgtaaaaccatgggagtgtgagacggaacgacttggtccttcgaagtaaagccgctactgctcctgttttcagagaatcccgatgagcgttgtgcgaaaagacaacacgagcgccgcgactctacagaaacaacctcatagctctacattttcacaaggggcgtcgattcggcctatattccgaaacggcatcgacagcgctccctccaagactctcgggagactagaaaagcccctgcagcgaaatacggagaagttttgcgaccgtagaatttacaggcagatgccacagaaatccataacttacttttaacaccagtggccgaataggtttttatttaaatcgttgaagacggaaaccaaagtgccggggtgtgtacccgagcctctcagctgctgacacaaggtcgggtgcacccgtgtcgtgtctcgcctttgggaaaggcgagacggcgaactcgttccacaggcacgcgttttgaggagttcatctgtgaatgtctccttttgttctttcctttcaagtgatttcgataatttatttctctggggaacggcacgagaatcgctcagctcgcatctctccggcgacctgtctctggcagtgtcttcacggccaagcaaccctcagtgtgcaggcgcacacacagcacttcttcgcgttgaacactggtttcactatcttttctggaggatgtttgtgccttctctcgggttttcattctctagtctgccagcagttcttcacccttttccccggtgactttttcaccgcctcatctctccaatttctagtcgacttttcgctttcgctgttgcccccacgtcgtctccgtcatgtgtcttcctagacctgtctcccgttacagcgaagcgagacaatgtcctttgaagtatatgtgagtgtgtcactttgacacggagaaagtgtgtttcgcgtgcacatcagtcgtttcgacgttcaccgtcccgccctcaaattcgttaaaccatttagttcaaaaggaaacctcactctgtcccggcgcttggactttttctccactgtcggttgttgtttattactcatacagattggaggagacatttcgctctcgaatggagacggaaatcccgaaatttcgtgtttgtctgagtgcaccgaaggccgcatttgctcgattaaccatttactgttggtattcctgacgcgtgtgtgttccacgcctctttctcggccggaaaaagcgaggacatcgaagagacgacaaccacctgcatactttatttttctcttattctgtcccatttacgctttcggactcttcactttttccgcaccaggcctgcctacggtgtattaccgggcagaa

SEQ ID NO: 1509 - DNA, 2159 bp, Toxoplasma gondii
  source 1..2159: mol_type = genomic DNA
tgcatgcactgcttcgaacaatccgtatcggctgtcgaacttcttcaacgaggcccgcgctggcgaaagtgcgtagagcgtgaccggaattcccgaagatttggaagtttctgtgcatgcacatcgcgttgctgttccatcccacgatctcagtgcaagagaaagcaacaggcgaacggtgcatgggtccctttttttttccgcccgggactgtcgaacatgcgacagtgactgaactgtgcctgttcgtaggatgtgtgtttgcgaagaagcgggtgtctatacaccccgactgcgcggcagccgaaagcgttgcctgctggcttctgtcgagtgtggagttctcaggtttccgtttaaagattcaaatgcgtttttaggcgttctcgatagggaagagggacgtgcaagcgtcgtggcaagcggttgcgttgtggactgaggtcgtctcacgagaggcgcctcatttttgagatcgttggcagttttagagagcgcaaagccaggttgtagaggcagtttggagatactggaacgtgcgtcgtcagacgagacgcatgtgtgagagacttgactgtatttttcaaccattttttctacttgcgacggtttggcaaacgatagccgtcctcagtggagaagggcggaacatttggcgggacacagaccgggaacctacggaggccgcgaatcggaatttcgcgtttgcaagagcaagaggagccgcagaaacagtggaaccatctgtcgagaaccactcttgcatttggtagagcatgcttgcgcagctcctttcgaagaaacatacacttgcacacgttcgtgtgcacggtgtcactggaggtcccgcggttaaacctcaccggcgtacagaaatcgatggactgcagtcaagcgcaaggagcctcggcgccattagttgcacgcttcgttttcaagaatgtttggaggcatacaagaagaggtcaccacaggtgtcacagtgtatatcgaaagcggcgaaacaaagtctgtcacatttgagtgacgcagaaagcgaatcctaccggcagctattgttgtcgcaaaggtttcgtagccaagtctttgactacgccgtagaacaagctatttcaccgcgaaagtactcgcgcaacgggagactcgttaatcgtggctagcacataatagtgcagagtgaaatgcgtcgagaaatgaagaccgagaggctctgttgtcgtagccacgcacgctttgaaccgtatggatgcagacgggaaaaggaaaatgccctacacaacttccacgcgtatgcctagcgtagtcgtcgagaatcgacgcgcaccccacataggccactaaacgcgacagaacgtctgtcctacagctacgtaaactcctgttcaagagacacataattttgctcgcaatgttggagtttctccggtgaaacctatcccgtcgcgggtccatgtttcttttagagacctacatatctcggcagtcttgtatcgtagtgtgtttggccgtacatccggtctgcgattcggtgccgttgaaatgaagcggccatttcccagtcggtcactggagttcatcttcttttcagatcaaacgttctgatgaggacacagttcctcatttcctcgatttcctaaagccccttgttaaccggccgcccaggtcatcggcaggtggagtgagcgccgttcgttctctgccacctgccgcagcctgtgtaccgagacactttccccaatctggaaaacgcctgggcacacgtctcttgtcgcacttagttgtggcttgcaagtgtttcgtttctgggggcggattcacctgcaatgtgtttgcccagcgtcattgaccgatcggcgtgtctacaggataaactcgaagaccagacaggcatcgaacgtcgaatgccacacacaagcatgtctcccggatggtggcgctgctactcacgagtttcgtccgtgattcagaaaaagccccgatatcggagataaaacgcaatgtttgcgcctgttggctacaccaaagtgttggtagcaaaccgtgggagacgaacgtttccctcagtggctggaaaaagcgtcgcatcgacgcctgcaagcggtccatcacgtttcgccctttctgttgagcaggttccccggaaggcgaaggcagcaaca

SEQ ID NO: 1510 - DNA, 2836 bp, Toxoplasma gondii
  source 1..2836: mol_type = genomic DNA
cgttcaggcttcaagtgctgcagcaaccgtttcccgaaaacgtcttgggtcagaagagacggatctgcggctctgtgaggcccccctctcgatctggactgcatgcaaagagcgaacgtgcgagaggacgacgcgagagagacttctgcgtttcaacagcagcaaaatcatcactcgcttctcgcgcggccgcggctttctcgcgtcgcctcccctcgtcgcccgctcgacgtctggtatctttcaggctctgtgcattgtctccgtgagcctcgcgggtgcatgcgcctctccggctgttctcgcctgactgaaaaattcaatttcttctctgtgccgcttggagccttccccgcgggggagaggagccgttcagagagagacgcacgttgacggaagaggaaaacgagacaaaatggcctgggacaggcccaaaaacggggagaagtagcaacgcagacggaggtgagccgaggagaaaacgagtcctgacgaggagagtgggaaacggcgcgcagaagggagacgaagagagcgtcgttttcagagctaacgaagaaaaggtacacgaacaaaggagaggacaagggagaggaccgagaaagaacggaacgacagacaagagggatgaataaaagatctcttgtttgcagatttaacgaaggacgagaggtcgactgggcttacacggagggggagagaagacaccagaaaaaccgagaccgcgacgagaagaattttctccactctcgccaaaaagcgtcctcttgtcaccgtaaaagcgtggcgtcagatctgccaaaaggcttttttacaggcttcgtcgcgccttctcctcttgaagccctacaccaagaacaggcatgcatgcagatacgcgtctctcgaccctcacctccacctgcgtaccgatttgtgctttacaggtccacagcagattccagacggccctgcgggtgcgtttgtactcgaaaaaatgcattgatgcacagctgtgtgctgcatgtgcgtcctgcggtccgacccaaacagaaaaggtcgaggaccgactgcagcgtccgcctacgggcgaaggtcgtctttgtatcggacaagaaagcctttctgtgacgaagtttggcccgcgaaggaggcgaaaaggccttctcccttgtgcttcgtgcttcccttgggagtcgcgcgcaagcccgagttgcgcggaggcggaacttccgcagctgtcgggtgtacatacagctcgaactgtgcccggtcagcagatcgccagggaatccaagagaagacggagagaccctcctggctcacgactgcgcggcagagagcaagaaaggagacaggggaaggaggaagccgagcgacgagttcggagaggagcagggaaagttcgcgcatgcagcgcaggccccgcagcagagaagcgatggacagcgcgggaacagcggattcacagcgttaaatctcccgagttgtcgcctgaagagaaagagaagacagagaaaaagtgacgggctgcggacgcggagggcaaggacctcgagccccgtgcgaaaagtggcgagcgcaaaaccggggagaaaggacgacggcgcttgagtgggcggagcgcgcggcgaggaaaggtgatgaaatcagaggctgttgtcgcggcgagaaacgtggagtcgttcgggagatcgcgccgaaaaaagagcaagctgacagagtcgcgcgaagaaatacggaaaaaccgagttcgacgccaacaagcgaaaaacggggtgtacctacacaacgcgccttgggggggtggtcgctccgggctgcgcggtgtatgtacacctcacgtggcatgcgaaaagaattcaagacaccgccaccgaccccaagcaggtttttcggcagtttcgccgggggcccagggcgctcgggtgcctcgaactttctttctccggtgtatttttctctccttttctgccagccagctcctgagggtcctcgtctgagtgttcagacacctcagggacggccttgcgcctcgacgcatcgtctctcttctggtcttctgcaaaggggagaaccaagtttttcgcgggccctccaggtgccctctctgccggacgatgtgaccacttgcgaggagagaaaaagtatatttcaagcgttaaaatgaacctgctctgcacgcagctgccaacttgcatagctcggtgcctatcagaaggaaggggcggcgacgctctcgctttctccggcttctctctacctgccagctctctggcgacgcagcagtgtgtgcgtcgtgtcttctcgaaatcctcttataaagacgggtctcctagagaaaagaaagtctcgaaaataagaggatttcttcctcagaagagaaacaagttcttttccctccacgcctccgcctcagcaggaatctggacgcagttcccttcttctccataacggcctggttcggtgcgccacgaagctgctcctcattctgctccccgtccgtctcacgcagcgccctcttctcttcaacattccgtgtatcctccatctctctgctttttctcgtcgccacccgcgtactctcctacttccgagtgtgtaggagcctgaccgcccccgtccacgcgtcgatcgattccgcctcttcatcgctgtcgacttctctctcctctggacagccctccttcgacagcctgtctctcagctctttgcagcccctattctcatctaacggtcatcctttctgtctctcctctctgtctctccttccctccttccttcccttttctctgttgccattctcaccctcctttccgctggcttcaactggcctttctgtctctctgtttcgcga

SEQ ID NO: 1511 - DNA, 4577 bp, Toxoplasma gondii
  source 1..4577: mol_type = genomic DNA
tactggcagaagagatgatctttcttgtcaagagcaagtccaacagccgtctgcagcgcttcttcaccctgattctggatgtaaaaggaaatacgtcctgagaacaagaaacgcccacgtccgttgtcagagccaagcgcgtcaaaagcgaaaccaaactgaaggaagatcaagagagagaatgctggggagacatgatcaacgctgcttctgctgaagtcgtacttgcagcagccccacaaccgcggatcgacggaggcgagtctctatcaaccgctcttctgtcgcttcgtcaacagttctagaatatcgaggacaaaggacagtccagttcgactacaggttttcaaagaacctcatgaacgtggacgagacagcaaatacaacttcctctctctgggggaggctgcatgcatctacgcagaaatccccagtccgcgagccgagaaaaagccgcagatgtgcctgtatacccctgggatccgggtgcacgtagagccgggaaagattcaggtgtacatacagctggagatttcaggtatatgtgcaccacacagattcggttgtacatacacctgccgaattcaggtgctttccatgcaccacatggaatcggttggccagccagcggcccggaccgggtgcgtcgcgcagcgggagtggcgcggcattttctgtattcagggcacaggcagtcgttgtcagccccgtccttcgttgacggattgtctcacggcgtcaggttctgcgtttctccccgctgcggcgctcaccttgtctctggacgctgtagaacatgttgtcccagatgctcagtttgaccatgaactggtaggcctcgagaacctcgtcattggtcatggggcactgccagccgtccgcgatttgtccgtcgtagtccaggatgcggaagatgggaatgacgggagtttcgttgctgatgttcatgtcggttgtgaactgggtgtgaatcagcccggcgtggtacgcttcctcgcgggggcctgctgcggcgctggagaacgttcgcacgccggcgctgaagaggcggctggctgatttttgggcataaacggaagaggatttgagaagggaaacggggtgctgcccaacaacaggggcagagaaaagccgcgaggcgccggcgggctgcagaagccgcctgaagaacgaggaggccgtgtgcgccatcttttgcgcaggggtcgaggtgtccagaaaaaacggtatgagtttgcagggaagcagaaagcgagagacaaggaccgacgggcgccgccgattgaacacgcgtgaggccggcgaaaagtcgaaacaagaagtcggctcagagggccggtccacggagccttcgcaactcagagcagaaacaagggcgaaaaaagtgttgttcggtgacgaggaacagcgcgagaaaaggaaggtccaagtcgagcgacggcgcgggaggacacacgaagaaacgacggaagaagcggagccgccctctatcgaggcaggcgcgaaaaaccgcatgtgacagcgggatgacccacccggagtgcccgcctgctttggttgggacgagtgcttcggaacagcgtgtggcgatagacgagcaaaaaacgcaaagtcttcgaagatgccaagcgaatgcgtccccgaatttcttcccagtcgatgacaagcacgaaacccgcacgtctccggttccgacccctcagacaaaccgacgacagttgccgcacactgctccgcgcctttcaggcgggtatcaacaacttccgcaacagccaagagctgtctttcacctgacccctcagctctcgttgcgtttctagactagagaacgcattcaccatgaggaaagtcaaagtcgctcacgaattactacgcgaccgcagagagcgaacgagtaacggggaaccccaaagtgtacgcttgcgctcatttctcacaaaccattgatgtcagcctgaggcgacaacctccaaaccgcgctggaacgtctgaagttcaccgtaggaagctcttgagtccgttcctccctccagcgctgtcttgagaccttggcacattgtcatgtgcccaggaaaaggggaaacgacatgctcacactctggagacacggttttctatccgcagctgttcccgttctttgaacatcccgaagaataattcctcttttaactgttactgtctcaccgagacgactcgcaagtgacaaaaatcgtgttcaggactcacgggccgacgcacacatcgggtggacatagtcgaaatgcaaattcgaagaaagggaacccccgctggcagaactggagctcaacacaaaaaggtgtccaggtgcgccagtgtaccgatataaacggagctgttatttgcgttcgcggtcggaccgtgtgacagctatgcagcaggagcgagcggagctaaagaagcctcggtggaatgagcagattcatgagaacgtctccccagaggaagtaactcagagtgctcttcgcttggaccttgttctagagagtcagggaaccggagagccccccgagaaagcgtttctccaggggatctcagtcctacattgccgtcaccattcgtacagactagacagaacaactagcctcttgaagttgcttcttacatgcaacgggcatcagagagaaaagagtgcccacttattcagaactgtgacctgtcgatttccgcgggtgtcttcgcagtttcgccgaacaacgagggttgggaagacccccacttcaggctgtgtctcgccctggctactaaactgttttctcaggtcgctaagtggttgctgagttgaatccgtcgtgttgttcgtggcaagtggaattgcagctctgcggtagtatccagttgtctctgtcctagcttggcgtttcaagcctgcaaaaggtcgcgagtgtcttggaggcaaagaacgttatccattctgaaagtgtcaaccctccaaggcagggattttcgtagatttgtcgagactcctcagtccagcttttgttgtcttaagcactacagggggtcgtggtcgtgagcaatcgtacataacttggctgtcagtcccttgaaatgactgggtttctattcagtaacctaggtactccagtgtcttttaaagagcatctggagtgaaagttgcaaatgaagaaacaaatgcgcctccaggtgaacctcgcagagagggtggcaaagcagtgaggctgtctcggcgtggtcagaaagattcaattattttcccctctttgctcatttttttcccttcgccgtcttcctgcacattcgcactcagaccttctttctttgtaccttttctggtagagaagcgtgccttctattccaggcttatttacagatacatgcatacacgcatcattaatatccatattatatatagatacatatacatacccatgagtacatattttcatacatgttacatacatctactgatttaaatatatcttatatatttgttcaattatctttacggttcgtttgctaacatttacctgttttactactccaggaggtacagagagaggtgtagtcaagggtagtgctggccacattgggagagctgctacaagaggcgggggcttcagtgtaagccggcgttcgctgctctgccccagtctctgtccaacgttgtttgaaatttccttaaaagagcgacaaaagccaaaattcgtgtttcgcttgaatcgtgcacaagcagcctgtttcgcctgtcaggaacctgcggcctcctcctcgtgttttgacacacacgaacatgttcatgcgtgttgcagacgcattgagaaaggcatgcaaacgactgcacaccgtggtttcccgtgtagaagttcgctttgaaagagatcggattcgcggatgtgttagcgtttgcctttcgtgccctttgtcacttgcagaagccgttgccgggtgcacactgcagtttgtgcgcgcatgcagggagacggaagacacccggggaagtctttctgaaaagcgagggggcctttacttttttcagccggctgcttggcacttttctctgggttcttgtgcctcgtggttcactcaacgcactgttttttctgtgcaagtgctctcctccaggtgcgggagtgtttcttcctctcagtctttttatgcagagatgtgcaggcaccggagtacagtccgtgtgtcttaatcgctccttgaatgtgaaggcgtgtgcagtttctttcctcgttttctctcttcttgtctccagttttgttccagaaaaacgacctccgtggaaccctgagacctaaataccccaatctacgtcctggaaccccttgccagcgtcgccttctgtcttccgttcttcgccttttcgttttctgtcctgttgctctctcgtttttctcccgtgctccttcttctctgcctgttgttcgcgtttctcattcttctttgtctctgtttcacatcgcagagagcgcccgttcggtctgggcgtggcaacggcgtgtcttgtgttgttcgtcgcgcctttgtttaagctcgagcagccagcaacctttcagtttcgaccgcgtgcgtttagacggaaatcaaca

SEQ ID NO: 1512 - DNA, 1936 bp, Toxoplasma gondii
  source 1..1936: mol_type = genomic DNA
attcgtggatcgcttcctttgctggagttctcgaattgagaaggtgcactggcggttgggtcccgcttgagaacctgcaccgcgaaataaagtaccacagaaagttgcttcctctgtggccgtaacgacttgagcgaggcacctcacagagtgttttcttctgtccagagatgccactggggaagggccgacaacatagaagacaaacggtcatgtcttggatcaaactttcgtggctgaacagcatttccctgtatgcacaagatattttttcagaaagcgggactggcgtaccctatcagtcgccttcactggcgtgctgttcaagtgcatgaagtcatagtaggcaacttggtcctctgcgtggacggcgagctcaaggttatcgatgaggacaacctgtggctcacaaattggtgcgcagacctggttcgctgctccacaagaagcggcgtggatccggtcttgatgcatgcccagcccacagcagtaggaaaacattttggtcactgagtcggcaccagaagcgggtcgtctcgcctgcgtcttcaacagcctgcagctcgcacgaagggatccttacggtgggggtttgacggcagactcgcgggtttgtagtcgtgaggttctggcgttgtgttgaattaagacgacactacatatcttatacctaaatgtgagtgactgcaacgccgcatctgggctccggaagacgccatatgtgctgggaacaaccgcagttgttggcgaagactctctttcacccgcaagacacgagtcaccgctcgccatatgcacataccactcgttacgggaggcggggaaaacaggccaccctttgtcacaacattttcttcagcgcaccaggtgagccgtcgttgttgacgaatgatgccaagcggttcgaatcgaagggccggtgagctaccacgcaattcgaaaaaacagatttcagtgttttctaccgaactagctgtcgccgaaggtggcagacatgtcttgtacccgcttctgcgaagtcacaatgtgaaaattcacacggtgaatctaccgtgtcgattctgaggcccgggaacacacactgcaagcttccttttgaggcccgaaggcaaatgctacagaggatatctgacctcaagagaggctgatggaggcgctctccaaactagcccgctgcatgcgcgaccccgttggccgcttggcatcagaaccgtgctgccgttgagtccgcggtctgccaagcgccgatactggaaatacgccgcggattctctggaattttccgcagcttcttctgtcgacagcgtgctggatcagcctgtgcttaatgttgaacattgttgcccacttgaaggcacttcattcttcgcacgatgcagacaccatcttcttaaaggtgacgtcgtcggtgagaaaccgctgctgaggaatggcagctgccttgtctgcgctaactctcgaaagaattgacagtctgagcacgccaaaacgcttttcgcgtatctttgtccttgtcctgtcacatactcatacgtcgactttttcgcctccacagggagttttttcaaaattcgctgcgacgcagtgtgaaccctcaccacaagacggtcgactagcgactggcggtgatttcccgtcggtcaccatgttggtgaggcggatgtgtggcctatgatcaagagacatccattgctcaaatgtgaagcgtgctttgcaacattatcgggtgacttcgactagtaagggttgcttcaacctccattttcaccaggtccgacttgtcgccgttggcctgtccgtgaccatcctggcataacagtgcgtcgaatcgagaaggcagaacgcggtctccctgagaggcttctgcgggcgctcgacgcacaaactacggtctgtgtagcttgaaacttttgctgcgtctctctctcatccaaga

SEQ ID NO: 1513 - DNA, 1963 bp, Toxoplasma gondii
  source 1..1963: mol_type = genomic DNA
gtcttgcatgcgttgtctcaacagatccacgagaaaacgctctctcggccccgacccgacgtagagcgcagcgagggcgactcttctctctgctctggaaatgaggaacgaagaaacctgaaagaagtgagagggcgtctgcaggaagcggacgcatcgcgccgggactctgaagcagagccgcatgtctcttgcaccggagttagcgaaaatgttaaagagacacgagctccggccctcacctcttccatctctttagcacagatgcgcggacgcacagggcaactctcgccatgtgtctctctactgcctttctagagcttttatgactacatatgcatcgacagttgcatgcatgtaggaatccatgcgaaagagaaagcaccaccagacgtaaacatacacagctatgtgcagaagttctgcgtctcgctgtcgcgaagtcgggagagagaccgtcaagttgcggcgaaacactgttgcctacacactcaaagttaggagacaaatggagacgcgcaatgtctccgggagacaagcgaggcgcgtctgtcgatgtctcccactggacaggtagagaagacaggtaacagcagatgcagagggaacgactcgtgagttcaaaggagtgaaagatgagcggactcaagagctcacgagaaaggctacgagtcgggaaaactcggacgaagaaaacgaatcatcgggaaacagagaggaaaagaacgccgctctttcggagagagcgggaagggactcaggcctgcagtcggacacagagatcttttggcatttctgcaggacagcgaagatgaggaggaaaaaaccgagaaaccgcagaggcgacgcaagagggtcaaacgttgctaaacagagaaaacagcctaaagccccagagaaatcctcggagaaagggaaggagaaaaattgcagacgacgcagctgtgagacacaaccgcagaggacatctgcacatggagagacacgtgagaaacttggatggttttcaaggcctcgacagacgaagagaagagaaaataaaaagtaggaaaaagaagagaagaaaaacgaaaaaaggcgctctcagcgctctcgagtgtcctgagttctgcttttccgaatgcaagagcgaactctgcatgcacacactggctaggcgatatgaaatcgaatccgttttctctgggaagagtcctttttcgagggaataaaccttgaagggttccctttccttccttccttttcctctccgtgagaaacaaagagtctttctcctgtcgatgtacttctgtgcatgcatgtccacgcgtcgccgaaagcggcgacgacatacgctcacaccatttctcgcgcgtcgagaaatcgttgtccttctacgcttttgagtcctaacttcttctcctcatcctctgttttttacggtagttttggcagaagtcctgagcctccgccctcgttctccagtttctcgacctcgcgcgaaggttcttcgccttctctctgctttttctcgccgacgcaagatcgcttctctcttcttccactctctccgtgtcgtttctccgttgttcctttgcgatcgggtgtatcgattctcactcaggcgtctgttccagcgaacgagagatgtcccccttcctcgcctgttcgctgttctctccagatgtctctctgtgcacctgtggattcatatgcagtagcatcacaacgcatccagtctcggtgtcgagcttcatgtcaaacatacgcatgcatatatgctcgtaaatctgcagacatgtgattccgtatatctgcgtgtatgcgcatctgtgtgccccttcatatatatatatatatataaatatatatatatatatatatatataaatatataaataaataaataaatatatatatatatatatatatatggggacgcgcggaggaaggaagattgtcgatttccgtgcgtattgagaga

SEQ ID NO: 1514 - DNA, 2222 bp, Toxoplasma gondii
  source 1..2222: mol_type = genomic DNA
gacgaacatgaagacgcagcagaccatggaggccatgacgagtttcctccgcgcgcgctgagtcccggtttcgcgtccttctccggcctccgtcgtccggtcggcctcgcagcagctctcccgtctcgccttctctgctccgctgcagcatcgtcgggtgtctccacccctcaggccgcagtcgccgaggctgtgcctttggactgcacgggggttgcgatggccgcggctgcatgcgctgtgcgtctctgcgaggcggtgaggccagtgttcgtcgacctcgggaaaggaggccagttcgcgttcgaggccttcctggcctaggcggcttcgaggtgtggaagcgtcgctcggcgggactcggcagcagggcgcgaggtgagcggctgctgcgacaggtcgacctccggtcgcgtcgggcagaaggctctgcatgcggagctctcgcgaacttccatcgcaggtgaggaaagacgctgacgaagcaggtcggtctcctccatgcctgtccctcggcgcacagcaggtcgcctccgcgcgtcgctcgtggacgcctgcgttgccgcgcttctgcgaactgtggactcgcctggacggggaaacgccttcctcttctgcgagatcgggagacgcaacaactcgaccttcggctgtttgcatcgacgagctgttgctgcgcgagcaacagctcgatgaggcagccgacagctgcggcactgttgtcgctgcagtcgccgcctcttcgcgaagagattcctcgcaagaccggagaaaagaggcacacggacgagaagaagaatccggatccgacggagatcgcgagcgaggcgaagggatttccttcatctccgacaccagagaggagaacgctgagggcggcttggctgcgccgccgcgcttcttggaacgcggcatggcgcgagaaaggcgagagctgaagacgcgaggcagcgaacgcagagcagaggaagcgaaagagcaagacacgcagaacaagagagaggaaacaacaaagtcggacagacgagagagagcggagaaaaaaacagggcgcagagtgcaggagcaatgcagttttgacgagactctcggcgcgcgagagatgtgagatgcgacgctcgcagtctcgttgtcgacggtcggcgcaaagccaggcgaatgcacttgccttccctgaggtgaacgtacagtttcgtcgcctcgagagctcaagacgaaggatttctcgcgtctcgatgttcttccgagtctgcgagcgtcgtcgagcagaaggcacagacgagccgaggagagaaaaccgtcgagaaatctctcatcccacagaacagcgagagacgcagtcggacccagagagaactcgcgagaaatcaaagagccttgcggagaaacgtctccgagaaaaaactcaggtcgcagaaagcgcaaaaattgcgagaaaacgaaacaagaaaatggcatgaacacacccccgacttttctccccgccacacccacccgcgcgggcagacgccgccggttccctcctcgcttttttccttttcgattccggctgcctcttctctcttctccctcttctttttctttcagtcttcttttctcttttcgtatcggaagagtgcagcgaaacgcagtgctcgcgcgtcctcctctcgcgtctctctttgtctcgcgcttcctcctctcgcgtctctctttgtctcgcgcttcctcgcctcgcgtttcctcttttcgcgtctctctttgtctcctttcttcgtcttctgcctctgtctttgtccctctctcgattttctctcttgccttttttccgccagagggagatctccctgcacatctctctgtcttttgtgcaactgctcgcctgctttccagccactgtgtctggactcctcactcctccgactctgtctctccaacgcagccacaaactacagagagattcaacaacatacgccggagttctattcacatacatctctatgtagattcatttgtttttatgtgcatttaaatatatacatatatatagatatatgtatatatatgtatatatatgtatgcatgtctatttctatagaggaggtggagggtgtagaagtagaagtacgtgtatgagtctgtgaagagcaccgcgtcgcttctttgttgtttcgccgctccttgagtgtttgaggatcttcggtttctgcgcgtcaccgcatttcagcgtttcctgaaaaaaa

SEQ ID NO: 1515 - DNA, 3015 bp, Toxoplasma gondii
  source 1..3015: mol_type = genomic DNA
gcgtcagttccttaggctgttcatttacctcgaccgcgtggagaggcccgatggtgctgcagtcgatgacgaaggcgcggcacaagtcgagggaatcctgcgccttccctgacgctccttcgagcgccctgagaaggccattgtcagaaagcagagcttcttcaacatgacggccgcttggcaacatgctgatgacgacagggaacggcggcgccgctccacatgctgcaaagtccctgttttcgcgcaggatttgattggcgtcgtgctgccactcggccacatgcggctccttctggagagcggcggaatgagaaacagcgggaaagcaggtggaacggaacgcgcggcccggatcggaaacaggctcgacacacctacgcaatacttcctgccgtgtgctcccttcacaagtttcggtttccacatttccatgtgataaaaacgaggcccgcagcttgctgccaaggtccgccacagagcaggcggggacggctccaaactgcttctgcagatgataagaggcgtcggattttccagggtcgtagacgcacaaacggatgccgcgacctgccaagtgagttgccatgggaagacccatgttgcccaggcctagaaatccaacaagacggccggtgtgcttttcagcgacctctgcgatatgcgttgaaaggtcgccgtcacgaaaaggctgcaccgaaggttccacttgctgggggtgactgtcgtgagcagaactcatagaggcgtatgcatggtaggcgcgggtacgaagaggaaacacagaaaatggcggcagattcaggcgagaatgacgagttctggatggaattctccattgtttgacccaacaaaaaggaacggcagatccgcgacgaaaacctcgttggaaaacggaaaaacgcccacctgcccagccatccccacacgccggcggcaggaaggtggggaaaaggaaaggaagaactccctggacaccctttcccactgaaccgaaggaagaggagagatgcgtagctgccatttaccgggggaaatgcaatcccggtctgaaatgggagctaaacgaacgcgacggatattccacggaaggctccgtgtccgcccgttttatggcgacttgtcccggctcaggtgtgcgtacaccctagagccgaaagctacagaggaggcggatggacaaatcaactgaacaatcaccgtctttttagtcatagaagaaaggaagggccaccattctttccaatgtcaccgttttcattccctcctcgtttcgcgccacgtgtgggtccctctaagggcgtaagggtgaacaagaaactcgtgcacataccgtaaacgaatcaccgcctttatggttcaaggtaccttcggttgttgccaacaggcccgcaacggagaatgcgtctgttaaaaagtgaagaaatgagatggactcagctgccagcggctctcggcttcgtcccaccgttcgactctccccaccagcttttggacgggctagtcttaaacgcgctgtctcacgtgtgcatgacgatgagaacgcttggttttttccaggaagccgagaggcggctaggctcatggcggcaacttggagcaaagagcaggctcttttcctattttcccggctcttctgcggcagtcgatcgtacagcagaatcgagaaatgcctgagaggtctcgagggagagcgatagccgagggaggacgctttcgggtatacgccggtcggagaaatggagaaaaggtgtgtgacgtcgcgcaggtggctgatctctgcgtgcgctgagagggacgagtcttcaaagcgggagaggcgggaataaaaggggaggggaaaataccagttgagagttttggaatgtgcgtgttcggcgaagaaactgtcgttttttcggtttcaggccccgtgcagagaaactggaaaaagccgctgtcgggtgcggttgtccccgtgctctgtctttttcgaattttccactttcacagagaggcatccgctctggccggcgctgccacagatgtttccgctttccgtttgaatcctcgcgacgcccctaaaaaagccgttttccctgtttctgtttctccatctgtacggacacttcaggggcgccgcgaggcgagtttcgcaacttcctcaaatccggtccgcttccttgtctcgcttctctgggggcggcctttcgcgcgtccgcagccaatcctcgcttatctgctcgggtttccttcactgccttctttgagttcccatctaatcgttttctccgggattttatcgtcgttgcgtgcggctgaggccgcggtgaggagactggaaaccgacgtcaagaagcccgtgtgcagttcctgcccaggatagaaaagcatcgtggaatttgctgtgaatgcccccgtcgtttttcactttcgacctgccttcgatttgtgtcactcggcgtctcgcctgttccatctggttcttcctcggttggttctatcatcgttttattgcctgttcgtctgttcactgttggaagcccttcgagcttcccgcctcttgcctcgcgaggccgcacactttcgtttgccgtttttcctttcctcatccacaagactcagttgtctttcaaccgctgtcttgattcttcccctcgagtttcaatcgtttcatcagcctccggggcatgtcttctctcttgcgtcgaagctgtgacttgtcgctcagttccgtcaacgcccgtctctctgcccacaacagaccgaggacccgttcttctcaactcgtcagcgtcaaggctacacacacgctcctcttcagcaaacgaagccgtttcctcgtccctccgtcaacagctcttttagtcgataatccccctgacagcgctctcacctcgtggtagacggccgccttctccccttccgcctttcatctcctcccctcttaccccgctctccaccctctccgcggtccactctctctgcgtcgcgtgtgtctgttctccacagcgcgcgtttccgctgtgtccaaga

SEQ ID NO: 1516 - DNA, 2022 bp, Toxoplasma gondii
  source 1..2022: mol_type = genomic DNA
agagacgagagagagaccgaggcaggctcgtcgaagattcaaatagacgactctcccttgacactctctcagcatcactctttatacaaacatataaatacataaataagcctatatatatatatatatatataaatgtatataaatgtatatatatgtatgtatatatatgtatatatatgtatatatatatatatatatatataaatgtatatatatgtatgtatatatatgtatatatatgtatgtatatatatgtatatatatgtatgtatatatatatgtatatatatgtatgtatatatatatgtatatatatgtatgtatatatatgtatatataaatgtatgtacatgcgtgaatgcacacaggtaaatcttctctgtctctggttcggtccggcgcctgtgtgtgctgcttgcgtcgccccaggacgtttatgcggcgtttcaagaaggccgagtttgcgagggaggaaagttcgccgagtggagacagaacgactggggatgtatgtatagaacgcgcttgaggcgaggaggagacacgagggagccgagtctgtcctctaggagtgtattggcatttctgccagatcagacaggagaggaagaagaacaagcagaaaggcatggaaatcgatggaggaaggcagcactttggacgtcgtgccaaggactcgcgcaaaggcctcacaggcggccttgtctcgcgcttcaaacaggcaagaaaaccagacagttcatggatgaaatgaggcgaatcgatacgaaacaaggtggagtggaacgaacaagaaagaaggaacagactggcgttttttcagctccgcgacatgcaaccgtcgagaacgcgaaaacggtggccgcttcgctcggtcgcctctcactccctgctggagtgcagtcacagatacacacacatctctccttctttcctttcgtttttcttcgtttttccgcgtagcggcaaacagagacgcgacagggagaatgacaagcagggggaaaggagagaagaagcgaagagaagaagcgaaaggcagagcgagagagagcaggaatcggcgaatctgcgcgcagcaagctagaccttcttttccgtgtgtgtttgcatgcacgcctcgcaaaaaacagcttgagccttcagaaacgccaagcttgtcaacagtcgctagggtgtaaaaagtcttgcagaaagaggcgaaagagagacaacgaactctttcttcgaggaggaaaccttttcgtcgctgtggggtctgagagtctcctgcccttctggtgactctcaacggtttctcgacggtcgaggagttccagagttttttctgactgctttttctcctgacgcaagtctgctttccccgacagcttttcttctcgttcatgtttcgaagtcggattctccccttgtccataccctgcgggtttctccctcttcgtcccccctgtttgcatcgcctttcctctcccgctgttgcgactttttttgtcgaaagcgacttctctcccgcttgtctgtccgcttccttttcttctccctttgtctcttgctttgctccgcctgcttcctgctctcctctcttcctttcttccgtttcgtcgtccactcgcacccctgctctttccacgtgactgcgggggccccctctccctgtcgtcgcctcgaacgcgaggcgcgcgcctctctcctgctttgtgggtgcttcttctcccttccgcgctgccttcctttttgaactcctgttcgccttcgctgcagttggtctcctgcctctctgtcttccctgcctctcgccggcgcctgtcctttcgcatgcactcgcgcctctccacctgtcttcgtcgcagagagagtccccgtccccgtcgacttccctctccacctgtctccctcgcagagagagtccccgtcgacttccctctctagtccctactccatccagtccatgcttcggttcacctccttcactccgcgttgttttccacttctcaacggacttgcccggtaattccggaa

SEQ ID NO: 1517 - DNA, 4164 bp, Toxoplasma gondii
  source 1..4164: mol_type = genomic DNA
ttcaatttcgtcgcagtgtcgcacattgaggaaaacttgactcggagttagtttcaggtaacatattggagcccctaaaatcgacgaggtcgatcggcttgcagctcctatctttgccatccgagccagggctgctgttgctcctgatggtgtcggagaaacgggagaaagtcaacgaaaaccgacagtgtctgctgttggcatgaatcgttccacaaatctcccagctccgaccccgacagatgaggagtggatatgaagcggaagcgaaagattgctagacgggggtagggatgcttaatgcaacgtatcgcaaactgaggtcgcagtgatcgcaggcggggaagggtctctacatggctggaatgaaaggcacgccgtggcgcaaacgagcggcaggttgctggaaaaaaacgaaaaagctgaagctatgtgccggtttccttctttttcacaaaaagaacgcttacccaggagatacgggagagtgtccagacgcagagaggccttgaacttcatcgctggttaccagacagtgcagagatcttggcgattcgcgggctctctgtaggggtgccttgtcgggtcccttctaccaccatgatttggattgttcgtttctcctgttggagttcattctctcgtacatggcgtcactacactacaactcggatacggtttccaccatagacaggcaacgaaatgtgcgtcaaccctaggtttcacgtgggagtgtgcggccaaggcgcttcatcttgctaaggatgggaggcaatggccacgtttttgcagagttcgatccggcttcaaagtacagtgggcgcacagacgcccggaagttgacggttcaacatgtcacccgagaacaactgcaaaagacaatcgaggcaggtcgggaaacacgcaggagtgaagacaaaaacgagacaggatacacaggcggcgccgaaacataaattgctcggcaccttatttgccagttccaaggcagcagacaaaggggaggcagggaacaatgtttgcgatcaagaaatctgcgtacttcccgtcgtcagctggctcgctgggaggttaacatcggacgaacacaaggcggtaacacgtgctgtagccttcaattttacagcatctgaacgctttttcgtgtgtttggcaaagtggaggggatctatcacgtctataattgcgtacagtgaagcaaactgagaacgacaagcatccagtctcgtcagcattgctggtctttctggctacttcacctgcatgcatgcaaaacgagttgcaaccgcttgccaacagtacacgtttttcggcgctccccctccataggttgcatggacacaaaaccgaagaaagcaccagttcgtaccgttataggtttcagggggacgctaagcgaaaagtttggatccatgcctgaacatgtctgtctgtatactgcgtgagggttgttgacaccgcaagaaatctttacgaaaggcatgaagtcggggacggtccacgttgaaggcgctgctgtttttttatccgagatatatgatccgtgtgcaaaacagtgcaattctgcgtgagtaggcctttgccacagtgctgtctttccggtggggaagggctcccgacacgattcggcagagagtgaaaaacgccccagtaaacatggtaaactctgaagtaccttgcgtcaaaatgtgtaggcagtctggcgtacgatccatcttacaaagatgctaaggtattccatgttgtgttattgttagattcttcaaaactgagacaactacctctaactgaccgtcggactgcggtgcaatctggtccaccggcttcttttcaggtcggtatgagacaacccccacaaagtgtcctgaggcatggtgaactggaaccactctgtgttgtttgttgcccatgacgccgttccacgtcacacggcactttgatgagcgtgtgggatttgaggaatatttggtctccggcagacgcttggcacaaggccttcccagaattccagatgtcacaccattcatgcgcagtttggcgaatatgaggatacactatgctgccataaatggtttcaaagggctgcagccattcttcaagcttgctggatgcggtgagcgccattggctcctgtacgaccgttgtgccacattcgcaaagatgtcttcgtacattgctgagacttcactcaccaccagattattggttccagtcgtaggtgcacaagtttacgatggaaaaaaacttgcaagatccgaacaacagcttggcgtcacagcaggatagatgagaaatagcttggacatcggtagatgatgcacggttggtgcgaacccccgcaaaagcaccctactaacagtaaagagacagtgtcttcatgacccggaccacttgtgtcaccgaaccaacgcagatgggaaactcggcgatccttagttcccaaccgttacacatgtgcactgaatgactcatcagctactcacagcgggatcgccgttgtaaccatggagtagttcctactgagcagtggcggttcgcgtgtcaagggctgaagcaaccatctggatcacctatcattctggtagcgatttggagaacatgggatgatcacattcacgggttgatgcgggggagctgcggctagctcgtgttgcagcaggcgaggccactgtttctaagcgtctacatcataacgactgacttgaatttctctcttcgtttaccaaaacgatttcatgaaagtgtgagtgacttgttttgattctgtcatgtctcacatgaaggaatcagtagtccacgcatctatacgaaggtactgctgcgcgacagagtcggtttttaacgaacatgtcaatcgcgccgaattacattacttcacgattttgcaaaggaacaactggtaggggaagtgtattcgcccctagattcgctgaggaaaggtctgtctccgtttcttgttccgtcacgcatgtgtcttttctcacactacagctgtttgaaacgcgaaagctccctctggccgtaggctgtatcggtggtcaaaaagtcagagcatgcaactctctaggcagccctccaagaagataaaagagaaccggaaggttagcagaaccaagaaattgcagtgcagacaattttaagttttcgacgcaagtcgggttggaggcaacgaagaaaaatggatcgtgtgtctgaagagaattggtgtcatacatcgcgacttcgtggacgagtaactcgaaacttcaagcttctgtgtctgcagctgcttgtctagatatgagctatttgtagcgtcgcgccgcgaaggcagccgaaacgaacacagactgttttaaagtgccagagcatcttgatttacggcctttctgacccgcattcggttttgcttccaggctcagcgacgccattgtgtgggtagctgagacgtttcgagagtattagtgggttccgtgtttccgaagtcgcgctactcttcttcatagccaaatctgcgtagtaacgctgatgtacgcggtggttctgtacgtcaagcagtttatgaatgttactgcccccgagacagtccagagaattgaatgtttttccttacggatttaccttcgttaggatacactgtgctaccaagttgtcgacatgggcctcatccgtcgtggtaccaacacggttttcgtggtgtgcgagggaaaacttctggtcccgaaatgggtctggaaccaccgaaccgtacggcaaaaattatgagttttcgtaaaggctgacgagggtctcaagccttgtccatagtggcgactctgctagacgacagaagcctcttgacccacctcggggtgtcaggcgcctgccggaaggggtccacagtaatgtggttccctcaagcgagatttctcattttctgaggagcattgaaatcagattccgatgctgtgaacgcctttctgcagtgcagaatctcgcgcagaaaccgatcggcgtgacatggacattctttactttgtcgcctaccgatttacctcgttgctctcagttttgtccccagattttgaggatattaatgacggctcacgttcacgcagttcgcgaagcccgtggatgttcctgcgggacaggcgagtgttaggctgttgaagccgtttcctctctcgcctttcgatgtacaagaaa

SEQ ID NO: 1518 - DNA, 3380 bp, Toxoplasma gondii
  source 1..3380: mol_type = genomic DNA
ttagaagcatattacggacttacttgaatctgtgggacctcgacgaccttgtccagatagacaggcttcttgacatacttaaacctctcctgtttgactggtttcacaacatgaacgactttctcttcaatgactgggtgagggacttcgacgaccttttctacgtaatgaacctctgggacctcaataaaccggttctccactctctcctttatcacctccacaatccgttcctgattgagagccatacagaaacgacaggtgatggaaatgcatgaaaaacatattccacaccatcatcagacacgtgtcatgtcatcaccgcacaaggattcgcaggcacctacgtcaagctagcaccacgcctgacgcaagcaaggttatcatacatgcatatagctgggtatctgaaagtatcggcattttgagactctccacctctttaaaaacacaaacctactccagttgtcccttggatatttaatcgtcgtgtggcgtctatgcacaacgcaccgttcactgtcaactggaaggataggggaaacccacgagctcggacgcagctgccggatttcgatcaatcctacgacgttacggcaatcccatacaggctgtgctctcggcatgacaaaacgctaaaccttacctcgagtacagggtcaagaagggttgcaccttcgggtggaggacccgcgcagatgaaagagttcggaggaagagaggtagcatactgcgacgacattggcgggacgccaggagcactggcagccccaggatacggtctgctggaatacattctgagaggaagctttgccgagtcgtttgaaagcgaaatggaagggccttgagggagacaaccgttaaggcgggaaccttctaaaacgccttccagaatggaagacagggagagaaaacggtgaagccttggctacctacagaaaaagaccacacggcacagaaaacgtcctgtcctaacctttttatgtggagcagggacagtagtgcatgtcgtgtttcgtcaggagggcatcgaaggaacgaggatcgcgacacggacaaatggatgtggcagcgtgaatctcgaaagagtttcctgtttgccggtagaagcggggtcaggactctaaatctgcacaatgctgggaacacggatatcgatgtcagcgactctccctccgcttcgatgtacggaagacaaattgataatgaaatgaactggaaacaagtgacgacgagcctgctatagccccaagtgtcgagtgctcaacaccacgtgccgttcggcgacatacacaacaaggctgtgttcacagaggcagaatacaaaaaaagagttgaaagacttctacacacgaacagaaccgaatggtgaggttgagaagcactgatccatccctttatgcgacgcgcacatgagcagaagaaagtcctttgaggtcgttaaacaagcagacggactctatactcgaaggcgccggcctagccgggggtcaccgttagcgacggtttttctcgcaggcagaaaagtccctttctaccacatttgaaatgccaacaaaagacgatatcgcaaaatgtatcacccggtttgcgtttagatcaagacccttttcagatcatttaaaccctctaaagcactaggacgacgtacgaaaaccttggtctttcacctccgggaaagaactgtcacacacacaaaacgaagggtgcttctcaagggcaccgtaaatcgaatttccacgagctgctctgaattatggctattctgttcgctgagttgaagggaaccgacgactcgagagcggcgagacagaaaattggttggtgggctcccttgtcggagcggagcgcgcacaaggcacccgagaaggtcagggcaacattttcttcgaagaagaaatcaccggaagcgggcgttggacgtgcccaggaattcatatggctatcgcaagtggaagtcctctttcgagaactgaagagtgattcggcacccgtgcatctgggtcgattttcgcgagctgtcgattcttagcactgttggcacggattcgcgcgctgctcacctggcgcagcagtcgtggtaaaaagcggacgaaaacagtttttgcggtcgtttctttccgcgatgtctgtctcttctttgcgtgaaaagcgaaacttttttggaggacgagaggtgtagcgtcacacgcttcttttttcttgcggcaggcatacacagtctacctgcggagctgcaatgtttgctagcaatcggctaggtgtgccaggggcaggaaggggacctagcgcactgtgcgttgtaccgtgagcaagagcctgcgaagaatcgaggaagaagacagagaatggcgaggttgtaccctggcaccttcgctttcagctgctaggggtgcgagccgcgcgatacgtttttcttcgctgcaggctgggtgctgcgagagagaatcaaacgcaaataacgccagattaaagcctccctgaaacgacgctgtgcaggctgcgagttcttcgcccggtcttgtggaagaagcaagtgctctagctgacacccagagggttcagttcagcagagacaagaagcgcgttctgttcgaaagctggtaactacctgcgttttgtgcttctcaggttcttctcgttcagcaccggggctcgcttttcagtaaacttcgtatccatttttcttgcgagcctgttaggttccctcaagagcgctgccgcactcttccggacgacctgctcgagttttgcatgacgaattctctcacagtgttcaccttccggtacatgtgtaaagtcactttgcgtccttgacagttttgccacccgatttctggctgcatattcggggactgctggttgtcttgagtccggccgttttccggccttcgttggctacaaaactgaacaccgccaaactcagggtacactcatattttagttattttcaccgcacttagaagaagaggctttccttcacgcggatatgctggccgtctagacacgcggaagggatcacggacttcaaggtagcggattcgaggcctgattgttgacttaccgtttttgcttcgattgctctaagctgatcgcttcctccactcggggagctccccgtacgccgaccagctctggagtctttggtttctctgcgcgccatcgagatgtgtcccagcgtttgtttcgaacacgaatggccttttgttcaccacttgagttggagaggtccactgctgtgtcactgcggcacgtccctccgtcttttcgatgatttccttcttcagttgcgttttctgtccgtgtgttgagccgttgccggcatgcaggtgtcaagaacagctccgtctttctgaaccgctggcttccgaggtaaagca

SEQ ID NO: 1519 - DNA, 3550 bp, Toxoplasma gondii
  source 1..3550: mol_type = genomic DNA
aggtagcagaacagtgccgttgttgacgcaggacctgagtggcattcgcacgaaagcggatatggccgaaacccgagaaattggccaaccagcattttgatctcgtccctcaccgcttatacaaggactcaaaaaatacggctgcgcttctccagggtgttcaaacagacaccaattttgtgttcgttgccgggagatgcttgtgaacgcaaaaccatcgccaagcacgtcctctgtctccatagcgccacgtaagtgtatgacgcaacataaacggaagaagagaagcgggtttcaaggcgtctctccctcaagatggttcgataaaacacgaatgggcaatgcttcggttcccccttcgccacacataacaagacgactgtttcgcagaccattccagattacttccgtcagcattttgtggacgagcagaagcaggcgcctttgagtcgggagacttgttgacgacaagacactctgggcgaggaagcccatcaccggcggtgtgtcttgtcggagaatgcagagggcagactcgcgaagtcgagacgagcaccgggaaagatcaatagcgaggctgagggcggcaacaagcgacgagacgtcagccgtgccatgcttcgccgctgcaagaagacaagggacgcaacacaggtgacggaagccgaaattccagtcatttcaagaacaacgaataattcctcaatttgaaccgctggaagatgaactgttttatgggcggtgcaaagcaatctgcaacggtcgcgcattttagggcaggacggggttgacactctgagggacctagggaaaggaaagaactgcgcgactacgggcactagctgcatttggggctgctggcagagcgatgccgtcaggaaccgaagtgcactcgattctatgcacacagcttggtcttctgcaactgtggcatcactcagaaatcttcagagtcctactgtcagccaggaggtcgaggagcatttgctggacttccgaagcaaaactcgcagattccgccataacggcgagtagggagagacacgcggctcttctctgtgtggctgcaagactttcttcgatcgaatccttcttttccgtctcagtgtcagcgtctgataagaaacagaacaagtggatacaaccatggcagtcaagagggcattcgctttagtattctcgaagatgctagtgcacagtcaactagcgtcacaagcctatgacatcactcggaaacactctcaggcatttcgtaacatcagcttgctcaattgccggcacgagaaagagacagaaatcaagacaaggggaagatattttaaggtgtgtaatgatgttcctgtggttaggcgggctagaaatttattcatcacgttagtaaacaatcctggttttattccgacagaatacattcttctcgcaccatttgatacggccggcactgcacaaggagatgcgaccgttttctgaagagcttggaggacctcagctttgatctcgtccggcaggtgaattccaagacctgcgtctcgtttgttcccttgctgctgactggagacgaaacaggtttctaggaaggctcccacgaaaatgcatgtctcgctgtacgaagacgtgcacgctcgaagaagagacgggaagtgcactgcagcagaggacagtttacaaagctgtttcgagcgcttttctgaggtctccagatcggctgatgattcatcgccatgattttcgttactgaacacactggtcggacactgattcagctgtgcaaccgcgtgccgacgtagtgcggctgaggaaagaacgaggtaagccaagagctcggcaacaaccgagagtgccatgtcgtccccttctttctgtagctctgcagcagtcgaaatacaagtacctagcaaatctagaccactgggcagcagttctgttcgaaggtgacgaaggaattcttcgcttctcagggcatcgcggaagcagtcaaccgcggcccgaagttccaggacatcgtgccgctgagagcgcaccgacgccgatgtaagagacagaagattttgactgttttttttgccgtaatgccggcagtggggggtgttcgccttctctcgcctgggactcgccccgtcttgcggatcacgcgtggcatagacagaaaatatgctccaaaggcggatcgaaatgccgacagggatcgctgctgcgtggacgaggagtctcgaagcaacgctcaccactgccttccgtaccgtgcggagaccttggtggctacgagctctggagatcaaaacatcagaatgcgaaagattgtcaaacaccgcaaccaaccggaggaaggtcttgcgagcccgagcttcccgaagacgtgccacagccccggcatcgtctctcgacgttttcgacacctcctgcggtgacaggcccttctgcccgttgacgtctgcgacaaaacctgaaattgccgctccgatgaaacagtaaacatcccgaccaggtggcgtgctgaggaaagcacgcatccacgaggctacatcaggatggccaggacgacttgtaagtgtatagagaagcagtacgcatgcactgaagcactgcttcacgtcgtcacttgcgccttgttcctcattgcaaatgactcgacgagcaattgtcactgtttctggccactgcaggtcctgagaaactttggagtacgcacacaaataactggagttgagtgaggccgtatgtttcgacaggacaaaacacagaacacgctcacaccacctgagaggagacacaagagaggaagaagcaccactttcctcttcagcggaccggcggaaaagctcactaaaagctcggcgccgcaccggacacacgcaagctactgccacgcgtctcgttgcgtccgcaaaggccgaactcagcactgtctcccttactttgtcaattgtttctctatcggattccctggttcttgaaatcagattataccctcgaatcatccgctctccgcacgacgctagcagaacctggaaagacgggtcctgtgaaagaggagccaagtctctccatccttttgaaagaggtgactcggaagaggccccatcgcatccatctaacgaattatctgtcatggttttagtacgaacaggtttgggggtgccagggaaaagcacttcatcgtgtgcggttttgtcgatttgtctcgctacacgagccacgtgtccgtcaggggtcgatgccacactccccgcgcaccacggcgtaatttgctgatgtcggcagtgcagttccccgaaattccacagtgcatttacatttaggaagcattgacgcctcaacgatgttcatctcacagcgaagacggttcgccgagaacaagacatagcaaagtcgcgtgtcattacagcagacaacagtagcggtaccaccacatgcagccagctaccgcgctgatttatattgtttgacctctccaacgcagaggaggaagcagaatagcaagcggcaaggccttcaagaccgtgttattttgttgtgtacctgggactaacgatctctgtctcaccgaaaa

SEQ ID NO: 1520 - DNA, 1902 bp, Toxoplasma gondii
  source 1..1902: mol_type = genomic DNA
gttatcagaccgtatcaaagacggtacttctgctagaagtaggattccacggtatctctccatgcaggtttgctcgcaccactgaaacgcaagtagtaggcatgtgagcccgtacgacaggctctgaaaggcgagccaaactgaaacccagaggacagctgaagaccatgtgtccacataacaaagatctgagagagctgaccatgattttcaccctggagaataagcttggcgtcgtcttcgcggcatgcgatcacctcctcgtcgccgtgaggaccctggagaatctgcaaacttccgtctgcgtcgcgggcgggtgaccactggaccggcatttcgtttttcccctgtctcgaatttccttgttttctcgatcgaagaaggcgaagtgccttctcgcgctctgctcgcctcggaatccgagctgctggaatctgcgttgccgtctgtgtccttcacttgtccgcggaggataactgtcggaaaagtgtctatcttcgccagtcgatttcccagtaaaaaaccgtgggacaggcgctgcgcgggggcggcgccgttgtcagcagctgcggtccgcaggaagtcagtcttttcgcggggcgaaaaaaaattgctccagttcgctggacgacgcactacggagactccgttctgaggaacagacggtgaacgtactcattcgcgtgcggacgaacttcccttcgcttcgattcttcgcgtccgccacgatttcttcccggaaagagccgccaaacggccaaatagaagaatgaccctcgtgcgctgcctccaagaacagccgctgcgacgagacgctgtgcccagatgtactacaccggagggcgaggggttcggaagatcggacgcaaagcgttgagcaaaacgttttctctcgggctctgaggaggttcgctaaacaaaccgttcaaattcgaaagtgaaacggcgtagaacgcatgcttgacgcctgcacggagagtgcactcaaaacatccacagacagcggaaagggccggcgagtcctcaacaagaagcgtcgttgtgtctggacgtttagggagtgggaaatcgaaaaaacagcccgcagaagtcaacatgttcagcatcgcgagactcgatgtggcaaatcgcaatgggactggcggtcggcatgcgcgcatgcgcgcatgcgcagcggtccggcggaaaagccgggccgccaccgactgaaaaagcgtctcccgcacgacaggagactcgtagatttctacatttcgttcttccccttaaacaaagacagccgtgggatctcttctgccgccagcggttcgtacatctcaaagtcggcaccttcgcggttcgcgttccgccccggaactgctgctctctgcggatttgtgctggataccgaggcggcccaagataggtatgtcttgatctgcatatgcattgtccccggctctttgtctgtctcttttctaggattgtgccgggggtacgaccccctcgcagctgcgccgtagacctttgccggccatttgctctcgtcgacttgtgccgtctcccggcgtctggccaagacccttgctgtcgcgttttcgtgaacacagtggcaagaagagtcacctgcgaactttctttcctctggcttcttctcttcaggtcgcacatctcctacttggtctcactcttttccttcgtagtgccccttcctgtccacggacctccaagtcgctttcgcctttccttcgtacctctccttcttccttgcacttcctccacactgcctgttccagcatcctaccgcgcctgcctccctctcgtctctttctcttcttctgcctttctctcctctctgcctctccactcctttccttgctggcggtgtcctctgtagtggcgctcgctctcagacagcaacca

SEQ ID NO: 1521 - DNA, 2501 bp, Toxoplasma gondii
  source 1..2501: mol_type = genomic DNA
tcgtgcgggctatttgcagttgtaatccctacaattgggcatagtattaagttgccccataagcatcttctgtcgtatagagttgttccagaggggacgacgagcggggcgccgtgacatcttcagtagctggtagcgagcgagaaacttccagagagaatgactgcacatgcggtttaatatcgtggcagagccttttccctcactctgcacacctcgactgtcactcccccacgcattcgaaaggtgacaggcttacgccgtacgaaagttagcttcctctcttgagtttatggaggaaggagtgtagctaatagtgaagcggagcagggtcatctcagcgttgtaaacagaaagcaactttggctccgagtctacttctgagaagtcggaacccgtcatcgcagtagcgtcaggcaggtatggcgaccaggtccctgtggatgctctcgaagaagggtggacatccgcagtgtcttgccaacgcaatgtttcagcacactgtaatttgcgagcggcaccggctatagaaaggttttacagtgcagcagtccgactcgtacaggatgagaacaaatttgtatctatgttgcattagctgcatagtaaggggcaagggatagtagtcgattgcaacggttgcgataagcgcacgtacggtatacgaacatatttcatgggcggtacaagctggaacgagagacaacttgcgtctgattgcctgccgtccatcaagaaaaccgcacagttattagcatctgactaattttcgccacggaccgttgcccttctatcatctgaacacttcagtgtttctacgagaaaattgatcagaaacaacggagagcaacgcgtactgcaaggcatctaccacattcgcattttcactgcgtgagattttgcgttctgcaaacgcacgggagcccagagactcggcaaagaagtgccgagattggatgtacctcaggaggtggggttgagaaaagcattggtgtaagagttgtcacacaagtccctctccttcccgtggtttgccgttagcaaagaagaaatgcagctggctgccgccgagcgtgtgaaagtttactaggagggttaaagacaagcaagtgattcagctaatgcaaccaaacactctgtctatgatcatgagagctgctacgcagacaatgtccacgctgtggggaggtcttggcacgacgtgaattgcgggtgacttgcctctaagagatgccacctagtttgctgggatgaggattcgagaaaataacagaacgaaaaagtatccacatcttcacaaaaaagtgacacggtgcagaggatcacagtcacctgtgcaagaacagatctcagccacctgtgatagaacagatcacgagccagcggtgaccttgatttttctggggtgggagctcacagtcggcgtaagctaaattgcacaagaattgagtgctactaaacgtggcgtactgcgatccgtccacgcttgaaccaatgaatgaattcccgacatccttcaataaatgtcaaacatacgtttgttcgcacggtaattgttgtgcacggaaaatttccctattaccagcgctgctcggatgtcttgccgcatcctcttctatgaccgttcctttcagtccggtctcaaaaagaactctactctacttctcacagtatccagtggcggagatacgtaaattgtgtctcaaaccgccgacaaagtgccagcgcgttgcttttccgtgcagctagccgtattcaaaggcaacggtgtcaggtccgtctccattgagctgggacgcttacagaagcaaaagccttgacattaacagatcgaagaacttaaattttgtcggattactctccttccttgggcttggctcgttaagaaaatcgatgtgtccttttagtggcgtgcgttcatcggggctaacttggtatcgcgttgagcagctgtcagccggggccggcatgcgtagcaagcccaaccggtagggcagcggctaccaagtatgcaagcgtaaacaaaagatgctttgtatatgttttcacagagaagcccttcaaatgttcatacggggtcgaagtcatgattccactgttcctgttctgcgtttcgtaatcttgactctctcctggtgacccctagcgtggttgtgtcttgtcataacaacgctgctatacttgcgcctctgtcttctccaaagaaacaccgtgaaatcttctcttgcgctccttccgagcgaaatctttctcccagaagaactcctatgggcgaggacgttgccatgaaatttgtactagccagttcgtttcgtagtgagcagccggcgacgggagtgcctcctgcggggcccggtgcgcgtggcggacttatttgacggtgcgagaaaaaccgtctgcttttgaaccagcttcgcgatgtggatagaccttcacagctgttgagttctccaagctagaagcgtctttttcgaggaggggaaatagctccctcgtcgcca

SEQ ID NO: 1522 - DNA, 2155 bp, Toxoplasma gondii
  source 1..2155: mol_type = genomic DNA
ctttcttgatacaaaacacaagcgaaaggcaactccatcccgaaacgccatctgcctgcatctgcgtccagtcccgggtgttacttctgtgactggctgccgtcagtggaacactccgcagttttggtccagtcgcgttagtctttgtttgactcttttgacgattcgcttactttcactgatatgcggcataacttcgaggcattaatccaccccagaacttacgaggacacgtaacgcgggatggaaccaagaagctgctcagtttcctgctaatatttccgaaggcgtagcagacatcctgaagtgctgctggcgacactgttgcggtggtgaatgggagacacgagaggaagacggtaagaactgagacgaggcctaacagcaagcgacggtggttgagcagacaaggcggccggccaccacggcgccgcctgcatgcactgaaaaaacccgcgttaactgctggaaataacgacagcacagaagctgtctgcgggcccggctgagtggcatggatcaaccaaggtctgcctccctcggcaatgcgtggattcgtgctcggacgcatggtgccgcgtggtggactggcagccagggcatagcgtaagacgagggtacccgaagaaacagggagcaaccaagttgctgaagagccccgacacgcgatgaactgagacaacggatgcgggaaaggcaaggcagaaaacgaaaaaaaaagacagggactcggcagaaaggggaccgaagaccacggtgacacatgccaagaattgcggcagctctccaacatcaaaaaaatgagagcacgtgcttggccccctagttgacaatgcatctaccctggtctcatagacgggatgcatggacacttgtgtcgggggaggattacacttttactaggcctacaagtccatcaggctcaccaccgaagagccagacaaacagatacggatgagtcgagcgtggttagcagagaatgccagttgtactattctgagacacaccatcgtgcatgtgctttgtttcttcccagaggctcgggcaacacgtgcggacggcatagtttcccgccatgccgcctcaaaaatcgacccacgagcggcgaggattacctttatcggggaaaacgttggcacacacggtcacaccgcgatgaagttgttcgatgaccaacgcgcctactggttcgttacctctgttcgatgctccgctgaaatgaaaaacagagagccgattccttgagagcaactgcctaggcgagcgccaacgaggagattcggaaactcgcgagtgtcttgtgaatgcgctcggcgtgcggtgtgaaatccagcctgtgagaatccgccgtcatgcaattccatcgagatctgacgaaaaatagcgccacaaaagcgacttggagacagaaattaagaaggcgctgacgggcggctgtatggcatgtctgcgctggagacaaggcgagctaagggggccagctgtctcacgtctgcgaaaaggcgcccatgaaggtcacctccacaccgtcatcccccatagtcattcgacaaggtgctatccgtttattctgttttttttctctggttggtttggacgaacttcaagaatatgtgggaaaaaaagatcttcgccgctgatgccatcacgaacttggagcccgaataaaagacgacgtgtgagctcgtagaggcaacggcttgcctatgaccggctactctttgcacagttcgttccgccccaggaagtgtgaggcatgttgttcgacggttctttgctttctcctgtgtctgctcctggcggcagaaagataattgtttcaaagggcgaaggacgagacgtcgactctgggggaggtcgatatcgggggctttctgcggtgccagctgtcttgtcgctcgcaggaggaaagagagccagtctgcaggatttgtcttattagtagtccaaggccacgttgcacgcagcccaggtgctggcagagttccgcccacagtttcggccttcgtgtagcgggcagctgatatcccttcccgatttttttccataacagtttgtttcccgtggctttccaagctgcagtttccaggaccgacgcgaaacgctgcgtccgggtcttttccacacgtctgggtgagcaaatccaaaggcaaaa

SEQ ID NO: 1523 - DNA, 872 bp, Toxoplasma gondii
  source 1..872: mol_type = genomic DNA
agacagtacagcagattgcgatagtgtgcaagaagagttgcgtagagttccctctctgctggctcgctaggtcgtccgtcgcgtccgtcttcgaccccctgaagcgtggaagttgatctctcaagaaaagcaaagctttccgggccttctcggaactcaggaaacgaagcggcgttgcctgagcctcgacgcgaagcctgctcttggacagaagacgcggaagacgctgcatcgtgactgagagagggaggatccccgcgaggaaaggatgaagaaaatccacgaagcggcagctggtataacggctttaggtgagggccatttggaagcagtgaagaggagggggaagtagaagaccgcaagaaaggagaagaggtgaacgggaaaagcgagtgagaagaaaaagaagaggcatggcgaccaaaggataagaatttcaagtcggtagtcaaaggtgagcgaggtgtttgtacaccggaagtttgcgaaggtgacgagaagcctccataccgttttttcgctccgtttactctgcgatggggaacaccagggtcagaaggaaccgctcgatctttgttttcgagtctccgattgccctgactagcagttctccataatgcagggcctggcggcgacgcagccggcagacgaaggtgcccaggcgcaaacatcgaacacaaccttttcagaaaagcgagtaaataggtttcaccagtttccagagtgttgaggaaatggggggaaattcgtttacccagtttccaggagttcgagagggcgatgaagtttgtttaaccagattcctcgagtttcagcccaatctttgatagtgagaggaaacgaggcatgttgaaatttgaggggtctcctta

SEQ ID NO: 1524 - DNA, 2763 bp, Toxoplasma gondii
  source 1..2763: mol_type = genomic DNA
tgctttctataggatgcatatgacgacgcgaactctgtgtgtgtgcggtcttgcgtctccacgaaggaacagacaggttgccgtttttcgaagaaagcgtttctcttcttttttgctctggtgcgttctcgcagaggtgcaagaggaggatttcgcccaatctaccgacctcgcgggggcttcgtcagaggctacgggcgtccctactagcgaacatgcgtttgcgaaatgtcgctgaacctgagaccgtcgaaattcttttctttttttgcatgagatatgccttatttgcagtggagaaccacgggagcgagggaagcgagcagatgcttacaacgtgctctgtgtaccgacctcgcgaatgcgtcccggaacatttatgtgcatgcactggaccagagacgtcgtctgtctcccaactcgttgacattccgcaattgcttttgccttggaaaaaagagtgacccttgccacagaaaaccactgctgaaacgtgaagcggaaaaagacgacacacgcaccacaaacacactccgccactggcgggcatgtccgcacactttcgctggtcctggtaatgcagcgaaaacgaaacgaggcccatcgactttggtggcgtaggctgaccctgcggtttcctcgcctagccgctttagtctttgaaagagacaaagcatctcgccttcacagaaagttcaaaattcctgacgaagtcggacgtggttggtgtagaaggtgttttgacgaagttctgaaggtgatgactgctaagttgcgtacatgctctctagaatttcatagtcacctcatgtagatacatgtagagatctgcatatatctgtctacatattgttctgtatggaaaactctcctcgccgtcaggcaaaattcaaagtctcagaatctgacctacaccctaaacagatgaggctctctcggacggtggagggtcgcggcgaaatgccgcagagctttttctctgcagctgccacgacggagttttcgtttcttgtagcagaggagtgctgaagctttgcccgcacatcaaggaaaagtacatcatcctacgcgtgagtcgtactcagtaacaggcgaatcttgagcagaactcgtcgcgcccccctggagacaccacgacttgctcaagaggtgcattaactatataagggtatccagcgtatgtttgaaaaaccaacatttttatacaagctgtacaaatatcacggtattcacagaagacagaacctttttgttttacctagtgtgtcggcaattgtttctactcagcgtctttttttcgtccttcgcacacgctgttagctgcaaggaagactcctgaccgcggaaccagcacagcaagccagccgcctagtataggcggagggaagaagcaggttttcacttctgtctccacctctccctacacactgggcaaaacgttcgtcagcaaaagagcagaaagtgcatttgatttccaacagttcaacgacaaccccatcgcgggagggatggacgcgccggttcgagaaggaccctcccgtgtcacaggctggggctttctcctttttctcgaacgacaaatgcactcctactctctgcatgctggagaatcctatcgcgagattgcgactcgaaaagctgagaggaaatcgcgagtgagagggaaacgggggggcacggacggggtaggcactcaggatatcgatagtcagacgggagcgcaccctttcagacgcttttccgatacttcagagatgcaccgcactacaaatgtcgtcctgcgtagagtgtttgccaagggggatccgcgtttcctcgtccactcagactcggttccacgtcggccgttcaggtgccagcggagtgcgttccctcgttgtcgtcgcggaccgcccgagtctgtttactcgcgctcgcgattcctctctgttcgatctcgcgataggaatttccagcttggtgaggggagagagagaatgcatttccaaatcgaaataaaggaacatccagcagggtcctccacagccgatacagtgcagggcagagactcctccgtggttcggatggctgcttgcttgatgaatttccggtggcaagcgtctttgattcgtgattatatgacgaagacgcatgccagtcatacaaggaggccaagcataatgagcaaaccgtgtagggaagttacgaaggggcactgcagggttcttccttcgtcggtcgttttcagtggagagtcgccgatcgtgtcgcagaaggagcacttttcgaggctagggggttgcgtctctcttgcttctcccttgacttttctgcagaacttgaaaactctaccggtatcattcctttcgcatgttcgctagaaagtccgagcggattcgctttttccccggcaggattcataaaaatctcgaggttccaacacaaccagatacacacacaccgacacacacacacacacacacacaccagtggccggcgcaagtaagccgtaaacttggacttctttccgtccctttgtgagttccaattcgatttcctcgtggcacttctcgaatcctcgattgaaagacaaacgggtctttccagctcgcaaacagaaagtgccttagttcattccctcgtttcgcctgtctgccactctcttcggcttggcgccctgcggtgaggagcacccgctgcttgccagccgacagcttcattttattttcgccgttcttgtgcattttcccttacctaccgtaatttaaattcccctcgacaaga

SEQ ID NO: 1525 - DNA, 3257 bp, Toxoplasma gondii
  source 1..3257: mol_type = genomic DNA
aggcggctgaatacgtttttgatatctccaggcatcgaacgaatgagaaaagcggatgctatagtgcggagaccttcaaatggagaatgcaagccttccacatggacacagcgatgtctgcattctttcgactctcttcggtttcgcagtccacacagtttccgttccccaacagatgttgtggccgcacatgcacgtgttttcaaaagaagaaagtgaacccctcttaccgcgatccctggggctttgcattgttggtgatctcgcagcgagttcagcgcgttgtgaacaagacaccgatttcgcttcgtgtcttgccagggcattgccccgttccccgaaaggaacaccgggtcccccccatgtttgaagctttgagcggaaacccccatctgctgttcgccttctcccgcggtggtcctacagtctcttgtcacctgcgccacgctccccccaaagagcggcagctgtcgctctccagccgtctgctcgctccccgcggcgtcgcggtgtgggcatctctcctcacgcgtttctgcatgcacagacgcgtcgcccttttccccttgcgtcgagagaccccggtttcgcggacgaagaaacgctggatcgatgcgctgaaactggtcttcgtcccaccgcttcgtagcccaccagctgcactggccgctgaggttgtacgcgcggatctccgtacatgcgacgtgtctgcagttctctggggacagttcagcccgtgcgaagtcaaatgcatgcacgagctcgtgaagcaggacccgccgcagctcgaagggagaccaaaagcagttgccgcaaagccacactgtgtggtagactggcgagtaccctccccggtgtggagggggagcagatccgcgacctgaggtttgggcacagtccaccacgatgaggtcgacgggagctcccatggcggagagtgcgtggacgagcgtcttgactcgccagtcgcgaagcgcgaagaaactccaaagtttcatttgttgacgctgcagccacgacagcgtctcgtcgccaaactggagaagcggggaagtcggcgaagctgtccgctgcgactcctcgctttctgcggacttggaaacggtctccacctccgagccccgaggcgcaggtgaaacatgcgaaaccggtgttgccttcttcctaggaggtgatgcgccacctgcggagggggtacgatcctcctcgcagctcgacaaagacggaggcaagagagcggcacaggaggacgcctctgctgctgcgttctgcgtcgcagagacgccgattcgcttgtcttgcgtttccgcggccgagagaggttttgacatggatgcaacagaggactgagaaagtggtgcctgagctgcgcaggcgctcgcgaggaaagcggaacggctgtctggtgaagaaggcggggaggcaggagaggtgcaggcagaagttgatgtagacagagaagagggagaggcagacgacgtcggcggggcagcgattcctgggacactgcagacattctcacggcttgatgaaccacgatttccatattgatcgggctgttgaaaggagctctcttcagtctgacgcgatttaacaagccatgaaagccacctccactcggagtgccaggaggtgtcgagcgccacgggggccgtgggagcgtcagaaagagtcatttcagagtttctcaactttgtgggaggttccgcacaacaggccggaggcaagagcttttgcgaacaccgacgaaaggaagcagcgaagcgaatggcatcgcaggaaacctggagccggtttctacagagaaaggcgcgacgaggggcgagcgtgagccgcccctgagtatcgggtttcccaggcatgataaaggccttcggttgttttttttctgctttaggaactacacaggcatgggaattcgctcgccacgcaggtacgaccgtgcacgacatgtagacagaaccacaccttcgcagtgaaacagagagagttacgaggggagcaacacaagttgtacgtcgagaacaaacagagagtcgccgccaggtggtctcgacacgcttgaccgcggccagatattcgcgcccattcagcgtctggccgcgagtggctcgagaaacgagaaacgcggggggtctgagtggcacatatatcacctagatattatcgttatgtgaaaggctcgccacataagagacatacaggtcactgtacggcaaaggatgggaagtattaaatgagccgcttcccggaaagggcgtccgcagaggctgcggagacagagacacgcggcaggtgtccacggatgttgcgctctcccggttgcgaagttcgggaaacaccacacaaaaaaagagccctcagtggatgcgtgaaatacaggcctcctcactaaagtgaagatacttctcacgcagaatgaagaggttcgctttctaaccagagacagaacattggtcctcaggatggcatttatcgacccaggttgcatgcatgctccggtgagaccctggatagttcggacagtcgtaggtgaagggtgtgttagagacttagactcgtgtcaccgattgtcgccgtttgattcaccgcagcatctaaccttgtttccttttgtgtttaaggccgtgttccgtgttaaaagttgcaaacaggcgtggattctcatcctgttgcgcgtgctggacaggtaaacaactccgtgcctgggagagcgcgcttcgttgttttttcgtatttctccttttacagtcacaagcagctgctgtatgtggcattgaaccctgtagtcgcggatctgttttaccacgttgcaacgctgacgctttttacccgatccagcctctgtcggcgcttctagttcagctgtgtaaacgcgcgaccgcaacatggcaacgctgagagactgaaacgctccagaagacctccgtgtttcacaaaatccccaattgtcagacaggagagtgtgtgtgtacacgttccgacgcgtaaccatttgcgtcagcgagccggtcgggatgatcaggtacttaagcttcctttacatccgagggagtagttgcatgtacacgaagggcgcgcacatatctgcgcgtgtaaacacttcgaggcatgcgtacggttacaaatattttgcatgcgatttttaggcggcttgcttttttgcctcattgtttctctaggtggtctcttgtgacgtgtctgagtgcccccggtgtatggcccggggaactagtcactgcaggttctctccatca

SEQ ID NO: 1526 - DNA, 1144 bp, Toxoplasma gondii
  source 1..1144: mol_type = genomic DNA
ttccagagacacccgaaaaaccgacggaaagaccctcgagaaaggaagaagaggaagaagaagcgggaggcgcgtacgacgcggaggcaggcaccgcgagaacgaggtgagtcggcggaggcggagccggctgcgcggggtacggatgcacggtgcccgacaccgggtgtatgtacacggggacaggcgcagaggaagaagaggcccggcttgacaaagaagaagcgaaagaggaggaagcggagcgaacgaaggctgcagctgaggcggaggagacaatgaggatggaggagagggagcggacaggagacgcgggagatccacggcctccggcaggcggcttcaggggctcgagaccgatgaacgggaagcatgcagagtctccaagcgccggcgaaggcgaggaaagaggcgagagcggcggaagcagagcaggcagagacagagcctcagagtcggagacagaggctccccgacctgcccgaggcgcccgacccacaccgccccccatggtgagggcggagactccgaactcgaattggcgcggagacacgaggcggcagcaacgcaggaggaaaaggagacgcgggagaaggaaaaatcagtacagagtcagcacgctttgcgcgcgcccgcgtcgagagagagcgaaacgggaagcgaaggagactgtgcagaggagaacgcgtgagggcatcgtgacgagacagaggtgaagagagaaagagagtggagaacagagacggagcgaagagcgacagaaaggaggagagacagggctacacgaaaggattctctggagacaatctggagagctttctttagaagacgacgcagccgcctctggacagaaaggccaacttcgacgcggaaaagcaggcccaaaaaccggcgaggcaacgcagagaggacaagaaacaaataagagagcgaatgagagaacgaacaaaaagaacgaacgaagagaacgaacgaagagaacgaagacaacgaaagaagaaaacaagagagcgattactttgaagagagagagaacaagacacagaaacacccagtcccggaagacgaccggaagtgacctcggcgtctctccatgaggcctcggcttcggtcgtctctcccggtctccttttggcgtgagaga

SEQ ID NO: 1527 - DNA, 2098 bp, Toxoplasma gondii
  source 1..2098: mol_type = genomic DNA
tcgaaaatggtttctcagacgaggatcctttctctctgatgcagctcgacactgagacactgccgttcctcgcgagcttctctctcctcgctcccccgagtaattctatccaaggcgacagagggagctgcacagaaaggacgggtatcataaggagagcgcctctgtctgtctaccaggtccttctcttctttttcctgttccctcgtctcaatccacttcttcgtttgcgtctctgcaggttcgcgtcgttttctcttcgtcctctctctccttctgtgtcttcaagactcgctcgcttttccaccgaagctccttcgtcttcgttgcctacctttcgcgttcagttcgttccgctgagcctcaagacgtcgcttgtcttgtgttttcgcgttgatgactctctgcaagttatcgattttctgctcgtagtaggtctgaagtccggagctcgggccgtcttcgccttctgtcgcacatggcggccggagaggtcctgcgagagcagacatcttgttttctgctaccacagcaagccaataagcgcgaccggagcattatctccggtgaaacatacatcccccttcacctgccttcacgcagacgcctggtcactcgaacggacggttttctacgaagacacggcgaatttgtgcgcgtacatgcgcaggaaaaggcaggaagacgggggcgtcagtcgacttcagggcgccggagaggaaggatggaagcggaagaagaaactttgcaggaacgagagagaagcaaggaagcaaaggaaaaggtgcgcacagcgcggaggccggcgccggaagtgggagaatctaggaaagaaagagaaactcggaagaaacggcgtggatcccagacagagaagaatccacctgccttgaaacgaactgagaaggcgccctgacgaatcttgagtgtgtacgtacacccgaggagaacgggagaaaagcgattttttgccggacagaaacctcgaacttttgacttttcctgtctgcatgcgcgcacgccggaagtccctggacgagctcgcctccgctctacgcggactagttcatccgcggaaacggagagtcctcacaaaatcagactgatttttcctccggattcgcgccttccttctctccgtctcgtctttgcttcacagacggagggagagccaccggcggcgcacagtgacagcttcagtcaacgaagatcctttaaaagagaaagaggaagacgcaacgtttgtctctagaggaaggaaagagctgcacaacctggtggactcgcaacggcgtctttgcgattgcactcacgctgtgtgtgatgtgagtggagggagagaagacacgcgagacgctgcccggtttcagcgtcgaaaaaggaggagtttttccggtgttttcacctgcaaagaggcttcaagagaaaggaaagtatgtcgtcgaccttcgctccgagcgaggatatccaaacaaggaggcaagaattacaacagaaaaccgacagagacggatttccactcctgcagacagtcccggcggccatacagagggaggacggagagccgtcggtgtgcacatgcagtctcctgtttgtgaggaaaaccttcttttacagaagacgtcttggtccgctcaaaacgcctgtgtgtgaggtgagtttgttttttcgtgagaaaagctgtttctgactctccgtcctcctcctagtccttcgaaggcgcctcgcacaccgcatcgccttcctcggtcgcctcgtgtctcctcgttggagagcactggagacaagcgtcttctctccccctttcattcgcggcatttcgccagtgtctcttttcggagctttttctctcgcctttcctcctttcttctggaagaggcagagcaaaacgtcctgcagctggttcggcctcgagagcgaccggtcgattctcaggcctcgtcctgcgcggctctggactgtcgcgtccgttgtctgcctcggaagtccttctctccctgtcgctcctcgagtcgacttgctctcttctagaagaagacaggccgcctcgagtgcgtctcgcttcctctcctctctttctcctctctgtctctgaaga

SEQ ID NO: 1528 - DNA, 3997 bp, Toxoplasma gondii
  source 1..3997: mol_type = genomic DNA
gtgcacacaggcggatattcacttcctcctgtctttctgttcacttctgcaccttcagcgacaagtatttcttcctttctttccttctttcaggagtccacttgtcttctcgtcctccgtctgggttctcctccgctccgagcagctgcggcggaaccccgcagagtctctcgagaccaggtgcaagtcggcaggaagactccctcgatttgctttcgcagtcttcgtcgccatcttcatctgttccttctccactaccctctccctgctcgaaagaaaaacgacctggagtgcctgtgacgcccgtatcgctgccgccgccgggcgtcgacacactccagctggggaatcgcggctctgggtttcctgaaccgcggggcgtcaggaaggcgcgttcgttttcttctggaacggctgctcttccacgcgtggagcttgccgcttctcggggcagttggtccggtgcccgagcgcgagaaaaggaaccagagaaagtgcaggaaaacaaagaggaaaagacgcacagtggaagcggtgtcgatttgcgacctggggtttgacagggaatgcgagggcgaaacaggaggagacgacctgccgagagaaaccgaaagagaagcgacagccagaaaatgagaggaaagaacagaaaccaatgcactcgaagttggaaacgtctagaaacgcacaagtgaactgacgcctctatattttgccatattatacatgtttctatgcatagtacggcatgtttgtgaatgctgtgaattcgtgcgagtctggttttaggggtatccttgtcgcgcgaacgatggcaaagtgccagttcgcttcgttaatggagtctttgaaattggaagatacgcctcactagagagatgtcggtttccgcgagatttttagaggagtttcttgacaagcgttatctgtgcttgcaagcgttctgagggaaggcggagaggggccagaaaggaggtcggagatcgcgcttgagctgtcttctgtaaggaaaacgcggacgatgctgttcaacttgcttctgcctcagagcgcgcctccaacgcatgtcacgtggaatattcccgcgacaaagaaacagattttctagagaccttccctcgagtgtcgcgcgactcatgcatgcagataagtgtgagtctctccaaagaacccgtcgaagggaaacgaagaacaccgtcacgagtcacagtccaccaagagttgtgtgccagaggctccatcacgcgtagttctttaacgcgccgatagaagttcgccgggaaactgccggcgttgcagcacatgcaaccgcttttaaaaaggaaactgtcttcacctcctccaagaaaaatcttcggtggtgcagcttccaccgctggttcaggagaagctggcgtgtatttggtgtacacactcctgagaagctcctcgggtgcatttgctcgcgttcaggatctcgcgaggtaaactctttcgccacgtaatggaaagtcagaacttgttggatcgactgtacaggacatcaaaattttagtttccacttcacaactgcaaggtgacagaacagcgaggcgaatcctcgttacgttagggaattgaaagaatctcaatcccagtcggaggccagggaagtttggggacgggggcggtgaggtcttgttgtcgctgaagatctccattccgaagagatctggtgggaagactaaacagtccatgtttagtccagtggggtggtggtgtacagcaatcataaagaacttggttgtctgtacctcataactggagtcatattcagtatcgtaggtactatcatgtctctgtgtattcgatatgagttataaagttctggttcgcttgacaagtggccacgaagagacagttaccaagataaaattatacatcgaagggccggtctcgggcgcctcaatgctgctagaatgacacacgtgtacgcagagaacacggatactcttttaattcgtcttgcgaacggcaaaagaaaaaagacgcgggtccgagtggtgcgcgcaaacagtctgctcgtactgaggtgacagaagacaaaaaaaaggccgacaaggacacagtgtgtttggggtgtttgtgggtagtccggaattcgctgtctctttgcgtgactgtcggtttagaagtggcggacgcacgggcaacttctctgcggccattcaccttttcagaagccactcctggcttctcccgcgggatctcagaccgttaatgttttcaggagcgctagattcatgtgtggcgagtccacgaaagctgctgtacatctcagcgcagaaggacctgagtcctcctgagaaatccaagacgaattcagatttgtggcaaatcgacaaaagtgcaaagtttgccaggagtagaccggaagatgtcccgctcgtctcagagcggtgttaacagaagaggacttctgttttcccagtaaaaagcatgtgtgttgtagattcaatgattcgcagcgtgtgtttggggagcttcgcttctgctgctttgagatcatactaacggccagaaggaagtgtgttcaaagaaaggggatgatgtcggattcgcgtttgtcgtcagtgagctgtcggtcgatgagagagcttcttcggcttgttaggagacgagaggaaagccactcgagcgagaatccttgattttcgcagagttgttctgtcatctgaggcagccgttgaaggaagcgaaacacgctgcagtttgcaggcgcgttgtgcacctctcgtcttggatgtcgattctgtctccagaagatccgctccccggagcgttacatcagagaggaaatggaaacgcagcgtgtctccgtacacgaacgagtagaaaaagaggaacaaggtgttctggggagacccttctgggcactttcctccaccttaccccttcttaggctgggatttagaaagttttcgaaactgcaggatcgaagcctttttcacgtctcttcccgctagagtctgagattccagcttctccagcacgaagggctgacgatgagttacgattacttttccggttttcttttcacaacgggtactccatctgtaggtgccacagcatctctgctgctgcgtcgaggcggggactgccgcaaaactgctgcttttcgctccacagacgccgtgactgaataagtcgccccgtctaaaacagcctggaaaaagcgtgcgaaatgcctgtgccgcatgctggtgaccactctatagacatacgaagcgcggccattttacagaactttcacgcattcatgtccctctgagacctcccggaaaaggagaaaaaggtcgtcgcgaatcggcttctcgtttcccgccatacttctctgagaggaaaactctctgcttcttgattctctggcctaaaacagtgtgtgtgtctgtgtgtgggtatgtgtgcgctccgaacgacgcctgacaagaagtcgggactcgaaaggcagaatcgagaggcagaaacgcgcgccgacgtctctcgttaagggtaacggcaggtgtgcgtggtggtggcaaaaaagaaccaaaaaccttgcgctttcctgcgaattataggcaaacagcgagcaaggctccatggtgggagggtcccgctctgagcggtagcagcctggtgcttctctcgaagttcttcccttcttctcgacttccgcgcacgcactcgtgctgcatctcgtcacaaaagctggagaaactcctgggcttggcacatggcaaaacttcgaaactccctggcggcaaaactgggctctgcatcccgcctttcctgtgcgagacggcacttctcaatacatccagcgaggcgggacacacagcgccagcgagcctcggcggaacttcattatccccgaaatctttcaccccgtttttcgccgtgaacgaatcaacaaagacggacctctgctctcttttcctttcccgtcccaggcaagtccgaagcgcctgtcacagaagaaaaggctcggtggcacgca

SEQ ID NO: 1529 - DNA, 3563 bp, Toxoplasma gondii
  source 1..3563: mol_type = genomic DNA
gaagttgctggtttaaccgccacagaagggcaagaaacgcacggaaggaactgagcaaactgagaaggcagttacaggaactaggcgagtgtgacttgaagacacaagagagggtggcggtggggcaaatcagttcgcgatggaaactcggaagagacggaggctgaactgtcggaaacaatgaagtggatgacctagggcggggaggaagacccaggagacagtggagaaaggatgtgacgcatgcgtgaataatcgttttcctagtgcgagttgcgtcagggtgacattgctcagtttccgtcgctgtgatttgcctctgctcaaaaacaccgagacgtggtcccgtggttttctacgcacccctttcaaagggaaggcaaaaagagtccaggtcgatgcggtgagcacccgcttagcatgctactcttgaacagtactgtacagctagtgcggttactttttttggatccttcctttctttctttccgtctcagtcttttgttgacgacgagaacgggaaaggtgcagctctggtgtagggatgaattggagggtgagggtacattgtcgaacgccatgtaaacagtaatgaaggaaaaaataccattgtgttttgctccgttctccattttatcctgctgaattgccgtacgttggaaggcgaggcttgacatggaaagaagtgaggctacagtgttctacgggtccagtggctacgcacactttctatcgccgcgaggccgacgacccgcgacacacgtctcattgaattcgagagcgaacagctggaagatgcagaactacggaactggagccgttcctcagttctgagacactttcgtagaagcagttctcaagggaaacatcgggaaaggtgcaacgagacagtacacatcgctcgaaatacgaacagacgtcgcctgggttccaaaagtttgcggctttgacagtttcattccaccaacttcagcaaacaatacaacgcctgaacggtggcggtgctcgctccaaaaagcagtatcaaaaaaaccagcactctatatattgcctgtataaatatcatgagatcgatccttccttgaggtacaaccagcctctgcttcttctatttgagtagaacaattctcgatcgccgaccaactgcgcagagacgcagtcgcttctttcaagccgcgcgtttccatactcccttgtgtcttagacaggaaagtctcagggagaaatgtctattgtttctccctagttcactttgaaccacccctagtgtcaccgcaacgaagtgtctatgccgaatgacataacagagactctcaaatggttttgctcgaaacgttgacaagagccgaattacgctaatgccaacgggaagaaggataaacgtggtggtcctgtgaaagtgggcgaaatgggtctctcaaagaggcacgggggcaatttgcacacctcaagagcagcaacgggttctctttgctcgtcttcacgattcaacaggtgaacgctactcgggaagaaactgagaagcggaaagatgtgtcacttccttcagacatcacatgtttttcacgtatgtccgtgtttcgcttacgggctgttgattctgtgtcgtgtccagtgcaaagcgtcaactgagctcctcgttatacccaccagatatgaggacgtccatgaaagtccgctgagttccgttgtggttcatttctcttcattgcacaaccaacagcgttcagttgaaaattaaaaggaaaaacgtacgatgacgcacacaagggcgattcgcctttctgagccaccctaaacgatccgtcagatgtgcctaagctccgctgtttcaggacaacgacggtggagacctgtttcaacgacatccagtaaggaaggcgaagcgcctcacgagactagcccgctttgcgttttccttgaaactgcaagagcgagtacttctatgtgagcccctaaccacggaagcatcatatgatgaatggcgctcgacatttgcactgatgaaaggaaataatttctctgtgacaccctcgaaagacacatgcaacaagttcttacgttattacgcggttctaccagagacccgcactgcaacggaatgctgtttttcgtgaatttccccccctctacacaaccggagtggtgtcacacagcacacaggcgggttccatagttcaagtttttcagagaaaatgctcgcaagcagcgataccttcgcgcctgaccgacgaagcaatcggtactcctggatagagacgagggaggcccgtagcctagctgtgcaccctttctttatttttggatgttggaaaccacggacattcacaagctgtttcccgttcgcgccgccagtcgaagtgtctggactaacgtaaaagccagtgaacgactctgcattcgtgcacctctgccccgcttggaaacgctcgagagttgattgaccacacgaacttatctattccaatgctgtgcctgcggtttcggtggtgtgatcagcgtggaaaacacccgagcaaagattttcgaatcgagctcgacgcgtaagtatatgatattcgcgtaatgtcagcgaacggctgttccgtgtatgcgcgcgttctacagactttcgggtgcaggaaaaatgcgagtgaaacaggcgtgtttgtgtgtgaaaaagagcgagaatcacgtcggttggagagaaacgtttgctttgccccttccccgtctcatttccgtgcttgccgggacagttacctgccggcgcgccttactcaccatgcccgaactttgaggcacacgcagtgagacacccgcttcgggtttcccgcgcggcaaaacatttccgatcttcagtggcaaaagcgtcgttggatgtaaaacggaactgaaggaaagtcattctgtgacgaaaaagatccggtttgtccgtttccgggatgccatgagacgccgagtttcttgccgcgttccgcgcggttcctcaatacggctgaatgagcccccgaagcacgcggggcttttttatgtcacgttctcgcggtcaactttttttggcggccaataattccgctcttgcagacgcgccacgttgctcgaccgacccttgtgtcggggctgcgtctcgaagtgtcagatctttccgccttccagtttcacaggaacgcctagttttggttggcttaatcctcgccatcgcggggcgaattcattttcttctaaactgcgtgtaaatttcgcggatctttccttgtctgtttcgtcaaacatgagtttccgttgcgatcttcgccggccttcactggttctccaaacgctcgcctggatctcgccctgcctctgcaacatttttggctgactcaccccgctccaggtggtagcaacctctgaggcttttgttgtcatttgtagttcgtctctgttcgcccatccaggtttaattcactcatccagcgccacagcatttctctattcatcttccctggctgcgttagggggagtctcagctgtcaatcaaccgttgccctgatgagctgctcgtcgaggaagcggctgtccggttgtccttcggatctgta

SEQ ID NO: 1530 - DNA, 1598 bp, Toxoplasma gondii
  source 1..1598: mol_type = genomic DNA
ttccgtcgacttctcttcactccatcgaggcaaatgaaacacatgcgtctccctgcctctccggaagcggcgctgctggactcctgtgacagaggcgtctctgtctcgtccactggcgccgtcacatctgccattctaccccaacacttgacaagacgcgaatcaagtcggagaagaagaggaagcagagaaagaagagacagagctcggaatggacatgcacacgaaggctcctcgcactggatatggaaccagtgcgcccaggtaacgacacccgtatgactacataaaagtacatatagagatgtataggtataaatatatatatatatatataaatatatgtacgtatgcgcttggatcatgtacaagtggcggtgggactagtcatacagggaaagacccttcgtctaccgtgaggtgaaggagcagaaacaactagagagggttgtgcggtccatgaccgcgagtcgaagagaaaggagcacagcccgcgtcgcgcgtggcaactggagaaaaaaggaaggcgacatatcaaggcggaaacgaacgcaaacgcaacggccaacctgaaatgtacgagggaacacctttaggtcaccctgtcacttccagaagcagcattcgcgttcccggggtacatcgaactcaacctgctgtcttcaccgaccgtattcccaagcagttgaccgaacaaatggcttttcattgatcccgaagaagcagactgagaacgccgcccgccggctagttccacaagaagcgaagccgccaggatctgggatttacagcgttccctctttctcctcaacctgagtttcgcgacgaacgcagccacaaagctgtcaggagtgccacacacatgcgcaggacatgccagacaccagcaaacaagaaaaactgcctaaagaaagcagcagtttattagaaaagagactgaagcgcggctgaaagcagcccggttcccgatggggcgactcatctcaaagtcgccacatcgacgaggtaactctgcgatcaatagtctaacgaaagacataaagtgtgaagtgcagcaaaggggacgcaaccatggtgacagcttcagagttgtgagctaacaaaaagatggaaaagtgcaatctgcttcaagagaacgctcgatcctttgctacagcgtttccagtgctggaaacagagctccgaatgcatgcacgttcactacccatccaaccggccttccgaagaaaaccgcgctggaggtttcggagaaaatcgaggacgggtgtcttgattttactggcttctgttggagggtttaggtttgttttcaaactcagcaaactcgtttttcctttcgttttttacgtgtgacacgtcaagactcttctgtgccagtcgtctgctaccactgtagcgtctggggtattcgctggaggttcgtgccacacagagtatgcgcttttctgtgcgcaggttgccggtggaacgctcataacgaaggaactgttctgggttgtcgcctcaaaagtggattcttgcctgcctggactgttctgccgcgtgaaagtaggtttttagcggctacccaccgtacgtctgttcctgcgcgccaaaga

SEQ ID NO: 1531 - DNA, 2057 bp, Toxoplasma gondii
  source 1..2057: mol_type = genomic DNA
ttatgtgtgtcacgctgagtttcgtgcctcaatgcaaatctctggaatccgttcagacgcataattcaagtgccatcgaaggaaaaagcgcactgggcgttccccgcgacgcttgtggtgggggcagagagcgaaacaacgcaaaagaagacaaatcacttcccccaaccggcagcctctgcgggccaagtggattctaacttccacctttgttgtcagtctttttcgcctgctgtatgaaaccatagaaacgaccattggactggaggcagagcctataagggtgtcgaacagagccaagtaaagggaaaggatgaaagaggcgaagaaaaggaggaagggcaggatggaaaagacgaatccaggcaagtagcggcagaatacacacgaaggacggaagcctagaaggaaggagagacagaattcacggaaggaaaggaagaagcaaccagcgaagggaagaagagaataagaaactggcaggaaggaaagagaaatgggaagatatttaggaagaaagggaagagagatgtagccaggacctcgaaaaggataggaagacgcaacaactcccgaatcttcgcgtgaacgaaaacagacgactatgggccaattgtgagttccaactagcgaggaggcggaaaagggaagacggaagaaggctagaagaaagcagagaggcagaacaacgacaagacaggctagagagagaaatcgagaggcagtagacaagccacttttcgctgttctccaccttcagagaatccgtgaaactaccgactgtggagcggaaggcacacacgccctgtcaatgttttctaaagtctccttcgaatgtccgtgatgcggacttctttcgtgcaacgggtcggcgtctccgctgttctgttgtttttcaacatggaaatgagaaagctgttccacactggctatcaaaatgcactgcgaaaaacggttttccgtgaagtcgcgcaccaccgaaaggtgatacacgtaaggctgccttacgtttcgcggtctcgcaccgctggtgttctgatgaatttttctttccagttctgagtggtaggtggggacctatctgtctttcgagacgtcccagttggacgcccggttgacatcttgggggggtctgcgttcgagggaatcgtgctcgactgacgcagcacagctgaattaattattgcagaagtagagcacactgaaaaaagccagagggtcgaggattggaaaaaactcgctcttggcttttctaacagtgcgtgtgcgggcgacgagaactcggctagttttgctccgtgctcggttgagaggaaggaccttgattcgcccctgttctttttgctttgacagaaaacctgcacgaactaaaagagatttccttcattcttcatggcttgtcctcttctaaatgtgtctccatataccgtggtcgaatcgaagtgaaacaatttcctggactcgacttttcgcgcgcgcgtcgattgtccaagccagctcgggatgtcggcagacagcgacgagactgccgccgctcttccgttgcagcttctctctcctctttgtcttgttctctcttctctggtgtctgctcctcttttgcgctcgcgtttgtctccatctcttcctcttcttctgtcgttttccacttgctttctagaccgctctgttccccggctctgtcgctgttttttctctgcgtctaccctgttctctctctcgtccgactttgtgtgggatatgtgcgcagagcgaccgtgcgactccacgacgcaggcagacgggtgaagcaggattcgctcttcgtttccggcttcccttccttcagccgtctgtcgtctgccgttggacttgagctctgaactgcatcaggtgtgtgcgttccacttctcagccaggagcgtttcgccctgtcgaaggtctgcgctgctccgtccagcgacggtgtgtctagcgcaacacaaaaagacgagagcctccacgaattgacaaaagacgaaggcagcgcgaggcactcgatgcagaccccccatgcaacagcgaaaaaaagagaaaaa

SEQ ID NO: 1532 - DNA, 2241 bp, Toxoplasma gondii
  source 1..2241: mol_type = genomic DNA
cagacttcttttgcacgtgcttcgattgcaggttttcttgacctttggaggcgaaaaaagataactttccttcctcgccagtcactcggggttccttgggtgtagcagatcccagacagtgtttctctcagcgcgtttttcagactccacttttaggctctcgtctcgcttctgaacggtctgcaacgtcgttgctcgctctggtaatagatctctcgttctctcgcaacccaggtggttgtactttttgctctctctgttctctttcggcggaagctagaaacaaagaaaatctgttgttcgttctggacatgaagaagcaattctcttcgaatgtggaagctacgtttaagaagaaagcggagcaatatgaaggccctaagttccagaagcagtgaagacgtctctccctgatgacacagagaggtcggtctttgggactcctgcgtggaaatgcaaaccttcgatttgtcttggcacagcagcaagaagataagctttagatgcccgccttggtattttggggaatttttatcgaagcagaaaaaagctaaacagagcaagtttctgcacatgcatgtagcgacctccctcgctgtgggtgtgcaaatgcatggcatttctatgacctctatgcatcactctagagtaaacaggactgtttccaggctacaaaaacaggctgtcttcagtctacagaaaagcgagttgtcacattttaaacgaaaaggagtcttctaagtattgaagaaagaactgtgttcccaaaaaatttaaagggggtgttctctactctggaataaacagagttgttctttatgctagaatgaacggacatgttcgtcgccggaatacagcaaggcgctcttttcactctgcaccggaaagaacgagtgctgtcaactctggagaaaaaatcggatcgtccttgcagtaagtcgtcttgaagcaagctgtgtgtgacaaaaaccgttcggactgatggacgtctttgtcacttgtcgctttgaagaaaaggggaaagcgaaaagtagaattgcatctctttttaattggagcaggagtccccgacgtgaaaccgaggattccgcagtttttttccagaaagtcggtgatgtttttctgcacacgtgaaagttttgctggaagaattggcaaaaaacgaaacaaaagtgtaagatggagctgcgagtcaagaagaaacagaagaaaaggaaatgaggcgaacctctcgacggaaacacagcctacaaaagcaagtgcttccaaataaagcgaaagaaacagatcagatgcataccctggaccggtgcgatagcacccatgttgaaaagaaagtcctctagttgtgaagctcctgtcctgagagttgcaaaggtagagttccatattagatcaggctgtatgccgaagttcgaaccgaccggtagaacgcgtggtgaaattccagttgctctgtctgactggcattgttttttcttgaacgaaatgaattcctcatttccgtttcccctctcactctcggctagcgcctacgcactgtcgatttccgggtggcagcgacagatcggcagcgtcgtcgacgcaccgcagatcagtcgaattggcgggcgtcttccgcgaagttgctgttcttttctgaagcctcacagaagacaaaccccacgcgaggtttccacgtctctcacttttggtagcccattcaaaaatccgaaaacgcactctcgcactgcgacctgtctccggatagactggagccgctcggcggcttgaaggcgagaaagtcaggcgagttttttccctgtccggagccgcggcaggcgatgcggtccaggaaaggggcaaagtgtttctcggcttcctagctttcacggttctctccgggtcgtccccggcgatctctctctgagacggagacagcaaaggcgagaggccagctccagcctcactatttcttcttcagtctccacgcacatttgtttacgctgtggttgccccgctgactgtttcttttttggagagttttgtgtgcgtctcgtctagttcgaggtccctctttttgtccgtttttctttgtaaaccacgcgcttcccttccataaagacaccacctcttgtttttgtgtctctctcgaccactcgcacttcgtcgtcctcaccgcgcgtcgtttccaaaatccacgaaacagccgctgcacgcgtttcccgtcgtaggttttcttttacggagacacctcgaaaa

SEQ ID NO: 1533 - DNA, 2487 bp, Toxoplasma gondii
  source 1..2487: mol_type = genomic DNA
gcatttcttttctccctgtcttttcccttggtgctcctcgttttgccgcgactcttcccttcagtttctctccgattttttcggttgcgttccttcttttccttcccgttccctccctgctcttcgctgacgaagagtctagacccacctccaaaggaacttgtgcatacacaggaaaaagttcctctttttcgtgtgtaaactccgataagaagtcctcaacgtctgataactcgaaggagattctcttccgagctgtgaactgagagaagagattctcaaatgtgtgatggatgggagggagcttttccctttcgtctacgttctaagctggggggaggagtctttgaatggctaatggatgcagaggactgctactccctttttttccagttccaagcagagacgaaatctcactctggtggccctcaaactgtgttggaccgctcaagaacgaagcgacacaggggcattaccacggagaatttacacgagagagaaaggagctagaggagcagagagaaagagttcgaaaggaaggaggaatggaggaaaagagagagaaacagacgtagagaaacaagaggagagatgtcgacagaggtggagcgcaagatatctgagaacgtcgtgtgagagactcaaaataagagtcgagcgacgagaggcaggcagagagaagtggagtgtttatttcaaggacgaatgagggggtgtagaggtcaaggaccggagtgaggcgagatcgcagccgatatttcctattgcagacacagactggagtttgtgtgttatccgagttagaaaacagaaaaaacaccgcgttctctcaactttcttctgcttttctgtttccgaagttagcaccagttcttcgtcgcctctacgaagcgagagaggtgcagaaaaaaagacaaagtgtctctgttcgtctctcatcctacagctggttctctgtttctcttctccctcttggctggtagacagcctcctctccaacgcctcttccttttctgcagtacgaagtaaagtgtgtatggcacctcaaactctgtctggaggaagcaaatgagagtgaccctgtttcttctctcgagctcccctctctctgctacgaggctgtcgcctcaggtccttcggcttatctgcgggtggaagtcgcgtgtctcgctgcgtctccgccgcggacgcggaaaccggctcggaggcagcgagcgccagacgcagagacgcgaccgcaccatgccgaggcaagaagagcgagaacggcgagagggcagagaagggaaaatgcagagacgagggaaggagaggagcacaaagaggggaaggcagaaaatgcaggcgcagcagctgagagctgagggagggcaggtcgcctccctgccccggcagcggaagggagggcggttttcgatgcggcgttaagagagagcaggggacagcgagaagagaaaacagaggcgagaaggttttcagaagacgaagaggagagagaagatcgagagagacagagagagagaggtcgtagaggggagaaggaaaccgatatcgagtcgcatgcgtcacacacggaggcaggagtgagagaggtgagggaggcttggggtgttctttcgaaacttaccacctttttgactcgtctcttttgcttttctctgacgtctgcctgtcgtttacaccacttgaaaaccgagacgctcgagaatctggaggcttaactctctgaagctgagaaaggagagcatgagcatgcatgatggagctcggcgcggcgcggagagaagacacttgcgcggttgagaccgaagacgaggaggaggggcgagtggtgggcggcctggggaaaaaactcgcgaaaagcgccgccttgcctttctctctcgtagcgccgtttgtgtgtcgaaaagtctttctctggtgtgtcgcgttgttttttgccgtagattcgctcccttttcccaacttttctcccctcccaggaaacgcgcgagaagcgaacttcttttttcggattctctcttcctctctttttcaccctttctctgcgctccttcttccatctctgtttctcctcctcgcttggccgcgcccagatagttctcgcctgagttttcctgagaaaacctcgggaactctcggcgcacctgctggtccggactttttgagattttcagactggttttcctgccctcgctctgcccccctttgctgcgcgccgctctcgaggtcgacgtagacgctcggaccctccgaaaggcgcgtctctctgagagagtcgtcctgctcttttcttctgtcgtctctcgcttccgcgtccgtccctcccggcctcctctctttccaccacaaacacacacactcacacagccacctacgcatattcgcttgcaggggatctggttttcttttttctccgtagccttttttcgcggagcgtcctcgcgcttcgttccacgcttttgcgtttctccgttgccgccaaga

SEQ ID NO: 1534 - DNA, 1601 bp, Toxoplasma gondii
  source 1..1601: mol_type = genomic DNA
ggtagaagatatgatttttctcgccctccatttcgaaagcctcgtcgatgtcttccaggaggactccggtgtctctttgattcagaacgaagagtctccagcgactttctctcctctctgcactgggcgcactgggcgccgcgtcgcgctcgacgacatgcagtccaccctgaatgtgggcgcgctcccatttgcgcgtcgcggggcagagggcgtagacgctgacgaaggcggcttggcaaatgatgcgccgaatgcgcgcgtcgtgtctctgcagacaccgcaaagaaatctcgtcgcgcgcgcgcgccacagacgaaggcactggcggtgtgttcgtcgaaggcgacgcgtctccgcgacccatcctggaaagagagagagaaaaaaaagagcagagagagaaaaaaaagagcagacagagagaaggagcaaagaaaaagagaggagagaaagagagagaggagagagagagagaggagaaagagagaggagagagagagagaggagaaagagagaggagagagagaaagactggagagagagaggagagagagaaagacaggagagagagagaagagagagaaaggagaagagagaagagagagaggagagagagagagagagagaaagacaggagagaggagagagaggaagagactgggaggcggagaggactggaagacaaacttgagacgatggtcagagaggaagccgagcggagaagagagtgagggaagaccggtgccgaggcgagagagcgcgagatcgactgagagaaggaagctgagaggtcaggtctgacgacacttgagacaagagacggttcaggtagaaaacgcgaaggagaggacagagcgcttgacaggaagagccgcgcgacggcttcgacgcagaagaaaagccactgaagagacaaaggccgcggcgacaaagagacagagaggaaaaggagaggctcgcggagcgccttcctctgagcgcatgcaggggaaggctcaacaggcatgaaccgacgacaagtggatgaccgcagcaacgcgctgaaaacgcgagagaagaccgaagggaagcctcactggctgggagctcggaaaccgggagaatcctcttccgtcttctccttgcgaggcgtcgacagcaggagagaaggctgggcctctctgcacgaaactcgctgaggagagagaagacgcggcaggagcagcgaccatgagagaaatcccgtttttgagaggccgacagggacgcagcctcgggcgtcctaacctggccgcggcgtcgagagggcgctcctgggcttttcagagtctcgaaagatatcgcgaacaaagaggcgacggtttcttttcttcagaggaacgcgtttctcggctgcagagagagcctgcgcggcgcgcgcggcgtgtctgtgcatgcagagagtgactcggaaaattcctcgaactcgggtgcgggagacaccgggcctagaggcgtggaaactcgcgcggagaacgaatttcttagtcacaaaaaaaagagctagagcagagcagagaaacagctcgcctgaagagaacagagtggaaggactcagacgcaaccgactgcactgctca

SEQ ID NO: 1535 - DNA, 1980 bp, Toxoplasma gondii
  source 1..1980: mol_type = genomic DNA
acagcgtctatcatctcactgtcttcgtcttcatctgttgactcctgtattgcatccgaagagccgcgccttcgagccttcccatcggcctgtcgggcacgactcgagaaagcagatcgaagtggtttctctggctcagcgtctccgttctctcgacacctcttcctttcatagcatgaggaagctttaccgttcgtctctgaagaacgatttttttcttcaccacgcttctcggtggaacaactagacggcggaacttgccgcacgcggccctttcgccaggtccacttctccctgcacaaaggacactgaatgactccagtgtctgtacactcgaagcccgctcgagcgagcagaaagggagaaagcgaaggcgggggggcaagccacttttgtgttcccgagaaaaacgactgaagcagctccttgtactccgcagctgggcccctacccccgagcgcctccagatttgcatccgccggccgaaaaacggtactgactggtgaaacgaaagacgagccccccatcatctaattggacagcgaaaggaatatagggtacttgacaacagttacaagggaacacgtcgcaagaaggggtctggtggtaagcggccccctctgctcagacgaaaaggagacgcaacggctccgaagcacccagtctgatcggcaggccccttctgcctagttactatatccgctaccgtaccataaggaagggggagacactttctgaaaaaaccacaccgacacaagaatgcaacgaaagtttctagtgttcgcgatgaacttgatgtagttgctggttcaggaaaggcccgtacctctgaaatagggaaaaggcatacgccttggatctccacatacatatctcttctcatacacgcgagtttttcgggagaatatcgcgagacatacccaacaggtcacacaagggcttcttagggttttcagctgtgccagttactagcgtcggtcaatgtagaagccagagaggggagtcaggaatgacgaatttcattgcaagaccgacacgtactaccagaactctttttcgctgttctgccgagccccaaagaataacaagtcagatgcaaacagagcgtcgtgctaccgctgcaagagcggctactgcacatggaaatacgtacacgtgcatatacgcagcatcttgtctgcagaccgtacacttttcttttaatgcagatgagttaccaagtgcagcgataggggatcccctttccgtctgggacggtcattctccttcttaaaaaaaacgtctttaaagatgcccggcgacaccaacgaagtgggtgcaaaaatgctggcatgtgttgggggtcacgccgcagtcccttgctgaaaagcggccgtgttgttttcctcttgcatgcgtttgagcgactggaattggggggcttttcctgtccacagacggctaaaatggaaaccgtttttgttcgtttgaaagacgtcctgacctttcgcgtatatgacacgcctttttgggaaggtcttttaggaggtccgaagaaacttgccctacacggccgccggcgctcaggtagtgctctcgtgtgtctcctctcccaggaccgactttcgtctttggcctgacgcgtttctcttctgcacgttgttggtccgtgttcgtgcccctctccccactggagttctttttcctaagaagaaacgagctttgcccctgccccgtagttctttgtcgttgtggcgaaagtgtcgttttccagagggttcagcgccgctctgcacagccgttgccttctgcttttttttcgactacttgcctccaccacgtttgccatcgtctctgacacagttctccttttcgccgactccatctttcaagttccccctccagcgtcgtacccccgtcgctcgcggacgaagtcccgttgctcgactaacgctttccgtccgtcgcgtcccttcctctcttctcttcatttgaagaaaa

SEQ ID NO: 1536 - DNA, 4282 bp, Toxoplasma gondii
  source 1..4282: mol_type = genomic DNA
tgccttttcgtgggagggagactcgtcagtcagtggtcgttctctttgtgtcagctcgaaaaacggttcgcgcgcccagcggaaaacagcgaaaagctcaggcagcgacggcgttggccgtaggcgacttctccatcaaagctgcctccttgtccttcttgatttgctccgcaaactcgggcgtcttggtgcagacaatggtaatcttggggaccatcttgagtgcagtgcgggtggacgagaaataagacgtctcgacttttgtgatggttgccgaattgtcccgctgaagaagcgacgcggcaccaattgcggtctttgtcgccatgcccagacctgtttcacaagagagaagcggcgcaaaaatttgaagtcagagcctgcgctacgactgcactacaaacagcttgccagaacactccccactttcacaaccaccaaactggataaaactccggacgcaacacgagatcgtaccaaccaccccagcccgctgaactcctttctgcgcccaccagatttcacatccagccattctcatccccatagcacttccgaaaagcagaaaaatccacagtacgttcgcctgatccgcgaaaatcgtttgtacacacaaccactgccccaccgtggtctgcccaaagaatcataacctcaccaacaggtggataatgcagtacagggactccgcttcagcgaatgagaaacacagtcacgtcttcattcttttacacacatgatcacaaacttcttcgtctgtgtccggcattcacacgtgagtgcagtggaaatttcagcgcagatccgacttcccgcctaaccacatacattgcagatatttggacgtaagaatacgacctgcaaaagcacagttgttgccactacgttacagaccccctttcacctttaacacgagtatacgagtactttggcggtcgttaacgggggctcagacccgacactattcgtggcttgcttccaccaggatcccatttaccacaccgaaaaccgcagtctcagccacaacagggaaaagacacttgaataacgcacctgtgatgatgacttcatcgcaagcgggcttgtcgtcacggccgacaagcattctcttgccgatgcgggcatagaagcctgggatcttatccatggaaacctgtgaaacgcaatgcacaacaccgtcacatccgagtgagtccgattcgtggcttccatcgtgaaacgcatgcagcacgcgaggcacgagtgaaaggatctgccactcgtgcgaatctctgccactgcttcgaccggtaagcagcacattcgacatgtttgttaccggccgcatcccagtgacccacggtgcgctacggaacacttgctcgctatggcggaagtgcggcacaaaaaaaatctgtggcccttgtccaacagctccacaacagaccgtcgctatcatttgggaagaaatcttttccgggatgctttccatcccaaggaaaacaggagacgaaccccacccttgcgcaggtgtcggtgcgtctgcggtttgagcgaccggccacgcgacgccttgcagcgcagatcacgaaatcggattggttttcaggacacaaaacgccccttccttggtaagaacagtttacacgtttgaaaaggcacgaagaaagagcaagtgcacatttgagtggggggagcagcggccctgcctgctgggtccgcctgcacgcgttgtctacggtaggagcgctcgggcgtccggttgcaggaaggcactccaatctttgtcgcagtacggagtggaaaactcaccagaatcgagttatcagggcgcgcactgcctgcagccgcgtctccttccgttgagttcgcagcttgcgaggtggcattgggagccggggcggcggcgacgtctgccattgtgttgggaaagtcaggaaagttttgagggaatccacaagaacggtttcgagagacacaaatgtttcaaggaatcagagtgatttgtgcagccgattctctgcaaaaatgtccaaacctagggggatgccacacaggagttcacaatcggcgctatccccttttgaaccaggctttttggagcaatccagcgaggcacgcaacatgcatgaacgcgtgacccgcacagtgcgcttctacgcttattcgtccaggtccgccccgaacgacctggaatcccttgagtacacaaaactctccacgctactgcatattctatgaatgcgcgtaccagaaggctcactttttgctctattcagcgtgaccagaactttttccgagtgacccgcagatgccgtgaaaccttcatcaaataacccgatacaaaccccaccgttctttgacgagaactcccccctgtatcacaccccttgcggtgcatgcctgaaccgcctttcctgccagctgctgtcaggttcgagtccaaaggtagaaaactccattccacactgaaacttacttgcctttcctgatgcctccccagcacatcacagtcccccttggaccgcctcacgcaacacccccgacagtggtctcgcacttcactctcgtctcaacttttctttgccacgttttggattccccgatattgaaaaaaaggcggttcgttcgctgagagtccaccctagtcaggtctaacgtgacagagaaatcgagagttctggtattgcttctctgcatcttccgtctgctcggaaagcgcgggtttcgcttgccgcggggaacgcttatgtgttcttgcttttgaggacttcacacgagtcacacacagggatacttatatacaatcacgctcttttctaggaaaccccgtaagatttggcgaagcacgtcaactctgacagaatcaaagctggaaaaccatgcggggccttgcagcaggaagcccgttcgattggtcattcgataggctacgcaggcgccggcttcgcgctccgagggcgccctgtcttgaagactgaagactcttcctcgggtaaatcagtcattaaagtgaaagagagctgcagcagaagagctgtcggatatttgctagagtgtgcgcagcaaatgaaactctgttttcatggcataaccgtgtgacgatagagagctgggtcgagtctcaatggcaagggctatccagtaaaagtcgaggttatctgtgaacattttcctctctaatgtatatccaacgaaacagtctgggattgaacgcctgaaaacgctatagttcgcagattttgacatcatacgaccattcattgaattctcaaacctgcttgggcttcccctgaaggcgttactgcgcgctgctaccctcgagtgcgctgccagacagccgcagtgttgcgccctacgtcgacttcttggggctttctcggcgaacttgtcgacacgggggtgaacaggacagtagaaaatctccttccgcaaacattggtggctttagtccagagacgttggtttctcttacgatgcctccccagacacatgctgcaacggctgtcgatcttctgcgcacgcgctcctcgcgtggtaaacatagccgccgtcgttcgcatctgcaacactacatctttctagtttttttcgcgctgtgtgcaaatgagtaggcgtctgtttgtgcatgtgtgacgatctcctcgtggaaacgaagttgagtctctctggggcattttccaagagggtgtgcacgcgtacagtattgtgcagttgcggttctctgcggtcctcggccacacggcggaaagaaggcttccgaggtcggcacacaaaaagtccagcttggtaaaaaaacgaatggcacggcagaaagcggcagaagaagtggagaaagttcaaagtttccacatttcaaagctggttttctctgtgttcatccggcagacaaccttccccaagcgatcgaggcgtcggtcgccggcggcgcgagccccacgctggcgtggcatagttcttcccctaagtcgagcacgaagaagaagagagacgaaatttgaagttgaatgagcaaggaaaaactgtatctctcctcccttggcggatttcttgttgccagaaaccggagcgcgtgcctgcatgcgttccgtgcggttttctctcgctctcatcgtctgcagcggcaggccgacggagggaaaggaacggatgatatccatctcctcgtcctcggcctccctaaatgcctgaggagagcctttttctcttcaccttcgtttcagactctgagcaaacatcgcggaacgagtatcgcagcggtgtggctttgccggtttcactttccagttgctctctaccacga

SEQ ID NO: 1537 - DNA, 1604 bp, Toxoplasma gondii
  source 1..1604: mol_type = genomic DNA
tattcctccacctttccaccgctcttcgaatcgagaactacaatttgtgtatgtgtgtatacatgtgattgtacatatatatatatatatatatatatatatatatggttctgttcatttctgcgcatgtgaccgtaagcgtatactttgtgtagataacaggattatccacgcgtcacggaaaaaccacgcagtgagaacggtaaggtgctgcatatccgtgcaggtgaaagcatttctgtctctttgccagtttgactttttgcttcggttccagagagaaggaagtgtctctacagaagcctttcttagattcttctctggcgcccgggcctccctcatcttcgtggcttcctcctgcttgtccagtcgggaggaaacatcgtcgaatcatctttcttccttctaaaacgtttgatttttctctcaaccttcgttttgtgtcgaaatcgttggttctccactaaaccgtttgttttctctaaacgtattgttccctccagaacgttcgtttctctctctagactttttttctcacaaccttccacgtcttctgaaccagctgctttctctcaagctgtggtcttgtctctgcctgactctgcagctcgcaaatcgatctacgccgatcgtctgtcgatctttcctgaattcgcagcgaagccggcgcgctgatgtgcggcaggtgctgttcgagaaaacgaggcaaacgacaagcggtagtgttctgtttatttccttgatttcccggtttctccactcgatcttcaacttcggtgaatttcaggggcgtgtgacgaaactcggatttcctacgctccttaacatctccgcaattctccctcccaccggcagaagtgatgctgcctgggaagttgtgcttttaaccgagttcggtcctcacaagcgaagcgttatggtccggtagtcacttgcatcagagaggagatggtctgccatgtaagaggcatgttgctggtggagaaaaaggcactgcctataactaccgaggagactcgacacggtctcaggtgtcttgcgagcacgggacaggcttttctgcagatcacctttttggtgcgctgctgtctccggaagacgttttccttttccacattcgtgccagccaccagtttccgactgtcgttgctttggctctcagtgcgtttcgtcttgtcctccttcgcgtttcgttccttcgatcttcctctccccccacctcgctgtccctgtgtcgcttccttctctctgtgtctcctcccgtctcgtttgtgtgtgcgtctcttctctttctccaggtgtctcctttctccttgcttttccgttgtctcgctctcggctgtgtctgtctcctttgctttccttcgttttcttgcgtccgacccctcacaaactctgccggtgtctgtcgaagttctgccgcctgtttcctctctgcgtgtctcatggttccctttctcgacagctgctcttgaatgcaagacgctgacacacgtcgacctttctgcctttccctttcctgactcgctgattcctcccgcatctgctctttttttctgccactttctcaagtcctttttgcgcgggcgcaattccttccaaga

SEQ ID NO: 1538 - DNA, 3277 bp, Toxoplasma gondii
  source 1..3277: mol_type = genomic DNA
actggagaaggaatgaagaaggcaacacacaaggcgaacagttgtgtcaaagcgccttacctgagcagctccgaaccatccgcgactttgcacagagtgttgctgacggcatccagcgcctgcacggcgcgccgggcttctttccacgaagaagaaacatctgaggcatcccctgaagaagcagaagaaggacaagacgacggggaggaaagcttcccttcttcacgactgcctgaagaagacgaggtgggtgcaccgccagtggcgaggaaggcctcgcagtccgcgaccgcttggcgtccaaggcggacgagctgctcaggtgtatgtacacctgggagttgcaggagtccaggcctgagttcgtcgctgcctgcagcgcgacttccgcgagagctgatctgcgtgagcccagagagaaacgagaagagccccggtttccgaggaggcgagggtgtgggaaatgtcgaggagaaacacggaggtgaagaacagaggccatgcggttgcctgcgccactccgactggcctgagtgcgagaggcgcgaaagagaagcaaatggacgtcggagggtcctcctttcaagcgtcgaagatgcgggagggacccggtggaaagtcagagaagaggaatgcgatgaacgcgttccagaggagttgttgcggcagagagatcgaggaaggaaaaaaaccggcggcgaggagacagaggctgaaagcgaattccgcggtggcaggctccgacgagagcgcatcaccaagacagaagggagcgagtcagacctttgatggtgggcacgaccacctgctgcctggactccccgcagaagcaatccggagcgtgcatgcatgttgttgtactgagaagagaattcgatgtaggtgtagggaaattttgaagacgcggtttccagtcgcaggtgaaagacacagacggttcacgagatctgttgcgcggaaggaggttgcgttttttctgacaaacggcaatgccgtttttttctcgggaacgctgaagtttgtgatgagccctctctggaaaaaaatggcacacgacgaggaatcgttgaagagcagcttctcccgagggtgagagacccagagaaaagccgagagaaacgcagcagaaagggacagttggcgtggcgaacctgagggcaaatcgagctacgggaagacaggacgtcccagaaaaaaggtcctgagaacgtcgctgcgttgatgatcagggaaatgcttcacacgccaacgatgttgccgcataacgctacgctctccttctgcaagcgttcgcctctgtggtgcgatctcagaggcgacagtaagccgcatctgaaagacaaaagctcgaaaaatccctttcaatcattttccaggaaagacgcttgctgcggtcaagctctacatgccggtgtaggtgtacattggagagggggaagcgcatgaaaacacccagtatgtcggaagaagcgagttaccatcgatcgcgagtgcttttaaaagaagctgagaagaagaagcagcggaaaaaggaaagccggaaaagcttcagcttgaaagcccaaaatcggccgtggtggctcgacgaatgttcccccacttggaaactcgagtgtacatacacgcggcggccgaggccacagatgaccttggagcggagaaaagctgaactctccttgttttcctgcgacgtttgatgctccccttctaagcactctgccagtttgaacgagaggagatccagatgtgtgagagagaccacttgcatcctccgtgtttttctcaggtcgcatccttctgtgcgactttgctcacatgatcccctctctttgccttggagtcaaggaaacgaactttttcaagcagtttagcggcgctttcccgctttctgtcaagcccgtactgaccggaagcgcgtttgctttcccgtgtcaaattaaagtgcaggaacttcagttttcacgctgtcttcgcgcggctcgtgtgcctgccgtgactctatctggacacgaagcaggctgtctgtgtgtgggtattgttcaggtcggtgagttccggtttcttcctgatttttggggtgtaaagtcggcaaaaggtgaagaaacacagtcgccttctttctagcgtttgtgtacgaccgattcggccgagaaagtgtcgcgaagtttgcttccttctcccgctgtgagtcgcagacacgccggcgacgtccgcgacccaccgcaactcttttcgctgtctccttggcgaccgcgacttcaggttctggggatcttctccagttgcagtagcccatctccttgtgtctcagtgacggaggcaaagcagaactcgatttttttcgtcggatcacgcagagaagttggggaaaattgactgtccctcctgagagcgtgcacactgctgctgcaatctgccttcgctagctccgcgagacgctctggtggatactgtgttccactttgttgaatgtctttgaggccttttctctccacgaaacttgcaacattctgcaggcttcggacagctgaagcgaccgaaggtgacaactacgtatcagggagttgacgacgcactgggaagccgtccggactgtctgcaatgcgatagaggcgctttcgagagtttctttggttcgctgcttctccttctcgttgatctttttcagagacgagtggaaacattcagccaagtggcctgactctcctgagttcccaatcgcgctcagcagggtctttcacacctgcatctgtcgtgtctgaagtctttcggaaccgcgcgcgcctcacgtcagtcgagtgactctcagctttttgcttcctcaacttcacaacttccgcgtctctcccgatctttgacagttttgtcgcagacacacagtcgggtgcaactcattctccgcttctttcttctctgcgtcttttctcggaatcccacttgcacacggcgtacagacacacgagcagcggtggcgcctctcgtgtgtctgtctcccccagtgacttcttgtctgttctcgccgttgctgtcgccggaaaacgcgcaaacgaaggggagtgcagggtgactgaaagactaaaaataagcttaaataaaagtgccactgcctccacgttgtgtgtgggcagcatcgcagaaagcctgtggacagaggagttctccgagaaaaacgcaaggcgtcgaagaaagaagacattttcgccaatcgcgttgtccgtcaacgtgaacaccgaagaaggcagcgcttggccattcgaggtgaaggcttcagacacca

SEQ ID NO: 1539 - DNA, 4044 bp, Toxoplasma gondii
  source 1..4044: mol_type = genomic DNA
gagcacaccgttcagactagaaagcagaaggacgatggcagtgcacttcacgaagcgtggacagaagtggaatgggaggcggcaacgcatgcgctcgatggagcagagaagaggcccattttaaaccagcccatcccaacggaaacgaggggcaacgcaggttcgtaacctcacacgaacagcagatggctgcgggaatgcaatccgtcaagtgcatcagaagtgcggttgctctggctattgcacttgcagttcgtgctgcgtgtacacagaagaccgtctggctcgaaaccgctgtcgtggaggaagaacgcaacacggagtattttccttcaataaggaatcccgcgtggttaaaaggaaagagacatcgaaggactccgtcgagcacctcttcgaagacggttcaaaacggacctgaaagtgatcgcttttccactacgcaagtgccaatgtggaaccgtccaaaaccgtgttccgttttgttgcctttctaagcggtcgagaaactcgagagtcaggagtagcacatgcaggcgaaggacgagaaagggtcgacgaagaaaatcggtggcggagttgagcacaaaacaacggcgaaacggtgaaaaatgagcagcaggtgtcgggaatgcgggacggtgcaaacgcgtttagctccaaaaatagaaagtcgcaaacaagaagaggaagcggctttccctcagaaagcacgaacgaagtaggtagcagagtctcgcggaacggaaaaaagctggaacgtctgattgatagaagcagcaaaagattcgatgcctccgtctacgaaaacgtccatcctctccagttgctgaatgccgcttcagtcactcctcgtcacccacggtgtgtttccactcgcagcgggaaaaaggaggcctgtaagtagcacaggatctcggaaggttcacaaaaaacagcttcggtatggatcgtgttttgctccagggtgaccagcactcggagcacgcaaaacagtttggtgagagtgaacaggttccgaaattgccgctgtttgttgtctatgagaaaagaaaagcgagttggtgtacaggctcgaccgccgccggccttcgcgacaaaaagaccttctttacacaacaaccgaaaagaactgcggacgagtgtgcaagaaggaatcaggaaaagcccacaaacttccgcggcttttctcttcactgcaaagtgcaacccttgaacagcaagcgaccggaggggagacgtctctgctctctcccctctctcgtccccccactgtcacaacttctccgaaacgggggggaggggggaggagggccgcctctcctgctctgcagatttgacaaaaaagtggggtgataccagttgtagtgtggtgggcggggtggtatgccctcgtccatggcctgtggcggctttttgcctgcaggttctgtgcttccctgcagttgtacatagaaggaatgttgaagtctcggactgccgttcgagcgcgttgtttcgttcgattttctacgctatagcttacaatacattttatttttatgatcccaagccggtttaataagacgaagtgtttgcgtgaaagcttcgggacgccagatgaagagcggaagaccgcagatttagaggaagaggcgtaatgagcacaaaaattctttgttctcgggaccggtgtcagcggtatgggtttggtctaaatagtcgcggggtgcagttgtgcaatgtgccccaggcggcttccaagccaaagaagttctcacgtgcagcttacgcccgagatcgttggtagggaagtttttctcccttaactggtcaaacgtgtcgcactttcagtcttttatgcggtgtgttcccctgattttcgctgtaactctgttggcggcaggcgtgttgctacgtttccgtaggtgagttaaagttgttagtgtaggggtcttgctggtgtgccgcaagaaatttcacaggatgaaacgtctcctttgagacctctcgtttggttccggtacacgtacacagattcgactggagatgtactgctctcgggcacacgacagtgcatttgacggggcagtggactgtcctccgatggtcgtatcacaaccactgcaaatttgtgcttgtggccctcaacaaatgacagaaacgaagcctcggtcgcgaagtgcgcagcgccactgttccagaattataatcacgcacagtgctatcttcagcgtgccgcttcttgaaagtcctgtctctgcatgacaggaacaggcagcttctcactcactccagtcctttcaccggttagatacaagtacaggaaagggtttgtctgtacgcacccaaacgaccgatcgcgcacttgcgcgttctgttcgtatgtacctacgtgcttcgagctcgatgagagagagcccgcggacaccatagaacgcacatctccacaggacacgtgttgttcgcgcaaccgctaccacgttcagtctcgcctgacgttttgtcgcacttgtggcttctcttgtgataatactctcatccaactctcccttggaacgcattcctactgtttacgaactccgggggcctgtataccccgcgacacaagtgcacataagccttttgatatggctacgtaaatggtgcgtaggaatgaagcctgtgttttctggggccagctaatattactgccctgacagtaccactatgcggagcggcacagcacacggattggtttaaagaagtgcccgacgagacattggtgcatttaccatctgaagtggccacgcacacactgcaaactgatgaaatctgagtcttttaacaggggtaacttcctaaataggttacaggcgacacacgtaccttagtgtgttcctatgaacgctttattatgtgtgaaaattctcggccaaagcttgataatcatgatcagctgtttcagtcatccgcttcactcgggttagtgttcaccggcttacactcaacatgtcaatgctagtccacaatcgcgctctcgcacacgtcttcgtcgccttgcaagttctcggagcaaatgcgggcaggtgcgccgtgctccatcttgcttccgctcgttctaaacttgctatggggaaaaaaccggcagacctcctgtgccagatatcaagcaagatcgataagctctccacttcatcgtagaaacatttctcgacaagcggcctcttaattattatcggcgggcaggagtgggggaataatggggttctgctgtctcgcgttcactggccgagtacacagtacgcttctgcctgtttcgcgacggcctcactttccctcgctcgtttattcatgccactgattctcagcgcagctctctgtaagcggatgccccgtgtccgttgttcagaatagctcactttagcaatcttgtggatcaaatcagtcgtatgtggtccaccttcacctagtggaaatcattctttggaatggtattattgtttgcccttttgtggaatcgggtgtgagatcagagacgagtctcattgtctcccactctctcaacgtgtgagagagacacaaggcaggcgaggggttctcttcttacagaaactatcgcgtatccaagctgtgctctgtagcagcattagtaaatgaaatgcccctgcccatcttgttgtgattgtgagaattggggactctttcattcacggaagatccgtactttaagaaccaaagaccacaggccgtgggcaaagcgcaagcccacagcgctgagtttcgtaactaagcgccgaggctactaactaggcgtcgaagctcgtacttatgccaggcgggcgcggctgacagagtagctgacctgccatcgtatttagaatgagagtgtctcggtcacaattgtcattttagtgagaacagctcaacacactgtttcgtcaccgatcccttctctcggatacctgagcgtacccgaacccgcggccgggttccgccacttgttcttgcttacggattatgggacagccgctaagtcacccactggtcgatctggcgatgtttcttgtgcttacaaagggaaga

SEQ ID NO: 1540 - DNA, 769 bp, Toxoplasma gondii
  source 1..769: mol_type = genomic DNA
tcgtagaatctctgttacaccaggagacagcagtcggtgtatttcaactctcgccttgtgcgcggactcgtacccacaccgcgcgtcgggtttgtgccctctctgtgtcctggaaactgcgagttttggaaaagtcgcagtcaacacatttgagtctggaacctgagcggacaagaagatacacatcggtgtaaatgcaaagagcgaaaaatacacacaaacaccatcgtacctgggagagtgcgtaagagtttagtgacaccagcaagccatatatgtcgcctcgaacacagcagacgtaaagaaccttgatggcgtttgaggacgtcgacatacgccgctttctgtcgtctgggtgagcagtccagagagtcgtggcggtgcacagcagtcaagaacagcttggtcgccggacctcataactgggtgggctcttgaactctgaattcatctcaaagacttggcgtcttacttgcaacggccttcgtctccagacactcttccaggaatcgctctagcgagaggcatacttcagaaagaccttgcgcattgttgcgggcgttccacatcgaatcagagaagcagcagccggacgataagttaagatgctgcctgctgtatcacgtggttctttactcagggcaggactcctcagaaccttttctggggactctacactacgagctggactgccgcttcaggttgacactgcccaagtcgagccgcgaagttcgagtctgccaagtcgagccacgagtctcaacttgga

SEQ ID NO: 1541 - DNA, 2421 bp, Toxoplasma gondii
  source 1..2421: mol_type = genomic DNA
cagaacgcgagaaaggagacttcgcttctcgttgagggccattgagtcttctgcttccccgtcgcctccacctttctgctccggccatctgcagtctctcgcctctgttccttccttcttctctgcggagacatccccagagaccggcgcgccggttgcagactcatgcgcagaggccctcgagctcatggaccgcatgcgctgacgctgttgaaaagaactgaaaagtcgccacggccctctgtgggtttctgcagagcagtcacctgaggcgtttgcgccgaagatcctgaccgagacgagaggggagaaaaacgtcggaggagtcacctgtctgtgaagagaagaaaaggagagcgccctggctatcaccgcccccgcccggtccgacaggcgaaacgacggcaactgcggcgagcccaggactctcattctgaagcgagagaaggcagtcgagcttcagctgttgcgaagaaggaaccggtcccacggactcgaagttctaacgcttgacttcgttgaaaaactcagtccagcccagttctcctttgctggcttctcgcgcaggcaagtggagggatgagcctgtgtctgtttgcgctgatgaagaacagcgaaaggtgaagcgagcagcggcgatgagtggacagctgcggtcctcgcacggaacataaaaaggaagtatcgaccgtcgggcgccctcttgctcgccagaaaggaagagatctgcagtcggcgccgggtctcgagctctggttcttcacgtcgtattgtgttgacgtctggaagagctgcggaggtctctgagtgtcttggaacaccgtagctttggaatcgaaactgctctgaagcgaagttcagctcgcgtttcagcggcgcggaccgttgtctccaggtgatcgtcggcggtttcggtcgcgagcagagagaggcgaaaacgcctgcttttgtgcgcagacagagacagagtcacggcgcttgtctcgcagacagcgaggagtcggaaaaccaagggaaaagatgtgggcattctcaaagccaccaaccggcggccagcttccccaaaccttctttggctctgcacagacggtcgcacttcggactcctcatgcgggacgccagcgcaactcacgaaactcgatcctttctttcaccgcagcacgagcactcgtgggtcaaggaaaccacgacgcgacgacgcatgcctgtcaaggaatctcaaaaagctaacacaccgcgcggttcgtacagaaaaaagccgccatgatttcccgtcaacaagtcccgaagcgtcacacacacacacatatatatatatatatatacatagggggcagcgtcttaatggtaacggagtgaaagactgcgaagttgacatatctgtctctcctcgatttgcctccacagtgccggctcgcagtttctcttgacctcaatctcgagcagggtgatcggtctcgaggtcgcgagagaacgctgcagaattctgagggaatttacggttcgcagttcgcggacgtctctctgacggggacagacaaatcggcgagattcgatgcacgcggaaaacgcaagaaagctgtgttgcggacctcacgccgcaccgcagagccttgtgagcgccgagaaagtcgccagcaacgagagctgcgtcgctcccccgcgaaagctgagaaaagcgagcctcagacaagacagcgtcacaagagccgaaaaccgctgcgacttttgcgccctccgacacctcgacgacgagcatctgaggttgacttcttgccgacgcgccgtggaaaaaagacgtcgagagcagcagtgcagggtcacactccgctgaagcgttccacggctcatttgtgaagagatgtgtgcatttcgagtccgcagggaatgttgaaacggcgcaaatctgcacagcgcgcggtctcatgaatcggcgcatgcgtcgatcactgggcttctctttcgatccgagttgttcccaagtctcgggacgtctgaggaagcaaacctttccccccctcaagtcttgatttcgaactgtcaaacatgcgtcaaagactgggagacgggagggatttcgagcagagccacccccagtgacgcaaaaatcgacactcttggccgggtcagcagcgcgcgcggagaacgcccgcgtttctcgggagtacatacaccccagtttctgccgcgaaagctgcctgctcagaacctgcgcaaaaccgtgagcgttctctctcgacagcggatgttcctgcgccgcccgtccgagacactgctctgcttttgccgcctcaagaatgcgccgtctcccccatcacgtgtagcgatttcttgaaccttcagttcttacgcctttctcagtggcctgagtctcgtctttcttcctcgtttccgtacgagctctcgctgcgttgccgcaaa

SEQ ID NO: 1542 - DNA, 3563 bp, Toxoplasma gondii
  source 1..3563: mol_type = genomic DNA
attgcttcgcgcgtcgtttgtatcgttttcgatgcggtcgatcacgtcgcacatcgcctgcacaaccttttcagtctcttcctgttcccgtttggttgcttctgcggccgttgcgtggacgttctgcagatcgatgacgcgtttcgtcgtgatgtctttcagagtggtggctttgtcaattgcgctgttcagctcgtcgatcacactgagcatcacctgcgtttccttctccaattgctccaacgcctcgcgtttcccctgttcgccgcgaggtcttccaccggctcccacagtccctctttgcgtatcgacgtcacctacgagactcgccacctccaccgaggccaagtgcacctcctcttggagcgcggcgcgctcggcttccaagcgttttatctcctcgttggtctccttgatttgcgccacaatcgccgcgatcttcgcgcgccggtcctcggcttcgcgtcctgccgcctccagcacagcggccttgtcttcgacgacgccttcactggtctctttcagttgcttgagcatgactcgcgcagtggccgcccgctccgattcgctcttcagggcctcgcgttccatctcgagcttcgcctcgagtttcgtcacatgttgctgcaattgattcacgacgttttccgcctcttgtgcggcctgctcccgctcccagatctggcgcctgaccaccccgaacctgcctgtcacagcgttgacttcggccttgagcacgcgcgtcgtgagctgcccggcaccgaagataacgcctgcaaacatcagcattttccccagggacatcagcatcccccccgcaggcaagtttgacaccgacgccttcagtttggcgaccattgtgccgacgagcccgttcacgaactccacactcggcagcgtcggctcgtccgcagcaggtcccggcctctcactcatcaaccactcgaagaatttccggagcgattctgttggcttccacgaggacgcgacgacacccagctgctcgagcgcccgactctcgatttcagtcgcgtctcgatcaacgttctctgacttcaacagatgcgggaagaggtccgcgaaacgcagcggcccacccgccgacgaacgcgccgctccgctctgcggcgccccgagaaacgggaggtgaccgctgtacacagccaaactcacgactgtggcggcaaagaacgccgacaagacgtaatggtcacgagcgagtttcgttgcgcgccggacgacgtctgctgggattttataggaactcgctatttctgctttcgcgtccgagtcttccagcgcatcgtcagacacctggactacgtcgcttgtggatgtcgaggcctccggcacctggtctgtcaccactgcgagggtgacgccgctgtcgccgacaaagttggcgatgcgctttcgattctgaactaacaggtacgaaaccacagagaggagaaccatgaaaaacacagtcgtccccacccgggagcgcggagacgccgtagaacctgtcgcctctgtgctgcttcgtcttctgagctcccgtcgccgtctcgccaacgtagtcggtctcgggaactcaacgttgtcctcctccacggctcctctcctccgccctccgtctctgcgcgaaatcgccatttgctgggccttcactgactctgcgtaggttcactctcgcgttgcagccggcagcctccagcgtcagggtacgacagcagcgaaactgttcggatcgagagacgtttcttgtagcagagatcgccgtaccgcagccaagaaggtgccctctgcctgtaaacaacaatccgaggctcttggagttgaacgcatgcggacgaaagaaaatacaggtcagtctgtggtggctcggggatggagagaaccgtgcggcgacaggaaggacgaccaaaaaagtgcagcgcggggaaattgggcgcagcgagaattcgcgacagaaagaaagtgcagcagtgacttgcgcgttcaaaaggacggaaagcgctgcgtcctctgttggtcagaggaggaactcggacttctgctgtactcgctgtacgagccgacttgtatcagacgcggtaaagttgtggagaaggagaaaaaagcgaggtaggaatgcatcgaaaaggcagggcgagaccaagaagcgagaaaacttggctgctctctcagctacgcacgaccatgcaacgaaacgttgagatacaccaacgagagcgaattgggtctccacctttatcagttttctgacaacatagatcgacaagcggattcgaccattgtcgttgtcttcaagcgctctatttaaaagtcgtgtaacttgtacgaagaagcgtcacctcagaagcgtggactctcgccagacgcaagaaaagctcccgagtttgaccgcgacagagaacgcttgctaaacggggttgggcagacgggagacagtccccggaaaatttattggcaccagatgggcaacttgagctcttcaactccccttttctgtgtcaggcactggtcctaagaagagcctcaagtcgtccgggcgtcgatacggcaaccgtagctacgcatatagcagcgagcgcgcgcgctctgtagaaaaacgctggaaaaaagacggcggcgtattaggcccaaagtgcagataaacaagctctcaaaacaagaaggaaaacccagataacaaccacagtcggcttgtcaattggtttagcaaaaacattccctacaacacatggcgcagtccgtttttctggttttgtctctcggcttcgtttcgtctgcaaacgcggcaaggagacaggcgagagcagcccacagagatatttgcatgcaggcctttcgactgccgtggaagcatgcgtaggaaaaaaggatttcttctgcagtttcgcagctccgttacctacgaatcgaaagagactggcgaaccttatcgctggccacaaatacattcacagcgctgcaaaggaaacctgacgaactttggccgacgccaagagaaaaagccaagtcggttttgtgactttcgcgcgaggctcgtcgagtccgaggcaggcaccacgttcatcttcagctcgaggcggaaatccgccgttgccaagaggcgaataacttgcaagccaaagaatcgtttatagtcttcttctgtccttgctgcagaagtcctcgcgagatcgctctctctctcttgtcgagactcgcgctgccagcattcccagtccaagcgtctcgccacgagtcgcgcaggcgacacagtcttcgtcgtcgtccccgtccgtttcgtcctttcggatcaaaagaaaggatttctcctcctcttctcttttccgtctcgcgtttcctccctgcgcgccgtagcgtcttctttttctctacacctctttccgtcgcgcgaaaccacggtcgctgcatctttgctcaacgagcactcccgtgcactggccatcttgtcgcgacgactgcttcgcctcttttggtttccccctctcctctacgcgttccaccgacgttgttcccctgccgaccttttccttttccgcgaagacctcttgtgcagtcgactgaaa

SEQ ID NO: 1543 - DNA, 1922 bp, Toxoplasma gondii
  source 1..1922: mol_type = genomic DNA
cgacagttggttgaggagggagagagcgtggactttcttgtccatctcggccagggcgaagcgcacaagttgcaggtctctcttcgtctcccggtgattcatcgagagcgcgacgagggtgtcgtggagctcgatggcgtcgaactgcgagattcctgctttcagcaagtcctgcagagtggcgacgaaggcggcgaactcatccccgaacgcgccctccagcttctcgaagacgcgcagcacagagaccaggttcaagacggacagctctcggagaatgaactccttctcgatgcgctccgcaaacagtctccacagctctttgtctgagtcgccgaccagcgagaagagcgggtgcagagccaatacgatttcctgggcgccgaatccattcatgcggaacttcaccttctccgccagttcgcggcacaactcagggtggcgcagcgccggcggcaacttggagtacgccgctgccaaattcgccagctcgagctcgttcagcgccttcgcgacgaccgcgatctgattctccaggtgaggaatcagcgttttcttcacgtagtccttggggatcttctgcgccgtaaaactcggattcaccagcgggtcgcgcagcggcgcttgctcgatcgcagacgacgtagtcaccgaggaaccgtggggagaagaagacgcgacgtcggagccgccacacgcagccgcagaggtcacccgcacagaagaaacggaggaaaagaaacaggagacgagggccgaagagcgcggagacggcgacgagggagaagcgcgacggtgctggagagagagcgagcgactcagagagcgcgagacgaccgagggagctggcggctgcgttgcccgcgcagggagtgaggcttgaggctctggcggaagacgagagcgaaccggagaggcgaggccgcgagaagaaaagacagaaggcgacgacccaggaaggcctcgagctgtcgaaacgcgaggagcgcgagagaagctgcgcgtccaccgcagcgaagctggggaagagaacttcattgcgaagcgtttggaggaaaagccaggccaccgccactaacgaagagaccttgacaccttcccagacaaacgagatgtatgctctgtcacaacagcgagaggtcgtcgcagccagttgacacacagcatgggggtgaaaaacgccggcaacagcacggctgaaaatgacgaacaagaaagaaagttgcgaccctgagggagcgaacgaggctagcagctccgcagcagagcacacagtacgcaggacatcagtcgacactgggaactactcggcggtttatccacagagtaggagcagaaaacgtttcctcgtgtacacagcgaggtgaacgctcgcttttgcggggatgacgaaaagagaggccggtgcgggtctcaaaaaagagataagaaccgagagtcttctcgctctacaacgctcgagagctctgcagatgtttttgcagagaaacgatgtctttcctttgtattttttggccgccagagcgacagcacacgggaggtttacagagaggacacactgtcagatgatgtgaacaatcgagactttttggatgaatgcgcgagaaatggaatcaacgcgaggaggccgccagagagaagatgtcctgcagactgcaagataacgctaaggaagacgcaaagaaaggaaaaactgatgacacagcgaacaagaagaaagtcggttcggcactctcgagaacattctcggtctctcgctggagatcggcctttagatgacaaagagataactgtctctctctggaggcgtctctgcaactcactgtgcagagaagaggacgcagaataggaaaaaggtcttttctccgatgcaggggaacgctcgaggagcagaaacgagggagaggagagagggcagaaga

SEQ ID NO: 1544 - DNA, 2138 bp, Toxoplasma gondii
  source 1..2138: mol_type = genomic DNA
cgaaattcaagacggctgtttctcggcgcttcccgatcgcatgcagcttcggctcctcttgactggttctgagatgcgatggcgccggtggcctctgcttgcgcaggtcgctcttcgtctgtctccttggtttctcgggggcctgtcgtggcctctactgatcgctcgttgaggtcttctgtctctacagagaaaacaggaaaggtgacttggaggttttccactcggccaacgatggccgaccctgcgccgtgtacagacacttgagacgcgggaagatgggaggcggccgccgcctgctcgacttgacgatcgcgtttctctgtctctgtttcctcgttgttcgcttggctttccgcctcagtctcatcctgagactcacaagcccgaggggtaccggactcgcctcttgtctggttctcattcaggtgcagcgcagttctgcctgccgcagctcgactagacagtgagagcgcgcgagatggtgcagcaggagagccagtatctgacgagctaaaagcagaagaaccaggagggacaggacaaggcggagggacgacaggcgcagccgacgacaacgcagaagatgtgtggtgagttgcgaaacctcggtactctctgttgatggacaaattgaggcagttgacgagaaatagcgagacgagcgtcgcctcggagccagtgtcgacaagggcaagcagctccgtgccgtgtatgtataccgcgacgaacgccaacatgatgaaggcgtgagtaacgtccgaagcgacaagaaacagaaatgcagtcacgagagcgtgaccagacctgcgccgaaaacgaaacggtagtaggaacagccgtgcaacaggaaactaaggggagagacacaaacaaagactccctgaagtcgtgaaggtgagaagcacgcgacagcaaaaacgccaagaacatgggagaatgcaggcgcagcgagaccagacaaggcaccagccgagtctccggatctcacgcatgacctgcgaggagacatgcgaagaactcgattgagagtaacaggcgggtcaaacaaataatcgcgagcgcctgccggtgaagaaaagtgcgactgaattcaccgacggggcaagacgcaaaaaggtgattttcgtactatagtgaatacgtccttgctttgaacgtgagaggcgagctgatctgccgagcctggcgagcgccgcctcgtcgacgaaccaaggcagcacagcagaccaggaaaaggaggaccaagacgtagtttttttcctcatagcgtcccggtcgtttcttgtctcaagcggcatgggcgcatcatacgtctcacttgtcggcaaaggaagccagacagtgtgtacggcctacgcatgcgcttcgacaggttcccgagcggcatgcagtctcaaacgacgccaagagagtgatccaaggtttattcatagatccgtagtacatatatctatttatcctatgtgcatttgcgtataactacatgtccaggtatgtatttttgtgcatgcatgtgtgttttttcaaggtgtcgcttgtgtgaacgagactgtttccgcaagtgtgctgctgcacaaacgaaaggctgtttgaatcgcagctgtttcctccttcggctttgtccagagaaacaaaggtcggccttattaacacgaggaaatgaagagaacttcttctgcttcgattcagctccctgaagaacgaagcatgcgtgctggacagctgaagacgtcgcccgtgacaagttctggctgccttctttttggatcaagaggacctcgaaaccaattccagaagacgtgaaacgaaagagaacttctgcgatttttagcggggcggttcttctctagacgatcctgaggagaagatgtccgagccacacagagctcgccgcgcgctccttcttggacgctcgtcccctcgctgcgttttcctcttcgcttctgccgtcagctgagcgttcttgccaaacgaggaggcaactactgagtagttttttctttcagcagctcagctgcgtcgatctccttgccgacagtgtttgtctcgcgagagcgaaggcaatctcgtttcttagtgaccagcttgtcggctcgtgttgtttcaccgtcgctgagagcctcttcttcggcgca

SEQ ID NO: 1545 - DNA, 2709 bp, Toxoplasma gondii
  source 1..2709: mol_type = genomic DNA
gtaagagagtcctcgacgaagagacaggctttgctggaacagaggcgtcgacagcagaaacatcgccgctgctagacggttctctttcgctcggtggctgcgtgggttctttactggagtcggtcgaagacgacggtcccgcgttgggattgcagggaaaggaagaaacacggtcactgccaggctgaagcaaggaattcggagaagaaaaaccaacacgaaggctccgatttcttcaaggtggtcttcgagagaaacgtagcaaaaacgacccgtccagagtcccgggtgacgaggaacaggtctgcgaggaagaccatctgtacgatcagccgcgtttcacttcaacgtcgcaagctgtgagcgacaaaggtgaacgggactgcccaagcaaggtccagcgacctttagcagttttcattttgtgcccttggcccgcggacagcatgcgcggagactttcgagtccaggcttgtgaaagacagattttctcagaaaacagctcgcgaaccacacctctggacacaacgctgtcacccgcttcagagggaggagaaatggtggagactggcgtttttcctagggacacgacggttgccgcctcgattttcaaccgcggcgcgatctggttctgctacggaacactctgcgcttgtttcttggtcacagagcaaagcatacaatgcagatgcatgtaccacatcccagaaatgaactgtgaatcgaaaccaagagacgtttccacatttcccatctccgcgccgtatgccccgtctgacaccggaaggcgcgacgaccgaggaaatcgcgttgatctgaggcatctgtccagaccactagagctcacctgcgcagccgatgcagaagaggccctcgcggaaaaaacaaaggccacgaaaatgaggaatagccgggcgcgagtcgtccgacccgccattgtggtggcgacgctgcacttgcccggacttctccaccctcttacaaatggtagagcctagaatcgcagtcggacagtgcacggggtctcgatagaaacgagaacacgccttggggggaatgacaacgaggaattaacattggacgccctggcgcggagccagtcgaagaagggagcggaaaacagagtcaacgttgcggtgcaaccgaccgcgctcccagttgggtccatccgaggcggtcgcgtgtggcggctcagatcgctgtggcagaagccgacggggtctggaagtgaacataattcgaattgaaaaagactgcattgacgaataaaaggctaagaagaagctagaggcaggcgacttcttctacgggacgcttctgtccggctgcatgcacctgcgcggtcagcaaccggcggggggcaaggcacagcagaggggacacgatgcgacgatgcgtctttcgtgtggcgactctggcagtctgagctcgtcgcgcaagttgaaaccgtttgaccagcgactgaaaaccacggcacgtctgctgaatacagaggaaaaacaattcggaaaccgtgtgtctccaccaagaacatggacgttcacaaggactggacggcacagcaggacgcagggctggcgaagctatgctgccgacagcgacgacccaacaaagtgtaaaagtgtagcgctgcagcgccagaagggctgaaaacgggcacgagccatgcagacacggcaatgataggacctccagtttgcttacttttactctcttccctcgactccgatatagcggcggcgttcacgaaaccgaaaaaaattctggtgccaggacagcatttgaaatcgcagggactctcgtcggtggcagaggcagccatgatgtagctgacaacggagacaaagcacctaaatcgtgttctcaagagtcttaccggcgagagaaaagaaattcatttctcgaggctagcgtttgatccgattttttgtacgtctcatggtatctttgaaacggcgggtgccctagacctcgagcggtctcgtgactggccagcgcacttgacgcgctgagtagaccggatcgctggattgcctagatgagcaaggctcgcattcagcggagcaagacacgtgccgcgaggagtggttggaccgcttctgtttttctgcaaaaacgcggggaaacggctgtttccatttcgggccctcactatacggaggcgcaaagcgacgtaggaaaatgaattgacgtcggtcccgtgccggacagcagagtcgtctgtcttgtgcggccgtagaggcagagggtagggtaaggtttcggtgtctctgtgtaaaaccccgcggaaatatattttcgttcagggcactctgcagttgaggcccattttattgtcgattgttttgctcctacgaaagaaccccggttgttgtgcaagattccaggcagccgctcgggtgtcaagacactccgtagcaggaccgccggcaacgatgactcaaatccctctctcggagcttcgcccgttccgacattcgttccatagcatttccgaaccgcttgcttttctgtgttacgccatttaagtgatcttgagcttccgctaagcttccaaagaacagcaccgaatgttttaggtcggacttcccggcttcacgcggcaccccgcacaaatcgacgcgagaacctctgccacgacagacacgatgcgcaccatcaggtcaagggaacggcccagcaagtagaatgcagtgggatcgagcaaca

SEQ ID NO: 1546 - DNA, 3617 bp, Toxoplasma gondii
  source 1..3617: mol_type = genomic DNA
ccaaaagggcactcataaacctgatcctcctggagagagccgtaaaggtctgctgagggcgcatgcgacggcggattgtggacaagcagcgcagacgcgtcttctttctttattcgttgtcgagctgcatgtgcccgaattcgcagttccttccggtacgcgtcactagccgcctcgatggcccacacactcggtgggagagacaggccgtctgccgcgctcggcggccccctcccctcccggtctctcttcgccgaactgtccagaacaggacggtttctgtgcttcgcatggttgtcttcgtcgacccacggtgagggaaaagaggcaatgttgacgaaattgtcgtctttttctcctttcggaacagtgcaggtgtctccactctgccttcgtcgctccggagcttgctggatgctcactcccgccgacagaggacgccgagaggaggcgtcgtaaatgaccttccgctcggaatttctccgctcttccctcttgatggcacttcgttcttccatttcactcttcaggtgttgccccctcccgctctgctttctgcgagcttttggactttcctggtcttcccggtgcgcggcttcacagctgtctcgcaagcctgtcggcggtcgagaggggacagaagcgacggtcgagcaaccagacagtgatcctgaagacgcagcagaagtctcctcttcctgtctgctttcttcacctgccaagagagttcgagctggaaacgaaggccgaagatggaaaaacgatcccggcgacggccgggcttgagcatcgatgaggcgcgcttgctttccagcgagaacttcagatgagtgaagaaacgcgttcgaaggaggccgagacgcagcgccctgaaacgcttcgcggcctatcgcctttcgagaaaaagactcgacaaagccgtcagatttacgcgctgctggaacaccttctgggtcctcacgagaagttgcagcgaccaagcctgaaaacgcgaaaaagaaggaaggagcagaaaacgtggcgtgcgaggcggtggtgaagcgacgtcgtcaactccgtgaacagtcgcggtttcactgagttcactgcagggggcaaatgcacttctccggtctgtttttcgtggatctcaggtcgactgtgttttagcagagcacagttaagacgacgcttcattgtataaatagaatcagtggaacgccgtgcattttgaggtaacaaaaacggtcagggcattcgcggatcttgctttgtacacgggcaagaactcgagttcaatacctcttcaggcctatgcgggtacgtctgacagagactacgggaccttagccaggactcgtggattggtcgagttctgtcagtgttgcctagtcggtgcttggaagcaggacttacgcgttccgggcaaggcttttccgggctgaaaccggtggtgagtacccttcattttcgccgctatgttcctccctcagcctcctgtcttctccgttcctcaggctgtgcttccctggcgaccacccttggcagcccactgctctctgcttcttctggcggagtccgctttgtacgaggtagaggacggggacgcttcgaggcaaggcacccaacactgtgtctgtcacttctgcctcgacagctcggtagtgttcaactccaaactgattatctatcggcaacacttgaatacacacccatggagttgtgtgtgttcatctgcgcgtttctcgactgccgaggaaacctgcaaaaatcgattttgaagaggtgaggatccctttcacgtccacgtcgacgcctaaacagcagtgtgaaataatgcgagggagagacctggagagttgctcacgtggcggtcgcacatgcagcagatctagagaagcacgagagagaaacagagaaattgtttttcaacggagaggaaagtgcaagccgccccgacctaagacgtgcgtaactggagggacgagcagagcgaaattgtgcagaccaacaaagacacatgagaaaaagtcggcaaatgaagacagctggaacaacctagcaaaaagactttgtgctgtgccgccgcggcggcgacaaggtaacacccgttgtagacagtccaatcggtcgtcctgaacggcagaacgatgaaaggggcaagaagcttctgtcgttgaggaagaaatctcgacaaaatacattcagaaactgtcccgtatgtcgtctccgcttgagcgatagctgctgctgcgtagaccctaaactctcttgactcgcaggcgggcgttcacgtgcggttccccgtttggggccttttcccgtgcaaatgagacgcaatctcttttcgtggcaagaccgcaaccaaacttcttttgcccttgcgattctacacgcatttggccgcgttctggagttgctcggcctctcgtcccaagaaccgccgacgtcattcaggcgttatgtacatcccagacacggaggtgatcacggggcttcggcagctcgctgcgacgccaggctccatgcacatcacgtattctccactttttctgccttttcctccggcggatatctccgttttcagatccacgtgtcgtttgcgcgtcttactcgtactcgtcatccgaaaagccggcgttccgtctgctgctgcccgtgagtctcgcgttgctgacctccgactcaagaacggcctcccagtgccagatgaccgcgcgcgccctctcgtcttttcgcgctgcagctggcgctcgacgccagctcggcggaaattgtcgaggactttgagcgtccggccccgctttatctgcctggtgactttgcagataaatttgtcgcttttttgagctgtccgcgggactttcttcggcggtcttcgtctgtttccgcgcaagcggcggactcgctaactcgcacccgagctgcgcggccatcgtagcgcgccggcaaagagagctcaaccggttcgtgcctttgcgtttgttcctcgcctaccgagaaaatcgagctgaaaacgtcgggagaacatccgcgaaagcttgagagcaacaagtccagagacttctttggtccactctctcgattctgcagttgtcttttcttgctcctctcgaactcgagtcggtaaaatctgtaggttcgggctcaccagtccacgtgagtgtcttgactcgcgtcggcggcgaccctgtccttcacgagacgaagaaattctcccctttccttgccatcgaaagaaggcggacacagcgcaaaagttcgcggttaatctcgccaaagcttccggcttcgctgttcgagtttccccggttcttttcccccaacaagcgacgacgcctcgatcccagactagactggtccctactctctctgtgtctctctgccttgccgtccagcgttttccccgtgtctctcctttctttctttgctcctttgcatcaaatctgatccctcctctttcgcgggctgtggcctcagtctgagagttccgccgggctccactctcccgtagctcgtggtctactccatcacgttgattcggtccttcctcgatttccaccggacgcgccacccactgtccctttccttccctctcttcgctcactcttgcacctgattttccctgttgttcacga

SEQ ID NO: 1547 - DNA, 2522 bp, Toxoplasma gondii
  source 1..2522: mol_type = genomic DNA
tttgcatcccacctggagcgttgctcctcgactcatctctcttctctcttctcttgccctctcacactgcatctcttcttcctcttcctctctcccctcgtttctgtctgcgtgtgttcttctgggtgcttcgcctccatgctcatcttcgctggggtgtacaaacaccgtggagaggctgcgtctgcgcgaggcgtccactcgagcagccttgtcgaggagctgcggaagagactgtgtgcagaggacagcgacggcgtttgcgagggctgaaagcgagtgtggagagaggagctcgaggcctgtgccgtctcgtttctgctttttcacccgcagggaaacacgacgaagcgcgagaacgaggagcgcactcacgacagccttatcaggagtaaacgcgaacgaagacgcaaaatcgcgctcctcatggtgcccggcgtttctcgcgcgactttcggaatcccaagacgtctctgaagaatcggaaagtccctgcgagttccgagagagtgcagaggcatccacctggttctcgcaagcagagagagaaagacgctgtgtttcgtcttttccttcatgtccctcttcctcgcccttgttcgccgagtcaaccgacgcggttgacggcgttcgcccaccgcaagaggtggatagctctctgccggctgcaggcgacggaggagtccagttttcacagaaaggatcctcgttttttcttgtctcggattcgcttccttgagcgtttccctccctctctacatgcgctgcctgagaacgcgaagcggccgaagaagagtcgaaaggacggggagaagacgccgcgtcggaagcgaatgacctgggcgtcgccacgaagagtctctgtcgctctcttctcttcttttgcttctttttcctcgcctcattctcgcggaagcgacggcggtgttcttcgtcttcttgaagccgaagcgcgagcgctctgccgcacaaacgaactcgagaggccgaggaaggaaacggaagaagaggcagaaggcggctcaacacgctcgtcagcatcacgagctgtttgacggaacagagatgcaggagcgcaaagctccggtgtatgtacagtgcagccacgtgcagcaacagcacaccaggaggaaacgcagacaggaggccagacggggaagaaggcaaaggagaaagagaagaagaatgtgaagaagttgaaagcgaagatggcggaggcgtctgagaggagctttcttctcggagaaaggggtagagaggcaggtgtctccagtccacgtttgtcggctctctcaaaggattctgtcttttgtcgactgaaacgttgtttctcctgggaaattcgagttcgcgctgagacagtaaagtcgcgcatgcatgcaagacgacgcagcactggagaggagaaggcggtttctctttcgcagtgctggacgaggaagaaggccgagactcagaagcgacagacgaggaagaagaggaagaagagatttgcgacagagagaaaaaagacgaaggagaagaaggccgatgacgcgactcttccttttccctcatggccgccttctgggcgaaagcaacgagttccgcgaggattcttgcgattcgttcatcttcctcctcttctctcgtccgctgcgttcctcttcgaactccttcctctccactggcttcttctcgccgcctacgctccaccgcgagacgctgtagagacagcgcaagggcgcacgctcgagaccgagctgccttcccttctctctccaactcagaggctgaagacgaggagtgcacaagaaccagcgaaaaaaaagaagaagcgagaggggaagagagagaagaagggagagaagagagaggacaagagagaggagaagcgagagcagaagggagagaagaggaagacgaagtgagggaagagagggaagagagagaagcaggagaagagagagaagcaggagaaggtgtagactgggcaagacagcacgaaacgaagagtggagaagtgcgagaaggagaatggtgaaagaaggaagaaagagggagaggggaggaggacagacgaagacggcggagttccttggggcctcgtcgcgggaagctcgcgccggagctgatgtacgaagggattgccatctctgtcgtttcctttcttgtcaccctcgaatcccttccgctgtcttgtttcttccttcctatcctctcccgattgtcttccttgtctcttttcgttccacgcctcgtggtcaacaagaaccgcctcactgcgagtttccggacctctttcacgatctccgcgttcgtctctgctctgcgcctgctgcattaccttctgtcatccttttctcttcacttctcttcctccgttttctcctcgctctcgggtcgtttgttgttccacactatcggtctctgtcgggaagctgggcggtgaggaggagacggagacgggaggaacttttcagcgttttctccgcgcacatcttcggctcacgcttcgctctcgggtccccgcgttctctcga

SEQ ID NO: 1548 - DNA, 4425 bp, Toxoplasma gondii
  source 1..4425: mol_type = genomic DNA
tcgcttcttttcgtagcttttctgtacttgtttcttcctcccttaatatccctgaactgccgcgctgtcctccgtttcccccctgtttctcttcctcctcttttttgttgccttctgtcgtttttccacttcatccgctctgcctgcttgtcaaggagctgctcttcccccacagcgatttcgttttgcacctttcggacgcaacgaaaagctccacgttcctttcttgtccgtcttgatttttctgaccaactttctgaccatatgtcgattttttcccgttttccgggtctcaaatccggttcacagtctcggggcgcacaggcgcgaagtttctactcttctcacaaaaaaacgaactgaaaacgcgtggtctccccgaggcgatacccgcttcggttgccgggtactggaaaaagagagacgatagttagagcatctgctgggatatgaaaaaggcaacacactgccactgaatagacacctgccttcgtcgagaatgttctgctccggagttgcgaagacagactttgggtgaagttttagaatattttcgcagcggattcaaatcttccgacaacgatattgttgcctccgcttccaagatctgtatcagcaataaagtgaccctgcgcttgttacaggcttcatgtgttattaatcgtgactttctcattgaaaggtggcagaggaacggagcacggcgtagaaaattcaaatggacacaacgtctaccactgacacagaaaatgagtctgtttcctgctactgacttctcgttgtctaatttccacgctgtcacaggttttgaaacaacaatgaaacgcggttttcccgctcttttaccgccagtaaacaccagagccgatttcgctggtgtgtcgggtttcctttcaacacgcttttggttctgaccagtcatgttttttctgtttgtgtttaaattctttccggagttccctaatcgcggaaacaggaagcatcgtcagaatcaggttttggaggaactatgcgctctgcgagcttcgaggatagcaaatgcggataggggagaaacttagaaaactattttatgctgtgtctagatatgtagtaaactcatggctacatgaggcttgatgatgctgtagacagttgtgagcactgcatatattttacaggttcctgctaccttcatgtttgcctcagcgggcagatttcatgaaacgcctttgtgagaatcagacttctgtccaatgtgttgtgggtgccacatactgtcacagtttcagaatacattgatgctgacccatttgattttctgtcgatgaaccaagagatatgattctgcaagctctttaatatggtcactaatgtgtcgccgtcgtcctcagaaaagcgaacaggagaatggggggcttgttttccactgaagcatttcaagctctttttttattggcaaaaggagccgcaaatacgagagtggaacagagacatggatcgctggtccataccgtatccgggcgagaatttactcaacctctcgagttcacctcagactcatctccagaaacatccacaattgcacgagcttgaataacggccttatataaagtgttcatttcttctgtgcatcctttcatcgacaaaaacagtaagcagtgtgcacccttgactaagatcgtcgcgggatgcccggggggccacgcagcgcggcacgcatccgccttgccatcgagtcgccccagaaatccaccaagcaacggctcgggcgatgttccatgcgctatgtcaggcggcggatgccttgtaacactcagaagcaatctgtattttcgagcttgcgtcttcggctcctatcgcgttgtctgtcactttgacttcgcctcaatttgtcttcaatctcttcacaatggcgaggacagcgagggtcgagcagagacgtggcgggttcaagtccaaggcccgaaagttcgtggcggtgtgcgtgggtggagtgttgttgctctctggcggacaagctgctgcagattatttgcgcgaaggagctgctcagcgcagtttagaaggcttacaacaaggtgcaacccagactggaccggtgttcagcggccagaccgcatcatgcaccttaacaggtgatacgcgggctcaggcgcaagctgctacgagtttgacgttgtcaaaagagaagccgactattacgctgcggtgctcgggagcgaataaccaggcagttcccaaagatatgcagcaagtatgttccgagacgagtggagaagcgacggtagctaattgcaaggatgctaatgggaagcggaccacgctgcaatctctcttggggtcaagcccggaggctgtgtggaagaaatctaacaccacaaccgaagacaaaaataatggtgaggagtggaccttagagttaaaggagtcagacctcccattaactgacaaggcattcttcgtcggttgcgacaaaagtacctccagcgcaccgcaacctgaatcgtctgtcaaggagacatcggcggagtgcaaagtcgatgttaacgtgaaagcaagaccctcttctgttgcagacaacaacgttgtcacttgcgcctatggtaacgaaagcaaccctgagcccttgaaggtagagatgacaacagtgaaaaacactctcacaattcagtgtggttcccaaggttctctcagtcctacgacctatgaaacccagtactgtgatcctcaggaagctctggagaactgcacggagaagaagtttgaggaaattctgccggcatttgtgaccagctggtggtcagaaggggccgacaaaacttccgtcaagctggaaattccggagacagactttcctcagtcagaacagcagttccgtgtccaatgcattccgaaagatactgtggcggatcccccaacaattcagggaaagaatgaagacgacacggagacagctgctcgtatgtcggcttgcaatgtgattgttactgtcatggccggcagctctgcatcatcatctggtcaaatggtagctacagccgcaggtgcggccgctttgacaggactgtttatcgggttattgtaactaaaccgtgctgatgctgtattggctgtttgcctctacaggcaccgcctgtgaaagctacctctattttaacattttttcagcttttgtgtgttctcgcattcctgaaagtcttgagaaatgtctacaagatgtctctcctacgaatattccatggcttcctacccagcgagagcattgccacgggcacattgtcacatctgaacttttgccaacttggagtcacgtgccgcagaacgacgggtaacccattcagaaacatgtagttgcctctgtttcctacaacgtggtgtgaggaaaatgcggtgcacaagggactgtccacgggtacaagtgctcctggccagccactatttgtttgaaccgtgaaaaaaactgtgggatgtttctatgaagcatccacagtgtgttgatgttgttcaggactaggtgtcgtgaatcaaaccctgaataatgcattcgaaccagttactgaacacaagcaggtcgtcgtttgcacattagtgttgaccgcgaaaccgagacagtgcttaaaaggctggtttttcccgaaactgtcatctactgctcgtttcacgcagtcaccgcctcaacaacgcgtcacgcagaactgtttaacttcagcagaactgtcgtaccacttctcagggtaacactgccgcacgtgttgcggcgtcgcgatactaggattcgttttgtcacggcattctctcccccactttcgtatgggagagggtggcgtattcattactctgtttacggtagagcgatctgaatgactctcagcactcaactgatacggcctctagagtgtcgaagtcattctcacacaagcgttcgcaaatccactacttgtttttagtgactctctgaggcctgtatgtctgccgtgggataatgccacagcaaaatccagcgtgaacctgttagaccaaatgacttaacattcctgtggaagaaacgtctttaacaaactcctccagtgcaccacgctcacacctccagaaacgtccagaatcaaaatgccttgaaagacggcatcgaatgaagccttcactttctttgtgtaccctttcctcagcaacaacggtaaatagtgtgcgccgccgactcaaaacttactccagcggatcgcccggtgggtccaacatccgggcccgcggccgcgccgccagcgactcgcctctaaaattcaccgacgcagcgaaaatgtatcgacgtagtgcatgccactgtgccaggcgatgctaccaattgatacgaaacttgccacgtaaatttgagttttgctggccgccgctcgctttctggcctggtgtttgtaattctccctcaattcgtcgtggatttcttcacaa

SEQ ID NO: 1549 - DNA, 2665 bp, Toxoplasma gondii
  source 1..2665: mol_type = genomic DNA
atacaatgtcttgccgtaatttctgcgtacaacagatgttgtcgtactgcacgcccatgcaaggggacgtgacatgttgatgattctcagagaagaatcagcacggtatctggtaggatgtgtatttcccttcttcaaaagatgtgagcggttttggcaggctccaaccgcagccagtctctgccttcaaaacaggaaaagccaatccgagcaccggatgcatttggtattgctgcagtgcaccttgatgctgctgtgccgcgccaccagcaaagcgctgatttcaagagtcgagtgcctgaagtgttagtatggcgccctttgctgatcgtgccgcgagtccattgtagatggaacgactagaatgggcactaaaaaagcaaacggtcgaatacaaatttgcagaactcagtctttctgtagcatgctgacgaatgaacgcactccgtgatggacaggctgtcctagctctgctatattccaagcaaacgcagtacacctgagatacgattgaggaggcgcgtttaagtttcgttagtgacggagtccagccaatctcgaaacagatcgaggtcaaataagaatccccctcattacgttcgcccaacaacagaacttccccttgctaccaggggccgcgacgagcgtctcacatatccgtatgctgagagacatagcaggctttttggagctttatgagtgtgcgtgctcggagggggaaattgattctgtcatgacgcaaatttaccgaaaacgcggcctcgccgacgcggtgatgtctgcgcatcatgacaatagactcttttataccaccgttgaaaaagatcgtttaaacgttgctacgacgagcaaccacagagacagatcatttggcatgaatcagaacgccttgtccactgtaaaacactttgcagatatgatttacactactctcattattgtgtggagatcgagggcaaaactcccaatcatccctacattgatcgagtttcgcaatcactttgctaggtacgtttttttcagtaggtcgaatatctatgaggccgtgggcctgtttcgttaatgtctagcaaacggtagccgtgtcatgacgttacatgttctacgtcattccccgaaagcagccgtgatgggagcagaagacgtttaacccatgagagtgtttgacgacaatatgctagcgtccacaatatttgagatgcaaagttttctccgtagcggcaaggaaggagtactcttggaacgttgtgtgtgaagtggatgctgttgtatgtacacccttcatgacgtgaatttttgggcggccccctgcctgacgactgcgtgtctttcccttttccgtaaagttagttctctgttccgcgcgtaactgcaaatagcagacgaaaagcagtgttgagttcctccatgcaacagtcaacatggagtggcgcattccacgagcggtcgaaatagggttcttgttgtgcatatcgttcgcggtgactaattgctgcgccctggaacatgaggaagctgccgatgctattgagaaaacatacatcagaattgcaaccgcggaggcgtcctcagtttacccgaggtatgagtaccgtacgtgctcgaatgtccatatattgttcaccgtgtcctcgtcagtgtcggacccaatggcatgcgagagtattctcccgacaaagccttaaccaaaggatctggctattggagctcagagggaaaccacaaaaatgaggttgtgagctggacaggaattctgaccaataggcgcacgtttaatggaatcaacatcaactgggcgtacgctccgggaaaaggtgagacaagatatcacttaatcccagaaatgcacacttacttcctttcagtttcgatagcggtcagcttcgatggtaaagaacctttccacgaggtggtaccgtttcaagacgtgaacggtccaagcggtacgtaaatacttcgtctgctcagttttacgctgcaataaaactatatgacgccatcgcagctgctttcgaacagcaagtaaccttcccgcatccgattcgtttgaaagcggtccgaatcttgatgaaaaacgctcgctatgagtatttcggaattaaccttgtccaacttgttggagctgggaatccgatgcttcggattcacggtggtatcaccagtcctcaccaggtttgctatcgattgcaatgcgtgcctgtttcttcagcaccacacaaactcatcaggatatgtgcttgcaaattgatgaacacgatgatattgtcctcgacggctgtcttgcatcgcttacagccatggatggtagagcgctctggaaatacaatgagcttggtacggtacagcatcctctcgtttggctgaaaacgtaattgtatggctttcttatggtgatcgtttcaggacaactatacaatccaataaaaaacaaatgcatggcgttgaaggacaacatcgatttggatggcggtgccgttgtggctcaagactgtgaacagtcttataaatataacgacgggcggagcatctggcaagttggagatacagatttgttacctttaagaatgcttaaatcgatgcgtcagggaactacaaccaaataaccagctgaaactcttaaagggaggcagtttctgtctatcacaggagggttcaaaggctggaa

SEQ ID NO: 1550 - DNA, 3544 bp, Toxoplasma gondii
  source 1..3544: mol_type = genomic DNA
tgtgtgtgtgtgccatgcaagtaatagtggcgaccgtgtagatacgcgtctcgaggcttttctatgcgccggccgttgtttctcaacgtagctgagcgttaggtttctcagtttcacaatgggatcgtggattggcatcatgtctcccagtcttcagtcgtaggaatccgatgcttctgtagacactagagtgcaagcatatacagagttgtgagagaacaccgtgttctacacagagaccatcgcacgggctccaagagcaaagtgcttgttgaacaccagtttttttagggatgtcctgctggcactgacatccaaaagctattcgcctagacccagccatcaaaagttccgtctccttgcaattgaacgctgtgccagccacttctacagacagaaagtccactctgagtttatgctcgaggtaactggcagcgactgactgaccgcgcatgaacgcggcagaagcttcaagctggtggcaggtctcatacacttcttagtctggccaatggaatccacaccagaaagttgtcggaatccgaaaacgaggaaaccctgccgcaaatgtggcatcacaagttgaagggatttgtcattcgttcaacgtgtttatatcacacattcaaatggacacaaggggatgcaaaggcactcgacgtgggaaaaagatagaggaagatcggaaattggtgtagcctgcggctggaatttgtttggagtaagcgagctcgtgagccggcacgaaaggccgtgtcaatgagacaactgttttccgtaggtaaagtgaaacaataaacaactcttgagcattcgttcaaagatggagctctgtagaaagcgtcttgaaatgcagaagctgtatgaaacacaaagaagggtggccctcagaagcaggaacgtaccatcccaagaatgggaataggaagcgaatgtcttcgtcgcaagcgcattcttcacgagagcgatcatagtctggagagtgtaacagacagcgaaagatgacgttaagtgttcttgtattttggcatctcttgtcgagagacctccatgcaattgttctctgccagtctcaccatatgtgtgaccctgacccccaacatgccctctatatacagtgtcaaggggatgtggtcgattccagcttcgaacttctgctgtgtagaatggtatcgatgaggctaacgagaacatacgtcctgtggcgtgtttggtttacgcacagagttagagatccgtcagtggtcagtttagattgcatcgaattatcgtttgtcactttccgtcttctgctatcggtttgtctctctcattggagcccacgtatctatgccgtaacctgacgtcttacagaaccgcctctccacccgttgtcattgctcgtttgtcgctctgtgcacgtttgtgtaatcaagaattgtcaggttgttcacacatagctatcgccggaattctttttcgaaggttctgtgcacgttttctctccttttagatgctcctctggtgcctcttgagctcgaattcggaacaagccggcttaagaccatcgtatgggtctccggatagccaatcttgtggccctggtgagttgaagggcgatgcctcgttttgacggagaaaggacaggtgtgaaggacacgccttgacttcttcttgctggaacaaagactgacaccttgtgtgctttctaaaggggcattctgatgcagaaattttcatgcgtcgtcacaatgtaaaggcgtttgatagttcgcctttttacgacaggacgagaaacagacagtcacattcagtaatcgctttgtaattagtccatatcgtcattgttttatgggcggtggaagcctacagacaagggtattgttttcatcttagcaggaaagcctaattagttcgttgccatgttgccctcatcggcgttcgttccactgaaacacggaaccacggaaatcttgtggacgtcatccttgtgctcatcctagcagaagcacagtttccctcttttccccgttaattcgtatggcaactgttctgaaatgcagagacggcaacgttgtgttctactgactggcctcaacaaaggaaacagtggagtgacacagctctactgctttgtccagtttgtgcgttcacccgtgtaagagaactagaaatgagaccattctgaaccctcatagtttcgacgccaaagaccgaaagtgcgtggaagagacgcgaacgtagttgacccggcgtgctgacaagataattcatctcggagatacagaaaaatgaagacgacttacacgtacgattatcgttgattttgtgggtatgcatctatatagccacaaacacatactcacagatcagcgctctgtcatgactcgaagaggtgtacgtagacccagagagaaaatcgcaaactgaggcggaagtatgactcgtgccattcggtttcagtctcttagcttctctttttgagcacgcatcggtttaccgtcgcgcgcagctcgcttttccacgtacagtggaccaaagttgcaaaagaaaacaaccggtctgtcgggctcgttcctacgtacgacggccatacatgcattgtgacatagaagaggtgttcttcacctatatgagatgcctgaaaactcgtcaaatggaagctctactcttctactatcgactagattgcttgcttattcaccttcgccccgccgcctggcacacgctcgaagaaccggtctgttcgcccgcgggacgaaacagcggccgagactgtttcgtaacgaaggagaaagacacgtcgcttgccatgtgaaccatgaagttgcatctcaggcacatttcctgtttcatgtattcccctgctgcacgtgcagggtgaaaacacctcctctgtgccactcggctagccgtaggcgagagggtgcagaacgagaacttgtccgtctccttgtggcactatctccctacaatcgaggaggcttccctttgtttcttcgccctctgtcccgctgtgggggagttaccggatgccgcatccccctttttcacttcatcacatcttaatccccgtgagattctcgcgctgtagtccacataaggaaccaaggtactacggcggtcaaagggtcttgcagtcaccgcgcatgtggcactcgaggtcaccgcggccaagtgagctggttcgctagttgtcttatcttaaagtttccctcaactaaagaagacaaatcacattgactgatgaagcgtttctgtctcccttccgcctccttctccttcagcgttcttccgttctccctggaatcttctcagcgaagactgtgctgccacgccacgcccgagcctgacgagctgtgtctcctcacacctgtggcagttcgggatccgagatagaggcggatattcctcaagcagacgcacgcgctcttctttccatctgtttttcttttcgccgtggtgtaatcttatcaagtcttttgtctccgacgaacgcgcacaaaccctcctcgcgaaaggctcccttgtgctcaccgtccttcccaggcccaggggcgccgga

SEQ ID NO: 1551 - DNA, 1903 bp, Toxoplasma gondii
  source 1..1903: mol_type = genomic DNA
tggtgcgttcacaacgatctataatatgtttctcctttttgtatagaacgatgctgtcaagtgggaaccaaagtcagcatttgagcgtcggtcgaacattggcgtccatcgcttcttggacgcctgttttttatcctgcagatagttcggcgtctgtgtggagtgtccccgtgactatcgggagacgattgttgtgtatacgtgtttgagttccgggtgacaaagtggacagaatgtctcttgctttttcgctctgccacatcggagaggaaaaccaggaaagcacgccgacggcagtaacaggagcagaagcatgtatacgacatcgcgaccccacactcgtcttcgtgtcattctatgttggaagctccgaagtctttttccccgaaataacgctatcgcctatttcctagccccagacggccacgcggaagcagatgaccaaagtagttccttttctctgttcagctcacggcgtgcatgacgatcggacctcaagagcatgcggtgtcaagactcattccactccacaatggcggttgtttggaattcatgtcatcaacacgcatgtgcttttgcctcagtctctgttctctgttccttctccaggttgctttatcttgtgtactccttctttctcacagtctctccacgtacacatatttacggaatttttgacactgcaccttcacgggctcttctacactgccaagcgaatgctttcacgggtctcatgtggctcttgaaagtcacagggatctgcgcagacacctaattcgtgttttttctgcttgtcgactgcacctttttgtctcacatctccctcggtccatttctactccttgctgttccccacctgcatgtttacctcggtctctttggggtctttccgctgccttgtccccaggtccgccatgcctgcgcctggactctccaggagcgttaccagttgctgtttctttcctcgcgccctttctgtgactggtttcatacttacctttttcaccgttgtaactgtgctctcgtatcgaaaacaggcttgaagccggtgaagaaaaagtgtagatctcagcagttcatctcggagtcgagataattctctcgagaaagctgcccctcgttctacgtctggacaaagtcaatgggctccctaattgtccgccctaagtaaattgacggttcctttctacaaaataaagaaatctcgtctctaatggagtcgacaagtgtctcagtcgcggtcacgaacaggcagtgtttttccggtccgggtcacctcttctacatcgattgagagaaacagactgcacagtaaacacgtgaaggaaagtcgccctttatttagagttttctcccatgtttcttgtttcctccaacttcaagtgcatgtgaaatgcgcgacagtccggttttcctttgtggctgttgtcttcctcagagcatcctgttttctgtgcagcttgccttcgcactgcatgcggcgtgtgtctccggacctttctcatccacgacagatacaaacacgcctgacatctctggaactgcctttttcgttttagtttttgtacgcgcgccattcgctcctcttcagaccttctacatgcacttcctgctgttttccgctttacgctgctccacatcctctggcgcatgcagagccgaattcaattttgcgccagtttcacggacgctttttgtcaaaagtgaaaaataaacttcacatttctgctcgttttcctatagaagatatcgaggtgtttagtattctcctgcttctgcgtcttctgttcttcgagtttccccttctcgtaccccactgctctccgtctcctccggctttcgtccgtcctctccgctctcagaagagtttccttttccttttgtcggcgtttcctcaccgaaa

SEQ ID NO: 1552 - DNA, 2651 bp, Toxoplasma gondii
  source 1..2651: mol_type = genomic DNA
gttcagaagcgctttggtgaggtgtacacgcaggtgacagaagtgcggggaagcggctgcatgcatcagccgcctgacaaagaagtttagatccgagattcacctcgctctcactcttcggtactctctgaaggacgggtatcctgcagacgtccttcaaaaggtcctgcccgtgtcgccggtgtcagtgagtttctcgtcacatctttcgactctgaagaagtctaagggaatgcggaagccgactctgcttccgcgtccggatagagagagcgacgggcggcggcagccttttcctttgccggtgaagacgcctcagaagtctcggactttagcgcaagcacttgcgtgcgaacgaaggcggatgtgggccgacagtccatacggcgaaacgcgtcgcaaaacgtgtctgaagtcttcactcaacacccgagctgacgccagccagacaccgtctgtaatgtagtctacttattaaaataaatgcagtcgagaaacctgtcctcagacgccttgcgctagccacggtttcgtcggggaaagccgcagaggcatcccttgctctctgtcgagttcgatgagagcgaagtgttggaagtaatttcaacaagttgaagtcgccgcaaagtccgcgtcgttttacatcagcgagaacatgactgcacattgggcggcggatagatggatgtgtggattgttcaagccggacattgttgaaatatgacggaaactgtgcatcaaattatttgaaagaatgcaccagcggatctcagggggaagatcgaggacactcattggggacgtttagatttttcagatgcgggcgacgcttttccagcttcgaaagacaaatcgacatgtagacgatgtggcgctttcagaacgtctcttattaccagtgtcttcctgcttcgtttctagtgtacggatttgccatttcttgaagcggggcttgcgacacaagtggtcgttcgagagtggaagagttcgtgtgttttttcaaaaacgcgggaccagacgattttctcagtgtcgttttatcaatgaaagcaagttgcttgtggacgctcgacgcacaactgcttgcggctgctgttctgagacacaatttcttatgagcgtcttctagggagttatcctacgaggttgccccgcccgctgataggcagccatcttttatcagagaagtctacagtgcgtctttagtgggaaggaactagtcatattgatcagagccgcagctgagtattcggcgagtctatttgtcgacagcccaggtcctcgacgtggagcctagatcgttgacgtagccacattcttgcgttcgcgatacagcaatgacacagagttcccttattttattagttcagccaggaatattcttcagtaccttctttatcggaggggctcgtttttgcgtgtctccaaaagagcagccatccaaatacagatttgaagcatttcttgtcagtgatttctttcgtagactctttgcgcaacgcggcggctttttctgtgattcaccgaagggggggaggcctgaaagagttggtgcggtcagacctcctgcggcaacgctcaaataaaacaaaacgtttttcttctcttttgcgggacgatggctacacggaacatccccgcttctcagtggcagaaatcgtttcgttacaaatgatgtgcgaccctgaactgtacaccttagatggactgaacagagacattgcggtacctaggacacttaatttgactccagttacaaaacagagacaaccacgttcagggtgacactgatcctacgcgaatatccctgacgcagttgtgcttgcagcactccgcgacagcatctagtagaacgtacaagactgtaagattatcgtcacccagacgacgcagcggcggcgccagtcgacattatggcgtgtggcggaaaacaatgcagtcgctcttcatagcttggccagtagaagcttttttctccgaaaacgttcaaaatcacgggtgtccgtgcttcgcgggaaattaacatcctcccgacacggaccgtttccacgggtagagttccacgacgcgactaccaactaaaaagaaatgggaggcacgtgcttctgcgaggaacgttctgttaaagcaactgctgcactcgctctccatctctgtgtgtgcaggcaggtgatttcggataaatcgcatctgtggatatccttgtgggtgagacagcggtgcgggttcttccggagattccgggaagtcgatgtggagaaaaggtgccgcaagaagagaaacgtgcgagcgattgtacagaagtcgaagccgtagcgaaaggagagactctcacagtagagagacgcgccgtatgccgaccagagactctgacgaatgaaacgcggccttttgctgaggtacgaggaaccccaaaaagagcccggagtttcggactgaagttggcgcccaggtgcaaaggctaggacggccattaccaaccgagcattctgggcaggtgaaaggcgaaatgtgcgaaaggttctcaacagagtcccccgaggtcgaggaagttgaaaatttgcggtgagaaatcgaagatgtgggaacaaattcaccgtggcacttcgctgcgcgcgaaatcgagcgcgactcccccgagcttgggtgta

SEQ ID NO: 1553 - DNA, 3264 bp, Toxoplasma gondii
  source 1..3264: mol_type = genomic DNA
gacatcctgagccatacaaatgaagggagcgacgaataagggacacagtggagttgctgttgatagaagcctcgacgagaacgggtctgcagagaggacgtgaatgccgagcgttcacataaaacgaaaacgaatgaacaaaaatgctggcgtgcacgactacgtacatatcgactacatacagccacacgtgtacgtgtaccttcacgatcttaagtttttccgatcgataaccagatctgtatgcatagtagcacatcatatacacgcggtatgaatacgcacaaacacaatttagatatcggcgtcagatagtgtctgttaccgacgcacgaaaacaaccatggccggggggcggtgggtcacagcgagaatctgtgaggtaaccatattgtgtgagtgggcacgtgccccaacaggacaaagtagaaagccagtttctttattctaatagaacaagacgagcgcaccgacgaagggagcgaaaatctcacagtgcgtgcacggtatcactccatttgtcatccacgatacacgatttctcaaagtaaaattggtattttcaaccgcagaggcttcacccagaagtcctgagttgcatcttaggagactcctcaagactcaactcgagcagacgaaaagatgctttcgtgggaggacaatctgcggcatctgacttgtgaaatggcagggcgacttctaaagtggaaagagacgccgttcacccagcttcaaagacatcaatttgcagtctaagaatacggcatgctcgtccttctgcgtttctcccgaataattaccatagggtgtgaatttttggggaagtactcgaggcatgctttaaggctaggcggtagtctacgagctagaacaagttcctggtgctgagcatccaattcctgcttcgtaggtagtcgatcgtgcaacaacagaaacacgacttcctcgaaggtcgctttctcagtcaggtcatcgatgcgatatcctcgatatgtcaggcctgcgtcaaagaatgcgaaaaagacatccggacgaaataatcacctcacgttcgtgctacctggcaatgctgtggccttcgcgtaggatgccacagtcttgggcgccacctctgagcttttacactcggttatacacctttactcccaaactagaaacagccctttcacacatgtatcagtgctcctataagtacgcatactatttatatatatacatgctcagaagaggatgaggcagacgaaggagacttgctctgtacttccgataggaaaacactattcgagatgtgcgagttactctaaacgagaaagcacgggtgaagaaacatgacagtcgaccatgaaaacgctccaagtgtcaccgcgttcttccctttggacagagacgaaaacacacgcaagttggatttactcggtggcttcttgactcacctgctaaactggccggtccaacacttgaaatggccgattctcccgcaacgactccttctaacccaggagaaaactctgagtccttgcgttgttcgtatgacgtttcaagtggttgtctcgccattgtggagcttagaaacgctgtcgtttgtcgttgccacgtgggtttcctccgggtaaggctgcagagcggaggatcgacagatccggaatgtaagccacaacggtgcctcaaaagcaaagcgaatccgaaacagttctcagactcagcgttcaggcattctatcccgtttttggaattttctttggtaatttgcctttccaacgtggtagtgctcacggcactgaacgtttgggaacagcacaccgaacgccagtcgggggaaaacgcgcagtctgacggtgctgtaggcacgtgcacaccagactgggaacggctaggagcaccgctacccgaccacttccgagtcgaacctgatactccttgtgtcgccgagcagagcggatgaactgcaaatgcaggaagcagacttgctggtgctggatatgaatgccagtgaacgggatgacccgagttaactttggattttctccagtgacaagaagcgctattaaattgtccgatcaaagaataattcgttttgaggcaagttgaaagctgtaggttgtgcagtgggatcgctcgcaagagttcgagggcttgaggccgggcgtggaatgtctgtgtgcggaggagaggcagaccggttctagcggcagccgccatcaggatggcgagcaaataaagcagccagtagcaaaatatctaaacctgacaaggctgaagagggtgctgaagaggcatacgccaagcgcgcgatttccttctcgtcgtgctttcaatagattcttcgcttgactttataggttagagacgcgcaccaaacacacagatcagaaaaggcgtgcatgcgaatactcaaaataacaacagaaaccaatgcgtaatcaacacttcgtatgccttcaaacgagtgcagtagagtaacctcgaccagtccctctcggcatgacaaacatggagaaaacatgcagacaatgaagaccgcctgggaaacccagcaaagtcgtgcggaccgggaaaaccacaacggtgattgcttggaccgaaaacgacgcaagtacagacaacaaggccgctgatggcccgacacgtccgcaaactgggacgagataaagcaattcagagaattggagtacgcactctaaccaacgagcactcgcctcatacccgcctcggcgcatggacaactgacacgtgccccaaaaaacgacgaccaaccaacagaaacgcgtcaacagagtgagggacgactcctgccccccaaaatgcggcggaatgaggaattcagctgctgggaatcgaacgaagcccaacgctgttgccggagattatagccgacacggacactccactgagaagtatgttcaagcaagcaaactggttctaccacgaaaccagttgcatcgcagttggtacgttgtttgggggagatagctgaaagtggggaacaacgtgcagacttgcgtttgtctctacgatgcagaaaaaaggcacaccgcctcgtaaaggaagccggtttcgtccacttggcaattgtggaaaccttttgacatctatcccaggaacgaaaccgcacctgccaacagcagtatcttcaggtaatgtgtggccaatgacggcttttacctcagtgtcaacaaattatccgctccaaagtcgacgactgctctgataagtgagcgctctaggatgggctggatcacacagtcccctgcgactttgaagtca

SEQ ID NO: 1554 - DNA, 1957 bp, Toxoplasma gondii
  source 1..1957: mol_type = genomic DNA
tgtttttctgtgcttggactagagacgcgagaatacatggttgatcctttgtcttgggaagagacgtgtatgcgttgcgcaccgaggccgagcggcaggtctgctggggctgggcgccccaagcagcgctgaggagactccggtttcgacgtcattttctgcgtctgcactccggagaaaaacggtgaagacgaaggcgaagccgcgggagagagaggcgagaatggtgcgacgaaagcgcgaaacggaggcggagagaacagagaaggagagacacagagagagcaaaaaaaggcaaacgactcagatccgcaaaccgaacgaagacgtggaagtcgaggaaagggagagaacaaacgcatggcctccctggttgtgggcttcgtgacaggagcgacgcatgcgtcacccttcctcgctggacgcggaagaagaagcgggagaagaaggcagtctgaaaggcgagcgctgagcgaagaagaaggacacagtcgaggtcgcgaagaagaggactgcaaggaacggaggagaggacgcgaaggcgttgttagggatgcaagagaggagggaagcgaggcaagggggaaggacagtcgaggtgaagcgcagcggggagaaaagcagcgagcggagaggagcaaattggcggtggttgtgggagtgcaaagacgagaaactcgaagagtctccacaggaggcgaagcggaagcgcggaggagatccggattccggaagagcggccgcggcgcgagactcactggggtcgatgaagaacgcacactctctccttgcgtcggagccgaaaggctgacgagaagcagaaaaaagcaagaaaaacaaatcactcgcgtcgtccagagggcagccatccactgcacagagagagcggaacaaactgtatttgatggggagtgtcttgttctgtctccgcttgtcctccacgcgaagggagacaaggaagacgacggcagaacccccaggatccaaaacgaacagacgagaggcgaaagcagcaaaaaccaaacacgaagaggcagattggaagcttgtccgcttaccagggaaaacgatttcctccatatacgcgtcgagtgtgccgaaactgtgactccgaagcctcgtagtctgcgcatgcaaagaggcaggagtcgctttcgacgagcctgcatgcgtttgaaacgcgaaaagacgaacagcgaaacaaaggggggttgtctcctttgtcgtttgaaaaagcagtcgatctgtgtgccaagcgatccgcggaaaatcgaacttgcttgtttgccgggcctcgctgttgcgaagcgaatgcagctagcgaagggcaacgaggtgtacatacacctctctgtcagtgaccttgaagggtgtgtaaatctgcgaaaagttgcgaacatggctccgagtgaattgctagggaaaacggcttcgtcaattcgttttcatgaaggaacgatgctagccagaatccctttttctggaagaaatttattcctcgcctcgccgtccttacaacttttctcgtctttctgaccctctcatactcctcgaaatcccctccgttcttgatgccattgccgttcctccttgcttcttgtcttgcttagtgcgtagagactctttacgttttccttctctctgaaggtgctctgtctcgtcgtgtctccttctcctctgtctctcctccactcgtctgcgcgctctctctgacctttttgtcgcttcccgttctgtttccgctcctgagtttctttctttttctcatcggcatcgttgctaatctctctcgctctccttctcggggtctccttccttccgtgaaagcatttctcctctgcatttcgttccggctctatatttgtccactattcttcatgtctccctctcctcgcccttgcctgcttctccttacttcccccgtcttgaaaaaagacacagcctaccgcgtcgagga

SEQ ID NO: 1555 - DNA, 2219 bp, Toxoplasma gondii
  source 1..2219: mol_type = genomic DNA
ctctccttcaaaaatttacaatgatgcgcagtcgtacttacgcgtgtacaaaggtactgagagtcggggcactttgccaatctcttcttgttccttcacatctgatacgctggcagagtcagcctcttcaaagcaatccgcggtaaattcgtcttgtcccttccgcgtacggaaggcattcggacacgagaaccaagctgcattcagcagcgcaaccttgtttcggatattcacgtaggtcggcgcaaggtcctcctgtctaggatctgccgactgcatccacgaaggcagcggctgcacaacgaatccaggcacgggctgctgggacagagagccccagtcaaactctgctgtgggaggaaaggctacaacacaaatggcgcacagacacgggcagcagtgtttgtccttcgctctgtaactcagcacactacattaaaaactcgcgattcctagcgggggctggaacagtgccacgaaagtacagtgaaacaagtgtgcctgtataggaggcgaacggcaaactgccactactgagaaaaagagcgacccttcctgcgttgaggctacgcttgttggacaccatctgagtcgcagcgggaaaaacaatccagaccgtcggcgtcttcaaagattgcctctatggaaaactatcctgtgaagcttacacctctgctggcgttcgcctggccaaaggtccccaggatactccagaattttcttgtaagccggacttctgagaaggccttctagccgcgtggtgtccagtgacttcggcagctcagcgccaccagagcgttgcgccagcagcttccttgcatagaaaatccggtgatacagcgaagaactggaagggaatgagtcctccggtacaacaagtttcttctgcatagtcttcaacaggtgtggagcacgaccgctacggtgagaatccacgtgagacagagcagcttcgacgttcccagcagcctctgcgacgcagtgttctgtcgatggtgacagagacacgcaggagacgaacagaacaagaataccgagggaaaccatgggaaatgcaactgcatgatatagtcgcctctcagcatcgctcctgaatggagagtcgcaccaggaacgcgtactcagtggacacacgcgctgcgctcgtagccgcagcgctcctgaaacagatccgcagtgctgcatttctttttctcacgaagaggtaagtggaactgaatcgaacaaacagactctcacaactgcctagtttgctccattacacttggccttctgtgacgccattgatcattcaggaagactactcgaagcggtggacagtctagagacgcgccgaatgactcagtagccggctctcagcaaagttcgattcgggtgtgtcgcagctttgagtcgccgggatgtggaggtgacccgggacccgagagatggtgaccccagctagggaaaagcgtactgctggtgcttctagtgcaatccgcgcttctgctcgttgctgagttacaattctcatgtccccgccacttaccgaagaaaagttatccacggcaatggtgattgatggcgcagatgcttctgaagtctgtgcaagcaacattgcgttgccttctgtaatggcattcgccgcaagttgccgtggacgagaagagcagagccagttccgtagtcgtttcgctgtgcagacctggtgacatcgagagacgcgggggcgaaaaccggagagtatcaccgtttgctggccacatcgatactctgtacagagcaaaaacaatttccagacacgcggggctgccggtcacaaactactctgaataagactcgccgaatttgttttctaggatggcactttcctaccaccagctttttaggctgcacaggcacgtgctcagtggtagtagagtggggtcggaaacagcgaatgcgacccgcctaacaactgttcgtgaagcgttttcacctgaaactgatgcatgcacactccagtgactggtgctcaacaaaataatttctttagcatccccttttcgaaaggcgacctagcatctttaccgtattgaacagcactcggcgatcttggcactgcgtgccgagcgcatcgttgtgtgtgatatcaacgattgcaccatcatcatcctccatctcgtggctccgcacagcaacaagacctactctgcgtgttcgaattctaccgcctccctcgactaattccccatgaaaga

SEQ ID NO: 1556 - DNA, 941 bp, Toxoplasma gondii
  source 1..941: mol_type = genomic DNA
catatgtaagaccgcaaattacgtttgccacattttgtgttcctcaaccagattcctgctcaaactagtaacccttgtcatgaacagcagtttgcattaatgtgctccacagtgtccgtgagcattccagggagtttcaagttttgggatttgagaacaattcatcgaacgcgtctttggttatttgccgtgcggtatggaaactgagcgcaggacgaccgtccctcaatactataccagtttagatctgctttgaaagcaacaagcaattcaggaaacgcatctgggtgctgttgttttcacattgagtcaaccgtgagagtccggttagcatattttctgaagggatagcaaaacagacggcatgtactctgcctctgtggtgagtcatagtgactagctggtttcacataagtgacgtcatccagcttccgggaaaaacagtcgtttgttggctcccggggactgtggactgacgtctgcgatggagcacgacgcggttactattgccgctaagaggtaaccggcacatgattccactgtggcagttttggctccgctagaacgccctacttggcattttcccgtggtgagtgtggctcaccgtcactgaccttacggggaatatcccggtagttcgttaatcgatgtcttccgcgccatatgagggtcatcaaaacgaagcttccgcggtcggctccaactctacgttgtgcaatttggcctattttttgaaaaatgccagactctgtgctgcatgatccattttcctgctgaagcgttgtacatagagcaccgacttgaaagatgctgtgtatagacaccttggggcaagtctccgaaaaatcaggtgctttccacagtggtgatatcgtcaggaggcgcacacggataacacggacacacaggtagtaatctcgtcgtgtaacagtaagcaacaa

SEQ ID NO: 1557 - DNA, 3003 bp, Toxoplasma gondii
  source 1..3003: mol_type = genomic DNA
gaacccaggtatgtggttagagcgactgcgctcagactccattcccctttccgtccttcgaaaggggcactcgaatcggatgtctctgcaggtcacattactcagtccccacagataactcaaagtcaacaccacagcaacacagacagcaacacagacagacacacatgtgcattggcatcgacgaatgtatcgatatctgtcgacatctctctatagaaatagatagagttgtgtcggcgccgcgttgaaattctccgttcggagtgagcgatgaggcgatgatggtgtgtgaactgcggttctgttttagctgaggagtttcttttcgctgcaaatctgcgcggccgcggtcctctccatctattgcgcggagagcgcagccgacgtggaagaacctcgataggtacgggcgttcgaaacgcgtggagagacatgcgcctgtctgcgtttgcgggtacttttttcagtctcctcggcgacgcgcgtcctgctaggtctctgggaaacgctccgtttttctcggaaccgcccgccgaacgaagcaaggcttctctctttgagtccccgacagcatctaggcagcaactcgaacggcactgcgtcttgccgctctcagatccgccatgtgtccagacacctgcgtcggcgcgagaagtccggtcttccttttccgcgcaagtctagaaaagatggagtttcagagctccttcacgaagccaaaatccccctcagctttgtttcgcgggactctggcagggcccgggaagcaggaggaagtgcactggacaccccagaccgtgtagaaagagctggttttcagtccgtagcttcgctgttttcgcatatcgtggtcttgcatagacgtttgtagattacgtcgcttccggcacacaatgaggccacaccaaggccgcaaaggaaacagtcttccaaaacagaaagggatgttcttctgggaaaggcggaggcagtgcgtgcatgcttttctgcaaaacggtctctcaagcagcgatcacgccttcttgggttttcaggattccatgctcagcgaattctagggtacggcacgtaagcacgcactgagctcaacagacaaacaccgggaacatgacagacatttgtggactggcctgcatgagatacatctcgacttagatcggtggacacagatctctctctcggatggctgaggctctgcagaggctctccacgggccgcagtctctccttttgctactcaatctctctcgtcgaaaggggagtatctgtgcttccctaggtgtgtgtgcgtgtgaaggttgaagcaccagttttttctgcgaactcgcaaaactgcgtttttttcttaaaagtcaacctgcgtataaggctcacagatgtgcatcaaccggcccgggaagaaagagctggcgagtcagacattccctttttcgcttttctcgagcaagttcaccacctgagttcgtttgtgagcacgaaccaacgagcgacgttcgcgaggaagcagaggccctcgagaggtggaagccacggacagcgcgtagtctgtacttccccgaagaggtctcgtgcgtcaccttgaggcgactgctagtcgcgatgtcaattccacggaacacactggacagagaggcacccaatcacacaaaacccccgaggaagcaacgcaggactcgatgcgtggcaccgcgcacacacgaagaaacgccatttctgggaactgcaggtcaccaggctcggcggtcgtgtcagcggtggaacgcccgctggcaccggagagacgcacagtctctagccgccccagacctacaagttgcaaaagccgcaagtgcgtctttttctttgaaatgtttctctgaaacgtgtggatccgacgcgttttgaagagtctcttggcgctctagggcctctctgtgaacgcccagctggagtcgtacccccgggggtacaacgcgggctacctccagcaaagagagacatcgaccgagtttggctgccgtcgttcctggagaaagtgcggcaaacgctttttaccggcttttttgacacgtattgacacagagcggctctgttcgttgttccttgcactcgctttttctcgcggagaaaaagacgattctccgcccgctccgagacctctctatactacgcacaccacagacacccttgctaccaactccgcgaggcctatatccccgggaggtagagctagcctgcagatatacacagctgtgtgctacgagaacgcttgctgagtagcagacggccaatcgcggatgcgggcctcagatccagcttggttcgatggtgatctttctctcgtctcccttttcctcccctaccccacgttttctctcgctctcccctctcccactctgtcggggtaacgagacgctgcattcgacccctggtcggccctccccgacgctggggcttgtccagctttttcttttccacttttttctgttcccagtctccgacacacactttgttttctttttctcggcatctccagggcaatcgacgcgtttctctctcgcgagtaccgtcagctcgacaccgtcatcacggccttccaactcgaggttccttcacactcgaggttccctatcgtggcttttgtcagctggcctccacatcgacgaaaagtctctcgcaccgttctcctctcccttcttggcgctgtccgcctactctcgtcaattccgtccgcctgttttttcgtttgctggaggccgccttccctgaagttgccctctgcacactgccttcgcgtgggttgcttcattgcctcgtctctttgaatggtcttgtcgaccgtctcaagtgtctcctgcagggaacagatgcctcatcctcgtctcgtcgccgcttccttttaggagcgacctgggttcctcggacttcccaggctgaaacgatgtctctgcgtctcctttctcttccctctctgtaactgatgaggaggcgtgtttttctcagctgaaaacgaccgctagga

SEQ ID NO: 1558 - DNA, 1650 bp, Toxoplasma gondii
  source 1..1650: mol_type = genomic DNA
tttgctgagtccttcacgacactctcggcaggcaacaggcgagcgcctgtacaagagcagggcgacattttttctcggaatttccctcgctttactggggcatctcatctcgtaacaccctgcgagtacatcaatctcgagtaagtgtgcttgcaggtgtgacgccaatcgcattttccttcacatctcaacgtcctggcgcctgcttctttccaagtcgttcaaaacttctacagtctggcctccaccggttgacgctcgcatgcacccattcgtccatgtgcatgcattcgcatacaaacgaacgcgtacatacaaccagacccatgcagagacctacgcaagtcgtttcacctcatgtccagattttcccccggacgcttggaaccacatgcatgagtccgtgtgcttaagaacacctccaaatacgtacacagatacctgcatatatgcatgcatacagacatgcatttgtacatatgtatacacagagaaatacgtgcagaaacactgctggatgcataatcgagctcgtgtctccgagagctgctggcaccctcaaaagttgtttttttaccgtctgtacatggtggaccctgcatgttgggcgggcgtccgctgtcggtctgcatgcgtttctctttgtcgcgggaagttcccgaacgcggcgagtgcagaagcgatcacactcgagcgcggctggcctcctcctgaagactccggaccggcagcagggcgcctggccgcgagaacaggctctgcatgcacggcccggagcgtcggactgtcgccgaggccctgtgcgtttcccatgcttcggggaaggccgagaaaaggggagattcgcgctgaacgcccgtccggaagaggtcccgcgagcgcgggaaggcgacacccagagccaccacggcaggcggtgggcggcggcgcagaagagcctgccggaatggatggggattctggactggtggaagtcgcgaggcgctcgcgaacgggagcgggcgagtcggtcggagtcgggaagacgcgaaaggcgtccaagtttccacgtgcgaggccggctggctttttgggtggcggggcgcgggagacgggaggggatgggcaagcggttctgcgcgactcgccgagacgaacgagccgcgagagcggagaaactgtcgcagattcgcagagaacgcagcggccaaacgccggggctgaccacgcagaactctcgggtgtatgtacagctggtggcgcatcagattcgcgtttttctccggaatgcgttccaagtagctgacgggcggaatcggacgaaaaacgcggcggatgtccgcggtgaggacaagccttcgatccagcagacggaagcgacttcctcgaagacaacgcacacatcttcccgttttttccacggggaaaatggccgtttcctcgactccgacgcgctgcgccacgcagtgcaacacactcgcggcacactgcgaaatcgctactcttcttccacgcgcggtctctcacgacctgttcaaggcgctcgaggagtctggccgaagaaactcgagacgaaggcttcttcctcagaccgggtgtttgcgcacaaaaataacggccctttagtgtcgtggacgcgcgaaagaaaccgtggaaatgcgaagaagctca

SEQ ID NO: 1559 - DNA, 4921 bp, Toxoplasma gondii
  source 1..4921: mol_type = genomic DNA
caaaatctccctgtccctcggctcctctaggagatgcgaactcaaggcagagaagccggtgtcatgcgcagacctgctgccgccctccactcgaaatggaagacgcggccggacgaagtcaaattcaatttgtgtctcagaaagacaaaaagcgccgcatgcggtgagagaagaaattccaaaagagagctgtccagctcgcgtgtatgcagacaacagacgcgcagacgattctgaccgcacacgttgggagagcgacgtaaatcgaagagcgactcttggtctgtgaagcggctgccgtggcttctggcttccgttgaatttgagtttccgtctgctgccacaacggcagcactgcggctgcgcgtatctttgcgagggaatcgttcgcctcgattttttccgcgcgctctgtcctttagcctctccgtaaaaaacgatacaggaggcgtcccgtcgaaagccaaactgaggtcgagaagccgcgtcgcggagtctcaggttagtcgcgcgctgtgcagcaagctgtagtcgaggcggcgtacgcagacgtaccgatacacgcgagacgagggggggaaagccgcggttctgtttcgtcgcgcagcggggaggaaaaggagccgaagcgtcttgatatttgcgggaaaaggagagaaagccagcgtcgccaaggtggctccacgggaccatgattcgactgcaggagcggctacgacgagcagattcgacacctccgcgtcgggttcctcaccaggaacgccagtcgtgggacagacgcagccgagaacactacggcaagaaactgacggactttgtagcgggagtgtgacgaagagagaactgtggagagagacggcccgtgggattcctcgaccgactcccaagggtgccccgtaggcgaggacggccttttcgcagcaacagtgacggctggaggggcggaaagggaaaaaggaaaacgggtgaacaagaggacggcgaaaggactgagacactaaggcaggaatcacgaggaaaaactacacggagtcggggacgaacagtggaaggaagcggactggcacgcgacgcgcgggtatgatgcatgccgcgacgaaggcgcctacaggaagcgttctaaaacaatcggtgaacaagggaagtgacactggattggacatttgaaaagggcctgcagttagcaggtagcgcgagcaaggagaagaccatccaagacgaagctgtgacggccggcgagcagaggtgctcagcagagcgcatgcgggggaatctcatttcccgtggcgggcgagtgcgagtcgaaaaggcaacgacgggcgctggaggagctgagagacacgcgttacgcgcgagaaagtcctagaaggaaggtcgcggaagcgggagacgacggaagctcgagaaaagacatcagaaaccggcggctttttggcgtcgagaaacacccgggacaggcggcgggcgagcgaaatggccactgcaacgagagcggcagcccacccctgtgcacacgaaggcacagaaacaaaacgccgccaggaaccccggaacgaaagcgaacgccacgcagtcctctctgccgagcaagtccgctgagaaaaaacgcacacgcttcttcgttaacgacactcattccagtgagacaaaaacaagggaacaacgggaatcaagccgggaagctaccacgcgcgaggtcgcgctgccgcgtcccgttcactgcacactgctttctggagagctgcgttttcctcctatatacagtagccagctgcgcaagatgagtgggaagacgcgcgggaaaaacacgccagacaccgtcggcggctttcctaagaagccctggatttctccgtgaaaagcagccgcagagaacgggccccgaagttccatatcggactcgggttcctgcccaggcagtctgaccaaggtaacgcgaaaacggacgcacgaggagcgatcctcgatgcgcgttcaactttttagaggggggctgatttcttccagctcctccctcgagaaaaagtgcgtaccgaattggtttccagccatccaagccggtttgtagacagaccctcctacagcagtgttccctcgtggggagacaggcgctcgctcgtggcggaagcgacgcctggaaaattcatcttctttttgtgacgccaacgcacgctttctccacaacacgctgaaacccagcgcacagcgtcaaacttttgacggtacggaaccgccgcccaccgagggaagggatagtagacaaaaatatgtctggcactcagcgggacagctacagccgtacaatcgacgctgtacgcgcagctgagcagtgactacgctatagatgtgtcgaacagagaatgaagggtccggaggaccgctctgttcaaggcatcggagtggcgtaccgccgccgagagctgtctcggacgccacgtaattttcaaagaaagacacgccttatacggcgtctacaagtttcccgcagtggttcacttctcgctgcctgccttttggtgaggagctggctgtgtgcaattgcctttcaaggagccggaagtcgctactccaccacaagggtacaccgcgtgtaagcggaaccggcgaacctaacgcccgacgcttctccaggaagaagtaacagccggaatccgtgctggggcgccttcacaactgcacctcatggagtcaaaggactagcctgcgccacctcttcgcgtagataaatatccgagtgcgctagcgtgtacaagcgtgtagtccacatcccgaacagtaacaccgtcgcaacaacacggcatcgtgccggtgtcatgcagtcagtccatgctgaagtggaagatagaccagcagcctgaagcatatccagcactccctgatgagttttgtcctctgcttgtactgccgtcatgggcagagggctcttcgtccgaggcctgctatagggaaaacttcgtgtggcagtagaggttacacgacactccggtaaccgacagaccattcctcgtggactcaatcgatcaccaatagtgattacgatagacttgcgtctgcgacgcaggaaggaggaaatcggtatttttgctttgaagaagacgccgtacttgagaggcgtgtctgtccccatgactacaagtcgctccttacgcgttaaacagtcactgtcgtaatgcggtggtgtagtgtgtgccaggctcacgtcgaaacaaacgattttctacccctagagaaagcactatgttgttttctccccagtcacgcgccgagtattagtacaggattagcacaaaggaaatgacttttcctttcaagaaaggcatcgagtggcaaccgctgtctatgcggtgccgtcaccctactggagggcttccaagcacgatcgttctgtattcgtcagtacgcggctgtgtgcggcgacgctgtgccaggtctttgcgtccacgttttgctgattttgctccgttcttccctggaagaagcaacttcgttcaccgctgtccctatttagaagcagccaccccacagaagaagatttccatcgtcggtgatgtttgaacattgtccctggcgtagactgcaacgcttgcaaaccggggtggtgggctcttgagtgtctagacagctggatgaatgctcccaaatctccaggacgccactaggctggcgtaatttcatctgtgtttccccagcactgaaagggggaaagtcctagggagggcaacagaggagcggaaatccgatgttccctcgtgacgtgataggctggaggtgggtatcgaactaccaactctgttccaatagcgaatcggacgacacgggtgccgtcgcgagacacgacagagaacagcggagcaaatgcgactggtcacatggcaaaaagcaaagagaaacagccatcctccagttcgccagttctgcagcttcacggtaatgtggcacgcccagcctttttgcgcctccctgtctggcctggcatcacagatacatgtgcggatctcaacctcccccgcccgttgatgcctacacaaagcggtatgccaagctacgtacattcatacttccatccgtcagagtagctgatcttgcaggtgctgaccagcgcatggctgtcggtctccggctgtcgaccagggcggcgggttccaccggccttttgcggcagcagcagcagcaacgggtctggggtagagttctgggcaagagggtgcatgcgttttttttagcttcgctggttcctcgcatcttgcacagaatatgctgctcgaaaccgcctcctcccctcaagcacacttcccctttcttagaggggaattttattttcatacacgtcctcaggatccctcttccgccgtttgtcgtctccgttttggcaagtcaaaatccgcgccatcgtgcgtccatcctagttctctgtcgcatgcgcaacaaagaaaggagccccgcacacgcacactcgagacaggtttgaactgtcgatgtcgtcttccgtttccgacgctcaatgaccatgtctgtagccttcgcgcagcatctgggtcattagtctatgcgcatttgcagacagagatgagcgggtgtacgaagcaccgcactgtccgccccagacgggcctttaatgtgtcgacggctggcacaaatggtgaattctgaaaaacctggtggaagaccatttgcaggtcgtgtctcgctaagaaaagggcacaggctccatcggcagcggaggaaacctgaacagagagccacccctcaatgctcgaaaagagtcgctggttgcttcacggctccccgtcacctcacacggcaatccagagaactcctcgcctggtttcctcgagtagcacctgagttgatcctctctgtcgctctccggtctcctcgtgtcttgtgtacttggtcagctttggcgacgaggaatcagaaa

SEQ ID NO: 1560 - DNA, 1881 bp, Toxoplasma gondii
  source 1..1881: mol_type = genomic DNA
tcacatttgcatcgttcacgaatctttgcatttacgcgacagcatgtacctgctgaacagctctgcagagccgcggaagctccttgtacagattcgccgcggtctccggatcgaggtcaaagaccgaagcaacatctgcctttggaatgagaagggagtgaccctcgactgcaggaaaggcgtccaagatggcgatgacatgttccgtctcgaaaatctggtcaaacacatttcagacgccatggggaacatgtgaagatcatttcacacagcagctgccagtgcgttgcaacccaccgaagaacgacgcgctatcggtgcttgttctctggttcaaaagtggtaccaagtgccggtgattctaaaattgaaaatcggcagtcctcgtgcattcccgggtcttcggctctgctttcattccagaaccaagggaatagcacacagactgtagatggcaccgaaaatatcttacatagtagacctttgcaagtactcaaagttgtgtagtttcgtagaagtacgggagagctgacgggctgaagcaatgattcaccgtcttgtgtgaaggacgtcagctgcgtctacaaatggtttttttcctatctgcaagtcaaaatcgtggcaggtggagcgccaaactagtcctttggcttttctactcggcttttttagtgaactatttattttcgcgtgccaccacgaagcattcggtgtccgcgcagtccataaccagtttctctgcgtgtttttcattggcctactgcacccccaagaagctgctcaaaacagtgtacgcaccttatggcaggggattttgccgtcaagaatctttttgaacacattttctggatcgtaggccacgatcttatggccatcctgcgccttggtcgccatgtttctcttggtctggtagcgccgctgaggaacgtttcttgtactctgtctagagccgcacgcgccgtgagtgagcaggaaagaagtaggaatatcgaaattcagcgctgaaaaaccccggttgaccgaagcttgcggttttgagtgcgagcaaggaaaagcgcagagcgcgcgttcgcgtcgacgtgcgtgttcctgcgtccgcagagacgagacacccgagagacggtcagaggccgccggaccggaaaagggtaaattgaaacggcgaaaaggaagtgggcagctgaaaaatgcagaaagtcttggagtttggagggacaacatggcagtagagagagttacaaacttcaaacaccgcgtcggaagcatcgcgacagcttggggaaagggtgactctcccaggtccgcaacaagcgctctgacttttgcccggacgcagcgtgtgtagatatgggaagctggaaacaaacgcgtcgaaagtcgcttagtaccgaccttccatgattcaagagacacacactacacacgtcaggggagaggagttcgcgcgtctcgttgacgacaaagagcgactacaccctaaaccctttttggtgacaaaaagaaggtccaccgcctgaagccggaagcgcgcaagagaaacaccagggtatgtttcgtttttgcgcaatttgcggttcgctggcaaaaactcatgtcgtgcagcagcactgctcacagtgggagtttggcttcggcttatatttgagcccccacgaaatcgtccccacaacatgccgacgtatgcgccgatatgtgagagcgccgcatgacctgcatggggggcagaaaagcgtattgggaagggcctcgagcaacaccggctctctctattgacgagaacacacttcgtgtccttttctgctctcctgtttcctcttgcgtgtctacgtgtggtgcgcatcctccctcgttgttatctcttttacgtcccttttgtaaaga

SEQ ID NO: 1561 - DNA, 1335 bp, Toxoplasma gondii
  source 1..1335: mol_type = genomic DNA
ctgaggaaagccaccgtttgagaaggcaaagcagcttcaccttggaggagtcccatccgaaactcgacaccgttccactcgtcgaagaacagactgctgaagctcacccattttgatgaaggcgctgttcttgtgcttgccagtcgccttgtcgcggatgatcaccgcctccttgacttcaccgaactcctcgaagatcgggcgcaacgcggcgtcttccatcgactgaggaacgcggccaacgaacaacttgatttcgacgcgcggcgccatgtggccagcaggacggggtacgccgctcacgggggcgccgaccgtcgcgccgttctccatttcgcctgcctgtggaattgcgccttccattttatcgaaacaaagtccaaagggaacgcctgcagacacaaaaacgcgcgaaaaacactgtcgcctctacgggaaatcgagctgcagcagacggcttctgcgtggtgcgctgcaaagggcgagaacaactcagaggttctgagacgagcggagcgcatgcacctggaaacagattctcaataaatgcttaaagcggggaccacagaacagtgaaacgagagaactaacggagcgcgcgacagcaagaagggagtgctggaacggcggaatccgcctcgtccggcagtgagcttcgctagtgcgtaaagttgaagcacaaacgacgaagagcgagaaacagtgacaatacaagcgagcaccacgcagtcgagactaccgactgatgttgtgaaagactgcgggttgcacggaggggcaggggagaatgccacgcgtgggagaaacgaggggaggagccagtatcgcgagtgaacacaggagacagacacaaaccattcaacggaaagagttaattgagaaagaaacgatttcgggacaaagcggccgaaaaagtcacacggggaaacagagcacagagcacagagggacggccgccacccgacattctattgcgcaagggaatcatgggtacacaaggagcgaagtggaggtggacactgaaagcaaaccctaatttgcgattctgtgaagaaagcaagcgaaaaaaacgagctccctttggatttcctacgtaaaaacgagtatgcaccagaatctggaacccctgcgacaaagtgagaagtcccccatcacctgtcgttctggttgtgttcgcccgcggaaggcacagaaattcccgatgttaggaatagaaaaagaggtcgaaaaatgcagatcgacgaatcacgggagagcgttccctgcgcgaaggctctctgagcccagggaatgtttcttgcacgaaactcgcgaaggaaacacaactgtcgaaga

SEQ ID NO: 1562 - DNA, 1491 bp, Toxoplasma gondii
  source 1..1491: mol_type = genomic DNA
aacggcggtggatctagggagcattctctgttctcttgacgaatatatatatatatagtcaatgatacgtcgttaatctgcatgcatattcgcaaggctgcggttgtacgaaactgtggaagaaaggagtcccacagtgcatgtgtttgcaagggcaggtgtccccgagtgaaggcactggcgtggtagacattccggagttctgcacgtgtcacacgttgagggaacatctcattcagttagctgtccgttctgagaagcctgcgagtgacaggatagtcgtgacaacgtgagcgcacgaaactcggtttgccgtagtgtcagaaacagatttccagtctgtcgattggcgggaaaaaacaagaaatagccgaagaggcggagttctggaagcggcgaaacgttccggagactcctcgatagaagaaccagtcgtttcagatttagaaccatcaatctaatacttaatgaaaggtacatagtccaaaccaggaccctagtgagttcagcacaagtacagtgagttacaaacatagaagataatggtactaggaagtaggaaatcgcgttagttcttccgttttttgaggttggagagtcggaagcctctggctagaccgcctcggcgcgcttaaaaagttgttctgttcgatacgaagcgtgggcgagcgttcagagacggaaatcaacagacattccgatatgtgcgcctaattgctggcaattgtgagtgtatgtgtttctgtatgcaatttcctcggtggtgcgcgtgggtttcaactcgacaagtgcttcccgtctggccagggaatttgtgtgaatcgccctgtgctctttgcgtgtctaaacgtgtgcacagaggccaaaaacagcgtgctctccatggaaaaccaagaaacattttcggtggtgttctttaaacgtgcagcaaaaactacaagttcgtccgctcttgcatcacgtttctgccggcgaaacgcgtgtccttgcctctccaaatgctgcagtgttacaagtccgcgttatggtgccttttaagtccaccagtcgttctgcgttaggttacttctacctcattcactttggtttcggtgcaaacgacttcggtaccttgtgaatgtcttcgttggtagtcagcaggttcatatccacaggtttcattccagttttccgttgccaggtagcctcctccacaccccttgacgctagcgcctgcaggttcgctctttctactttgctgtgtcagtagtttcggggaagccaaacgagatcgcgagacgagtatgtccaaacaaaccgctccttgtccaccggcgagctctccgtgcataccactttaccctctcactcttctgaagcagacgccgcaggcaactcatcgaagaagagaacccagaacgtgaaccgctccggaaacgcggaaaaagtccaagattttcttatcttgcaacagattccgtccggtctcgtgacatgcattggtcgtcaaga

SEQ ID NO: 1563 - DNA, 4895 bp, Toxoplasma gondii
  source 1..4895: mol_type = genomic DNA
agatccacgacagttggttctcgctcgcggttgctgtggctctctcgagcgtcgacacagacaaggaaggagcaggagcccggggcctgcggtgtgtgcgcccctccgaccacagaagcaggagactgtgctgcggcgcggaggaaaggagcctgaccagggaaggcctgaggctcccccgcttcagaaaccgttgacggaggcgacaggtctctctctacgggtccgagctgagctgcgagtgagctgggcaacgcagccggaggacagccgacttgctggtggatgattttccggtgaacttcgtcgaagaggacccgctgctgagtgaactgcaggggactcgaccgcgtacgaacaggcggtgtccacgagtagatcggcggctggaggtacaccggcggaagggcggcgtagtatcgcagctccgcctctgtcagcggaggcggcggctttctagccgagtactccaggtgtccaatgccggtcccagaggagtctgaagagcgacaggggtcgtcgcgacactggttagaactggggaagtctgtgtagctctcccaagaggatgaaacggatgaagcaggtgcaggaggagacgggggatccccggagaaatgcacctccgtggtagccatgctgctcagagagagggagtgcgcaggcgcatctgatgcggagagaaaagacgtgggaaccggccagaaaagacaacgaaaagtcggacatgaggggaaaaaagatggaggccgcccgctagatgaaacacgttatggaggagcggcgcctgccacaaaaagagcatgcctacgcacggtccaggacaggaagaaaacggggacagaaaaagaaagcaagactcagggtacggtgtgcgatgtagagatgaagctgcagtgagttgacgacgtacgacaaaactggggtcggagacccagcggagcttcacaagaccggaaacaagagactgcgacgcatgaagcacggaaaacatcaacaagacaatagtttcccacaatacaaatgtagcgagacatcaacagaactgggaaaacggtcaggaaagtgtggccgaggtatccgcgactgtgcttgtaaatgaggcgaacgatgacctttttggccacacgctgcatgcaacaaaaacgcgcctcctgaagaccagccttcagctttagacatcgtcctgctctgacgagagaaaagaaacggtcagggtttgacggggtttgtgagctagtgttagcggcttgttaggggcgaagtacggtgtttgtacagaggtgaaaccagaaagcctgtgacactggacttgggtgtgtagggaacacggtcacatctaggagtagacgggctgatactaagccattttgcaagaaagaccgagaaacaaagctgcacagttctagtgatcacaggaacaaagcgacggaaatccgcaactggacaagttaccaatccccgaagtgtgtgttcacacctgtcagccaaccaccatccgatcgcacagactaactgtgcctttatggcagatacacaagtgaactaccaaaacacacacatcatcagacaaaaacagaaagactcccagtcgtaacacgcgtttcacaaagtttgggtccgcatgtcgatttgcctccaacgagtgtagagcgaccagacagccagctgctctgcatgcacacacgtaacagcaccagaagcagcactcggcattcggctgctaaatcgacaggcaacatgcttgaggcagaatgtcctatttcacattttcgtttccttctcaccgtcatgttgcgacgtcctcttgctggagacacgtatgacttgtcgctgtgacagtcttccaaactgctatttcgcccctctatttaaagtcgtcatctggaaacaggaatctgtgcggtgtaaggtgctaaggtgccttcgtaacgacattggcgaggcttagtcacctgcagcagaagactgtggtggtaagcgaaatatacgaactgctgttttcactcaatttaacaactatagaagactcctcagatgatagcatgatccgtatcgtcgtcctgggagtcattaaaacctcaaaaaccggcaaacctcccggctgaaagttgggtttcaaaattgtacggcattaatgttattccacatcgggtacattgtacaagtgatatgtgatttactgttaccactcatatttgtagtgagagaaaaggaccactcagatgctagtaggatcagtgccatcgcaatgcgagtagtcatcgttggggcacgattagttgtaggcttgttcctgatagtatcttggtctggtacttgggatcttctctgaggtcagctgcaagcaaaggctctctgacacaagtcgtcacagctcctgcaaattgcgccaccacaaaagtacacgacgcatcagtaatggcagacgtagccggctgctcctcgctgagtcttggccttgtgttgtttaatttctttggaagacatgttcgggatcgtgcttgtttgcagtagacgcaagacaaattacaacgatccgtttcgcttagataactgccatcgtcatgttcaggacgacataacaaaaaatgaagggtgtagacagctcttaggtagcaacctgcaaattttgccgcagacgttccacatcatctcccttactaagaaaaaggggtggcggcacggtcactaaacatcgaagccacagaagccggatgcgtgctactaagagtcatatcatgggccaccaatcatccaagaccgatcacaaaacaactgaaggtaaactccgtgctacacagtagataacggtagctatacctgtatgagaactatacattgtaggtagtgtacactacgagttcgaccattggttcaggcattgaatggttgtttttgtcggatgggagctcgactgcttttctagggcacattcaagatgatgaaaacgaatgtagaaccctctgacgaccgtgttttaaagttaaagtcagacacatgtgagaaattcaaaaattcttagccagtagcaggacaacccatatgattgagtaaagtgaagaaccaaattcgccaagagttcatgtatgacacgtttctggaagagggcttcgctataaaaaaaagcctctgaatagggcaacatatcacagcattctcaagggtgtcagtctcaaatacgtttgttatttccagaaactggtctcagagaggctgttgtttttcagcttatgttgtctagtagcaagctcccctgagactggaattagtgcgacctcgccggtgaagaccaagatgtactatcctggtgggggtggcgaacgttgattgaattcacactgttggacaatgattggaggcaggttttgccatactgtatctcaacgggtgcttccactcttcatttcctgtaagcatacatgaccctgggcaacagagccatgctcaaacacatcacttttcagctgtgaatcttcttggaagagaagaattattgttctcaggcaacgtttcggcaattcgtactcgattatatatgttagacgccaacttccctgcgaaacactgacatattaaaccaggctgggatcataaaactaaagtgtttggttagaatgactggctgctttcagtacttcttattcggcttgttgtttacatgaaagagaggattaccgtgcctggcaactcggcgtatgcgcggcttgcgctttgacatcgactgtccacaaaaatgatacggaaacaaacatcaaaaatcagccgacgatgatgagttaaacgatgtcaggagaaaataggacattgtaaggggggcggcagttgccaacttgtagcgtagctctggtgggggaggattttagtgtctcgaaggcagcacagcttcagcgagatccgtccgcgccagcaacaaagacacctttacaggcaactctccttaaaattcctttctttctccgtggactgccggtagatcaccttccttcaagcataagacggactcgaggaatgcgttgagacttcacgctgaatacccaacttgtgcggagaatgcgcacacggtgtttccttccaaaccagttatagatccagcggcgctatttcagcacttctgggttgacaaccacggcatgtggacgacaccagcatatgaactactgtccctttcctgcaaagcaaagctccacaagaccttgtctcttgtttcttaagttcgagaccccaagccaacccagaggttattattctcattcacggtctccctgtgacaagctggagtggtcacgaacgtcgacagtgaagaagctccagttgcgaacagtaaagagaatttctggatctgttttgttactggcgtggcggcgtcgttacggaaacttcttgccagaggcactaaccaacgagcaacggatgagatacaggagctgatgcctctttgggatggatggtctacgaatatgaataggtgcatatcacacagaactaaaagagagggaagcgtattggatagcgacaaggattcaaaattgtacactgccaactgcgggaagcgcatctctcacttgtgtggaacgagaatgacgcatgacttttgcgtttagcttcgctatttcggcaggcgtctctacatatgcgtcgctgtgggcaggaaaagctgtttccctgtcatttttgtttgttgtgactggccttatacaggccacttgcgagtgtgatgtcgaacagcagcaaatgaatttataacgggaaaggatatgccgtgtcagttaggcggttggtccgcgtgattggataaacgtcgtgaagcctacgggaacatctggttggtttgtgaattccgtaagccacttcgcccttttttggcttgtcacctttcggcttcctgttgtgta

SEQ ID NO: 1564 - DNA, 1805 bp, Toxoplasma gondii
  source 1..1805: mol_type = genomic DNA
ctattatgcatataacagccgatgcgcagtaatcttgatgtcgtaggggtctgaaattcaactccgtacgttgtctttagcagtccagtggtgtgcggaggtgtacagcaataacaaagaacgtggttgtcctccttcctcgccgtccctcatttgattccttctaagtacatgtacaaaaaaggttgcttctctggatcccgctgcagtcactaggcagcgcagcacatatccgcctgtcgtacggtgacaacttacttcttgattcgtttccttttatggtctggcggtatttatccctcaacctgtatttccgtttctttcattcttgcttgtttccgctccaccttttctctagagctgctcgcctttttctgcagctccactccgggtgcctctgcctttccctttttcttgcgtagcgctgcctcggagacctcttccattttattcgaaggagcaaacggcaaccactgtagtgcacagagggcgtactgctgacatagaatggcaaaaacagatctgctgaccaacaggaaactgtattcagtgtttgggaggtcgatagcctttaggtacatgtagtcattgaggcctcccctttttactcttaaatattactttaccccgaagatcgttgtatgccccggaggaagaaacgtgggagaagaaattgtccgagtttttatattcaagtgtgttgctcgtctgcgttggtgcagaaatcgtgaatttggttggtttgagtttcctgccgtccgccgatctgcttccgtgtaagtgaaggaggcgtactcacatgacagacagacgacacggtagaaaggaaaagaaagaagaagtgcggaaatgtaattagtgaaaaaactgtttgtccgttgagaaacaatttcccttctccctccacacgagataaaacgtcgtccttcactggatcaagagcggattgagtacgctgtcttggcaaaaggaatgagaaacaaacttccttctctcacatcatagtcccgattttataaatcatcttctcaatcgtcctgtcaatgtttttacgttaacctaagcgcatgtcgttttcttccactacatgcagaaacagtgcatgctgcacagcacagtctttccttttgacgaagcagtcgcggtcacttacatgttccacctctttctcgcttctcgtccttgaatttaacaatacttttaccgccaaaaccttttatctttcgcgccacattctgctcttctttctttttaagctctccttaagcaaatgtctcgtgctcacggttcttttggatgctgcatgctcctcgtcgatgactcgagacgcaggcggcttgctgtttgtccccagtgttttttcacagaagccgagccaactactcatcgaatctcccctgtagttctccgcagattttccaacaccgtacaagggagaccacgaggggggaatagccgctgcccttctcaagagcggaagcctttgggcttgcgtgtcaattaagttcccgagttagacgtcgagcaccgagaccgtttttgatggctgtgttttgcgttctttctcctcaaatgtgagtccacgcgtggcgcatgtgctagttggaattctctacttcgggagatcaggtaatgtcttttgcgcagcactctgttcgtgacccggcactgctcggttcattgtctttaaaagtcctcattaaaaaatgttcagtaaaagtcgccgaaaagaaacgccttcccactctctccccaactaggggcttccaaaaagctctccacggggggctaggcagatcccggta

SEQ ID NO: 1565 - DNA, 3514 bp, Toxoplasma gondii
  source 1..3514: mol_type = genomic DNA
aaatgcagttgtggttattaattgctcgtctacgctgctcgttagactcgctttcttcgtggaaacacacttttgcgtgccattctgcctcgcgaatccgtgtttccaatggttaacagcggtatacaatcctctcaaaagacacgcagcgccacttgtcgcggacgcatgaaaagttccatgatgccgctctattatggaaaaaagaacggccacagtgagtccacagcataccccgttgctcgcaactcgtgaacccgatgagcgtagtgacagccgggtatcgtgcatgatcctcctcgcttgacattggggcaaagtgacgttttcctgagatctgggcactcgcgcagctccgacaaaccgtgagcaaattgacaggcgagtcccctgtcacagccgcctttgtgataccatgggcatattttggtctgagaacagcagaagccgcaaaactcgtacgccacacaccctgaaccagccacccccactttcctgtatcgttacgtaaaagcaaaccacagatcgatgcttgaaatgttttctcaaagcgacgccacacgacggacagttctttattgtcactctggagatccaggaaacactccaagactcgtctgtttatgaatgacacattctacccgatacagcgccacgactgtcgcacactgcttcaacaacgacagctgtatcaaggaatcatatctgtttcacccttccttctttttagctgccagcctatattcggtccagctttgctgctctccactttacggcctccgtctttcaaaatgtcaagcgttactaacccgtactatacagaccccagaaaacggtagtttctgtaagcatagggatctcattgacaatgggcaatggggagtctagattcattgttatctgattgttactgtatgtcctaaaggctattcacactgtgcgtccatccgcgaagcacctgacacactcaatccgcaagcacgcaactagctcctttactgatcctcttccttaccttgaaaaactgaagcttccggggtgtttgtgcacactggaatcgagctgcgtcagagtcgacggagccacggttcgtccccgaatggagtggaccccgcgtgcctttgcccccgtcccttccattagaatgaactccgtctttgaccaagttgggcgtgaacgaaggtgtttgtccaacaatattccctgactgatttgccaatgtctccattcctttaccgctcatgaggcgactacgccccgctactgatgaaggcggcatcgcagttcaccgctagcatgtggaaacggagaaacttgctgagaaatgcaataccgttcgcacgaaatctgcaatgcctcgacgtggtacggtttacgaggaactactacacgcagacataacaaagaaagcggaggtcccctgtctttgcccacggaaacgctagagcagtcagggagacacttcgggcagcctcccgttaaaaatgcacgtgtcggttgagggacgcacgctctcaaagattctcacgtcaggtgcatagtttgcgatgcaggtgcgttctgctgctgtgcacgatgaacccactctgtcgtggcaccgacctcgaagccgatgacttccgggaccactgagatcctacggttatcagggcatgatatcccgcgacgtcgtctgcagctgcaacgaacttcagtctactcgaaaaacaaagtctatggtcattactacaaaccgaggaatggcagctcgggactgttgcgaccccgctcacaacaaacatcttcttagcttcggcacctgtgttcctccacgcttggtcctggagaggggggcggctttcgcgaacacgggctctggaacctcaacgctccgtgttactgtctcaaaaataaaatacatcggtgcctgaaccggactcctttgctccaatttcacagcggcagacactgtcgacagaggatcgtgagacggttccctttgagctacctatacgtgtttacacttcgttcagcgtgtgccgctcactaacgcgtttgcaatttgcagatgccctttcgaggtagagacaaaaacgagggacgtcacttgggtacacgtacccaacgatgcccagtaaatcccggtgccgtgaggcggagcacactgccgtccgataaagcgctgcgacggcgaggtcgccggaaagcaaattggtacgggttatgcacgcgaatgacggaaaggcgtaagcagcaaaacagacccctctggacacagacctcgcggaaactgaggaaaaatcggcactcgacgtcaaaaaccgctttctgccacttagggcacggtacagacgccgcggtggtgcttccttccacactgctagtcgggggaacctgcgtggatatgacgcttctagaatagacaaacccaccacaggtgtatgaaaaaaaagttgaggtgtgacagcaagactcaagagacgcccgttacgaagattgacggcgcgcgccgcccctccctcaagaaaacggagtttggtggctgtcgctcagtggtgaagcgtcggggggtcgcggctaaaacctagcaactcgggctcacagaacagctattagagctgctgaaaacgcggaaaactcgaaccgtacccatgcacaataaattccttctctgattcggtgaaagcagtcaacgttctgaacacggttccttccatgccagccccggcagctgccgaccacacagcccagtctcatgttgacgcggcaatgccgcgccgtcgcatggcggctccgaagagcaaccacctcatcttgaacacttgcagttggcaggcaagtccgcagaacggtcagagcccagaacctaaactcatggcctaccttgcagacagtgagggcggcctgtatgactggcgggggttcctctaatttccattgcagcagccgggcagtcagggggtttcctggagcctgttcagtggaagtgacaccgtttctatcctaaaatcttcttgagctatagtttgagggcgttaaggcacacaagatgcccgcgcccacataataggcgtccgttgaagagacgaggtggaaaaaggtttctttaccacagcggggtggcgactttcaactcgcggctgttacttggggggcgtgagcacttacacgtcatgtctaggtttcgccctccagagcgtctgtggggtgccctgtgacacggaaaatctagaagaaatacacgtggacacgcacaaaagacttctgggaaagagccagcttgtctgtctagattatcagctttatcattttgcatagaacaactcaaccaaggtgtggaggacaggaaggtggacccctggctacgtgtgcggaattctgtctcgcgaaaggtcgttcaagagggggcacggcggagcactgatgacaagcaggcatagagactgaacagaagtacttgagccaaggaacttggccggcgtttacagctgaacacagtccggcagcattccaagataacctggcggatatcaga

SEQ ID NO: 1566 - DNA, 4205 bp, Toxoplasma gondii
  source 1..4205: mol_type = genomic DNA
tagagaagtcagacgacgtacgaagacaggagaaggccgaagagaacagaagaggaaagaaaagccgggtggaacggggagactcggagagcaagcaggcgacgaaaacggtttgcactgaagaagagaaagacaaatgcatgcaaaggatgtgcgaaagtgaaggtgaatttccggagtggacgcagaggacaaagctttctcaggaaaagttcaagtctcggacaaggagaggagcaggcaaggcgacgcgacagccagcaaccggtcagctgtatgagaacgatacagagagcgaggacagttgttggcgagttgcggtcgcgcggcagttgtctcacgtcctctgaaacgctttgacgcgctcgcgaggtgaatttctcctgagattcgccgcagaaaagtcagcggtccggactttgttacgtcgcagaaaactcggtctattgaggcgctgaacgtctcgcacactgctcagccttctcctcgccttttctttcttctttcggagcttttttcgctgttctctggccgtctgtttcatcaagaagcgaacccatcaggagtctgaaaaaaaacaattttcggtccccttgctgccctgcggctggtccagacgcttgcaaagaacttctccggggaacttgtgcgcgcgtcagttcgctctgggcagatcatgtagaacggggagagaagcctcactgcgaggcgagaaaaacgaggccagaaagagtctctaagaaggcgaagcgggagacgaacaagcaggcagcaccggccgagacagggaggccgagcatggaccgcgagaggaaaacgacgaggggaagaggcgcagagcaacagctggctgcggagaaagatgaatgcgcaggcatcgcagagccgaccttgcagaaggaggaaaaaggaaacttagggagcgcaaaatccaaactttctcccctccctctcgcgtgcgcttgtcgagaggtgagggtgacgaggtgaacgagcagcagaacgaaggcgccttcgcagaaacacacacaaaaaaaacgaggacatgcgcaattcgacgaaaagaaaaagtcacagtcgaccttcttgcgacacgggccgcgagctaccggccagacgaagcgaaagtgcatgcgtgggttgagaaaaaaggccggaccgtccgtcgtcctcaaaaaacctgagtgatggctggcgcacgacgaagatctctccaacttcgaggtgtctggcaacaagcgaattccccgaaacgctacataaaaaataaactgtcacatgcacatgccgctcacactctaacagaaattcgcagacggaacctcagccacatacacatgcacatgaacggctcggctgcatgtgtcgcactgcggcccaaatacactttgtatatatacagacatacatgtctttagtggtggtacggcaaccagcgcgatgagatgacgcgtggaaacttttcactcgcaggtgttgcaggaaatcaacgacgtcgaatctggtcaagatccacacttgcctcctcgatgaaagtccagtgggtccttcccgtagaccttaaacgctcttgaacagatacgtataaatttgtgcacgcatcaggatgggcaaacacacagcgactcatctgtggtggtgtgagcagggaagtgaagttcctgtgaagcgtttacgtcgaaatcaggtgtatgtacaccggactgtcgccaccgccagacggccgagcgcgaaacagacagaagcaacgcctcgacgcttcgttttccgcgcatttcctttcgctccgagatccttttcgaacccgcacgttcgtctttcactgctcctccacggcctgaattgcgaaaaagcgttcactgctccggcaacttcgcccggtttccagttcctggacagtctggcgtcgccgtgcacagaccagcgtcctctacacaacaagacgcagcgaaaaggcgcccctgagaccacaaaacgtacagatagcaatctccgaagatacaagacaccaaacagtcagttaagagtgcaaaacaaacgtgtgtttttccgagcttcatggagggacctgtgtttctacgaaggcgcagagacgtttttctctttgcttccattgtgtgacagaaacagtacacagtcagagagcgtcagaaagtgatgcagaaccgcgcgacaattgtcacaagaatctgtggaaccggtttagatacagactttgttcgtcattttcagcgtctaggcgtgtacttctcgactcctgcaagcagtattattccaccaaatttgctctcttccttattcgcttagatactgactttcctttgttaccggatacgttctatgcttgttctgaacaagcactgtcagacgatgcacgagagttgcatcaagttcttggcctggacgtgaggaaccgctcttaaggagagcggttccttcacttaggcaacacgacctcaggtggcgtcaacaccgcacggtggtggagagagaaaaggtattcgcacgaggtactgtagatgctttaccttttacgcgatggagacagtggggaagagaggagagaaaggcggaggaaggtgagagacagactaatggcgagaagcgaaactgagaggaagaagagaggagagaagtagaaagaggaagagcaaaaaggttcttcttaaatcaaataaaagatgtcaaactgagtctgtctgagtttcactccaactcttccagctcacgataactcgttcaggtttctttgttcgactcttgtccttcctcgcctttcttttttctgagagaacgggaggcgtttctcttctgcaattcctcgctctgcgtctgacagagagacaacgttcattcttctcgcggatccacgaacttgttttcttgaaagagaagcgagtgttcttctctgcatgcatctgcacttgaagcatcgagctaaaggtgtctctgcatctgtatgcataagccggaaatgcgtatgtgttggagtacagagacggcccattctcagagatgtaggtatatatatacacatgcgtatagttgtcagtgctcactgctactttcctcctgcgcacatggatacgcataggcatactcacatacacgagctgctctaagcgaacgaatctatgcgtataaaggaagcgttgtattgtatgaaattggcaatcgacacaagtacatacgcatattatatatatctatctatctatatatatatataggatattatatataaatagatattacagatattatatatatttatatatagggaagtcgggcggctgtctctgtctgcacatatgtgtgttgcacttgtctatttgtcttctttcttggagagaaatgcattgcttggccttcgcgtttcctgttttctttcagaaattcgaaagaaaaacctttttctggtagtgagagaagaacgcggcaattcgagagagacgctggtggcgtcgggggcgcggggggaggactgaccggcctctggtgtgttgccgcgaggcgagagtgcaccctttttttccgtgagaaaacctggttttctatcgcggcccaaaagtggatttgctgttcgctgcgtgcttgattctcttttcttctttgtgtttctctttcctcccggaaggttgctctccagccggtgtgagtgtgtgtgtgtgtctctagaggattctccatatctgtctctcacgctccggtggccgtttttcgtctgtcttctgcccgtttccctgaaaagacggacagagtgttgcagtctcgttctctgctgtgtttcttcaggcgaagtcgcttgtatctcggatttcgcggaagttctctccggatgcactcctgcttttctgcgtttctctagcagagcaaacagacgacgacccgcacagcgcgacacggcagagctgcggcggaacaagtcttgctcctgagtcgctctgaaggcgaaaaaagtgacgtgcatgcatcttcgtcagacacaagcaacgtccgattttccaccctctcaaagcgactctctgcgcgccggaacctctcgccgcctgctggtttgcccttcgcatctcgaccttctgtctcggcgcgtaaagagccttttctgctctcgtccttcttcgccttcttcgttcttctggcctcttcctcttgtaaattctgtcacctgttcccccaaagtgtctgcctgcgctctccagaaa

SEQ ID NO: 1567 - DNA, 3380 bp, Toxoplasma gondii
  source 1..3380: mol_type = genomic DNA
tattcgtttctgctgcgaatgtgtatcgccggagtcatgtgtataaaaacaatcatatatatgcatatatatatatatatatgtcagtgtgggtatgcatgtatatatttatatattaagttggtgtttgggtctggggatgtgttccgtgttttctgtacgatttgtgttcgctgatcttgtttcgctgtacatgagctctgttcattcttgtcaaagaggattaatcccaatttcctccaggttccgcacattcactgtcgagtcgacggtcacgaagtcacttcccttccgcatagttttctgcggcgctctaaatcgcaaacgcgagccggagcactcgatgagaggagcgaggacaggtgaattgctccagtgtttcgtcgcctttcctgcctccactttctcttgtgtcagtcctttctctattccgtccgccctttctcctctgaacctcaacacgcgcactcgcatctatttatatctacatacatttggagtgagcaaagtgcttggaacgcggggtagcaaatgcagttcgcaatatcagcagatgtaggacatatctgagcaggcgggctatgctctcaccaagtgatcgaagagtaaatgcgtctctgcacagatttagggatttgtaaatagccagcgcataagaaaaagtctgcgtaaagcgtgagtgagaggaaagcctgagcgcgacctgtcaacaatcgacactggtacctcaccatgttgtctggtctgtttagtggaacgccgagtgtcgaacacgggaatcttgtttcagttccggaagtggcgacctacagagaattcttttctagacgagaagggaggctccagagagaaatgaggcgtttgaacactctccttgtgcttggggagtctgatttgtcgctatcagcttttagtcatctttcagttctacctttgaacctgtagctcttagtgtaaattgatgattcaattcgaaggcacattactcaattgtgtttgatgtcaaaccgatcgctcggtgcacgttatctgttagaaaagctccacttccctgtttacgttagcttctttgcgacgaacgtcttcaacagcgagcgcacctgttcgtcgcagatcttctccagatcgactgggcggctcaacagccaagatacatattcggaacgttcgtttaggtaaacatgcatgcattcgtgtgtgatttatgtggtcgtctgtatatttgcgcgtaagtacctggaactgtactcgcacatacaaaaaaaacatttttgactctatttgtagagatacgtgtgtgaccgtgtggagagcgaccgacgggggacggcgcagatgccttgccagttttgactgcttttaaagaactttggaatttgttagatcggacgactgcagttcaacttccccttcatctggaagctgacgcatcccccaggcttttattcaactcaaattcgggtcttcctttctgtcgagtctcgttcaccgtgcatgccgggtgacttacgctaagatttttactagtggggaacatagatgccaagaccgcttcaagaggcgtggattcttgtgcaagaggtaaatcctacatctaatgcccgacatctcacatgttttgtcgatctgctgcgtgcagacgtaaaatagaaaggcgcgctttcatgtcgagccatgcacgagcagcagttgacacacagtccacttttcaggacacggcagcccgcaaccacgagacggcggccattcatgtggggtgagactgtgggggccctcgcctgtttgcggagaattattccaagggatttgcgcgagtcgacaggccagcagaaagaggtgtttccaagtttctgaccttccagcaaagattctgctcgccgacaaagcgtcgcggcccggacgcgatcggcagcggtcccgctccagaggaacggctgcaggtatctgttttccaccccctcgtttttccgttttcgcgtttccccccgattccgtagaacgtttcgcgggacggagacacagctgcccgtgtcgtgctcggccgacctcttgcctgtgaaaagcgttttcgtcttgttctttctagcgttcacgattcagcgttatcgaagaaaagctatccttgttgcgcacatgaacactggagagaagcacccgcacggatgaagcgccttttcctcacactccaagcgcttcctcaaacacacaagaaaacactcaaggggaagagctgtgtggtgggtggctttgtatcgtgggcactcgctctatcgtgagaagttcgtagacttcgctgatagaatgacggctcgatcttcagcgcgtgactccagaaagaaaagaatcaaccgtcccttgaaagcatgtggcacacaaacatcgcaacaaaacacctggactacgaaggtaaagaagcaattccctaggcaagcagtttttttccatctttcacctttcctctgtagaaagaactacaaacagttgcttccctacaaaggggagaccggcgcgaaacgggcacatttgagaatcatggatgaaagcatttcactgtacgcgttccaacagtttcatcccttaggggagagacatcgatacacagagaaactacgtaagaaatttggcaaatgaataaaacatttcgctcattcaacggatcacgcatctatacacatcgagagtgacaaatagaatgattcacaggtatacgtggatgtgtcaagctacatacaaatatatctatagtgttctagctcagactagagctattcatgtataaagatgttaaacaaaatccacgaaaaaaaactgaatcagcgcgaaacgtgtcgtgtgtttacggggcatctctgttgtcattcttcctgtgtgtgggcaccgagaaggttgacctctgcgatctataaccggttggcgaggcgctgtgctcgtttgtttcacctcagtttcacgctgccgtaaacggcgcttcacccgttagtcgtctctcgagttttatcctaaagatccagttttcgaggggatcctctgcattgcgaaatgagttcgaagcccctgcagggtttctaggtgtctcgtcagtgctgtaatcgtgttttccgtgccagcgccgctgccccttaaatgtgtcaagccttgcccctcctttttctttgctataacgagccatcaactctgtgtctccacgtttcaagacttttcacgctgtcgcttcttgtggactccaaaggacttttgccaaagtgggccttacctttcttgtcttagagagcaggtcctcagctttcgggctctcccttctttgacgtttctgcctttcttctacctcgttgactcgcagtgcagctccctgtctaattttccaagcacagtccacaaaa

SEQ ID NO: 1568 - DNA, 2347 bp, Toxoplasma gondii
  source 1..2347: mol_type = genomic DNA
acgtacgctaaatccagttgagattcctgaacgtatgtgcctatatgcacctcttagtgaatgcagcgacatgcatgtaaaagcagagccgccctgtatacgtgtgctgttcgtcctccgtgtacacatgtgcacttccggtcgtctgggaaaacgctactcatttcgcgcgcctgtttcgctgagttgagttcagcgcatcttaccctgtttgggatcgggtgtgatgagcttgctcatctttttctcgcacttttcgcagggcatcttgagggtggatacatgaccagcgctgcggactgaagacatgcatcccgactcacacaggcactctagaggtgcaaagcacgctttccagtccaagtgtatttcacaatgcactcgccgtggtagacgtcctcgtgaacggaataattagcagtctgctgccaggggaaaaacaggagaaaagcagccacagtgcacacatacgatgcaaagttcgacgtgggagaccgaaaagaggagacaagcgtgagaaggagtagaggtcgacgtaaccagcagtcaattctcgaaggtcacccgtccgtagtgccgcgaagaatgagggctcgagcgcagctaacaagaacatgtaacctaatgaacccacctcacggtcctgatttaacgcaaagggtcggctcaaacggataggcgcctcttgaaaacacagagtgcctggcggcgcgaggggtcactctctacgttacagagagaaataatgcaaaccaatcagggggtttacagtcttgaggaaacatcgtgggatggtacgagaagtgactgctcagctaacatcgagtgttttcagtggagcagggcagaaacgtcactcatgaaaaagaagtcgttccttcaggttcgcagacgatcagagtgcaaggagtgagccataaagcgggggcaggctgaactcgcggacacaaacagtctctgcacttggtggaaggagaaaagttcaccaacttcctcagaatcatggatgtggaaaactctgctgggaaaatgtgaatttcagggcaactgaagaccaaccaccgtaccgagaaagcagatttgcgggtccgcggccggccaccgagtgaactcggaatcttttacggcagtctgttttcgataagatgctcatatacgtcaagacagtgctggaggagcaggaaccgatatatccgatagagggaaaaactgttttgtgctggacagaatgccactttcttgatgaggggtcaaggagctcgtgggccaacgggtgccttgagtgtgaaaagccagtcgcggtagaagcaatgcggacagctgagcaatgtcattcctttttctgcactttcagatgtcgtgagaatatacaagacgacttccacagaatccgttagacacagggtacacagaaagcccgttatcacttcactcccttgctccaaaaagagtaggtttctcctgtcgacttgctcgttgcagagctcaaattggtggaggctgtctttggtgattcatctcagttttctcatgcgcttgtctgcccgtcctgtatcttttctaaagacagtggtcactagatcttcccttttccccttacggtacatcttctgtttccttggtactggctgtatttttttcattggatccaaaactcatttctcaggtttttcgggagttcttgtgtcctctctacaagacgtgcaacgatcgcttctcggttcctaccctgggccctctcccgccctgcggtccagcgcagcattgcctctctagggagcattaatgaatgaaattaaccaggaatcgccagtcttttgcgcgtcgtttttactctgttctcttttggtgtacacatctttgcgttcgtaacaggatttaattttcctgcagctgttgctcgctcggtgagaaacgggccgtctcaagccgagtgctggttttttaccaacaaaatatttgtaggacaatcccgctttttcgaatcttcgtgtagcttgcgcaacttaactccccttcaacccatttgacggacgagatcccctgtgtccttccgagcggcaacccccttgctcgaagccacgctctctcgtctgccctcccagtgtaaaataagaggcgtgtattggcttcgcctcttttcccaaacgcacctttcctctccatttgcttgctcgtctggcgtgtcgaaatcaattcgcctctttccttcactcagaatttcctcctcattttcgcgcccaaggctgctcgcttgcctgagctgtctttgcttcggttcgccgtccgtttctgcggcttctctgccttctacatttggcctttttttgtcgagcgtgttccaaaa

SEQ ID NO: 1569 - DNA, 1699 bp, Toxoplasma gondii
  source 1..1699: mol_type = genomic DNA
tttctgttttgtgtcgccgagcctttcatcttcccagcttgacgacggcgacagcttgagtcactttctctctgaagcctgccgtgacgcgtggaaccggcgcccttcggtgcatctcgagatgcttgcagacttgcagacttcggtaccaagcaatgcctgtgttctgcatcaagttcatgcacagcgcagtcttcttcccctccagcagcagtcctttgctctcctgcagacgccgagtcgagacacagatccagacgcgaacctcgcttagcaccgaaccgacgcagacatgcagccaaaacagagaggtcgacgcccagccgcattcgttcgccggtctccccttcaaactctatgtggagacacacacaactagatgcatgcacaagcagacgcatgcacaagcagatgcatgcacaagcagacgcatgcgcgtgagtacgcgacgcagagtccctgatacgcagatccagcttctgcagaggcctgcccacagctgtactccccctcgggacgtctctgtctgctttctgcatctttacctctcccttcctgtatcttcactactctcagtctctcgctctatttatctatctggacgtttagatattgacaaatctacaactatatacaaatatatcgatatatacagagagagatacacagatatgtgcatgtagagaggaagacgaagagaggaaataaagtagagacgcggcagggaggataaataggttcagaacccccagaggaaaaggggagaaaaagtttaccttcatttttcgggcgttctttgccgcgagctttgtctgcttcttcgcctggcgatattggtcactctgcagcagggaacagggacagcgaacagcttttcagaacgcgagaaaggaggtgcaaaaagaagcgcagtacacgaggaagaagcgcagaagaaagtcaccgaaagcaggaggccctcttgcaggagacgagaggactgcagccggaaagccttctggagaggaggcgctggaagagctggacgatttgtctctcgcgaccgtttctctcggcgagaggaactcacctgcttcactccatacggcactcgcattttgtaggtgatggctgaaagccaccgtgaaagaaacatcttgtctcggagagagaaaagaaccgccgttatcgccttccgacgaaagttggctcgaaacgccgtctcctggactgtgcttctcagcgatttaaattcgagagaagaagcgcagcgcctccgacgccgacgagacgaggggggcaaggcgcggaagcgagaaggaaactccaaacgcaaacgtggactgacggagcgtcactgcccaaaagaagcggcaaagagatacacctttcgggcgctgatgaagagttcctaaagcagctggtacaacgagagaagcagttgtctctgaggaaactttcaaggcaagagacgatctcttgtcaacaggaagttttctttgtcagtggcgccctcccccgtctgagtcgaccccagggtccctccctgaggactgaccatactcacactcgttcctttcggaatttgttctgaatcgcgattgacagaccaaagagaaataaacggcgaaactccgcggagaagcgaggaaagtcgaaaaaaacaggacgcctgcccgcctcgcgtgagaaaagccggacgcgcgctgttctcgagaca

SEQ ID NO: 1570 - DNA, 4372 bp, Toxoplasma gondii
  source 1..4372: mol_type = genomic DNA
actttgaaagaactgttcgtgaaggtgtgagtctgcaaggctcgacgggtgaacctccaggtgcccctgtgtggaggaaagcgtacctgccggaaccgggtcctcaatggggacgttgtacacgatctgtggtccactctgagtgttccccatcttgtcttagccgctatctgagacaaaatgcgaggaactgaggaaacggaggttgcaccggaagtcgttcttcctcgaagtcgacaggtttcggaaacaacacagtacgcagttgagaaacactctctccttggcgagacagcacacacaggcgacacatgaccgacaagatccggtagaaaaaggtactccctgcatcgggaataagcagagaaacaggttttcacatgaggaactggcgacacaccgtgtgcacaagaacgcctctcgtgtcgcgcgtccagactcagcaggcaagaaaagatctacactcagagtcagcgtacaacggggatttttaacgcgaatccacttcgttcgcgccttttgcaggacgaaaacctacgcgtttgctgcggaggatctgtacaacacaacctaatgagatgtgaaaaggcaagacagcccacagttctactttcgtctggcacacacgggagatgaaggaaccgaaacgggaagagagagtggtaaaagagcgcgggacgcagtgcagggggaaccgagaaagaaacgacggaccggacgcgtaacgcaagagccacagatcatcggtacttcctcgacggtgcagtgtacggatacctgggcaaccgccagaaaaacgaacgaagccagactggcaattccgaacggacgggacgaacagctgggccgaaaccagagtttggccgttttctccacgaccacctttgcgtctttgtgtgctggttcgccggtattcgttgtcccttcccctcgtttaccgtggacacacagtcgccaggaaaacgcttaccacagaaaaaggtcccttcgagggagaacaggaggaatgctgagatgccagtccgaggcgcagcgatgcctgagaaaagtgccccgagagacaaggaccaggaagaaacgagagacggaaggagaaacggtactcgagaaccaggagacgccccggggaagacagcgccagggaacgcgatctgttttcacacgtgcgagaacgcagacgactaaaccgtatccccagactgggtgcgctaaactgggagagagctgtctccccgggaaagaacctttacgggcatctgtcggctcagaaggaacaaccaagactggacaaaagcagaagaatctgacgaaaagaaggcgaatcgggtgggccgtctccgtcgaaagcagtgctgaaccagatccacaaaagccaggttgcacgaggcacgaatccgacgtcgtcctggttgggaaaaaaagcacagccacctggaaatggcgatattgcccctcttcctgcaagaatgagcccccttttccaaacgaaaagcgtttcccgaaacttcttttggccaaggactcgcatctgtgcagcccctgctctccaccatgcggttcgctgtcactcgcgcgacatcgcagctgcatatccgcggccctgttccacctctccgcggtcacgtgtgtcacctgtcagtggcgccagcaagacacgtgcaacgtagaggggcccaaccagaacaaggagcttctccggaagtttcttcagctgacagtctctctgcagaaagaggtttggcgttccggcccggcttctcaaggagctggtccgctctgcaggcaaactaccgatgcagcgataccatactcttgcggtgaccccacatttcgccacatgtctgtctcacgatgttcaggaaaaaacacctgttcttctcaatcacggtgcgtctgaggaatcctgcgttcttctctcgggaaggccgtaccactttatgcgttacttagaaaactgtgcggcaactacacaccgccggggaactgcggtagggagggtgcagaattggaactggtgttgttcactcgcattcgaaatcaaacatgtttgcggtgttctgcgaagttgcctctaatgacttagatacagtgaatctgttcaactgaaatggcaaaattactggaggaaattcagcactcaaatgcaggagacccagcacagacgccttgccccatttgagggtcaccgtgtggtgctggcgcattctcattccagcctgtgagaggagcgacacgaatacactttgtgaggagcagtgaccgagcaattaggctagagaatccgtcggagtctctgagagtctaatatcttccttacagcccttgtcatctgcacccgtaggccaagccagatgtgaactgcggtggaaatctggcggtgtctgttgttggcggaaaccgtaaatttggttcaaaggaatcgctgggatacagaagaaacatgttgggagtttccttttcgtgcagggttgccattttcaacagacttcgtgcaatctactactaggcgtcgggaattcctgctgcacaaaaggggtgtgtggcacactcgaaaaacccatcgtcgacgcctcaattcttccgaattccagcacatctgtgcgacagcaaggcactggaatttggcttcgcagtcggtcgctgcaactagcacagtctcgcgaaaaagtgacccgcgaatctaaacggcgcgtgtgcctttcttcgtccaagcagtatcttgtttccctgaaaggctggatgtgttgctgccaccacgttgtagctggctggttatatgtggacatacgatgctggaaagaggggacacctatttgcagctgggaggtgagcacgcgctgaaatgtttcacacagtcctggccctttttgcttcgaagtgctcattctgtttgacagcgcaggaagatcaggacatcagtgtcgtttcgacttgcgtttcttcccgcggctcgggtaacgcccaatcccggtatcccgttaaggcatcttcacttgaaaccacactttgtttgcccacacgcaattcctacattctgacaccataagttcaaattaacggaaaatccaatcctatctgttgcacatctagatcgagcatgtagctgcagagaacgataaggtgcatttgttgaacgcccttttgcaaaatgttccacggcgatactcccattttcctctcctctcatggcttcctcttcgttatctttttatatatacaatgccaggcccgtgtaaaatcttgagttcgacaagccgaactgaagtggtgaaactattaaaaaacaacgagtgtgttacctcgtgctcaggatgggcagcacaccaccaatcagtacagtaagcctggtatcgtatacttccgagacagaggcagcgtcatcgcggttctaccccttttgtccctttcgttgagccacaaaaatccatggcgaaaaggcgcgtcccgaatgtacacacccttgtgcatgtaacagtgatgccaaccggcctcgtgaaaacgggcaaaaaacaagtgttttgaaaggtcgaaaacatgcacagaagttgcaggacttcgaccgtagttattccgcaggcttcgtaccactcatgagttcctcactctccaggacgaatgcagaaactctctggttttaatgattgcttgtcatgcaagtcgacaaaacccccttgacaacgaagcgaagtcagtagcgttaccacagtattgcaaggaccacgcatttaagcaagattccacgtcgtcggtgcattgaaaaatatagtgcactgaggtctggctactgtctcctcactggtggctagtggaactacgagtacaacagacaataccccctcatcttttgcagtcaaccgtcgcctcccaacctctgctgctggcggcttgtactgtcggatttaccccaccttggagcgacagactcgctcattaatttgttttctatcgaatcgatggtcatttgctattccctctgtctgtgttgggtttctgttttgacttcggtgcgttcaccaaaccgcgacaaggctcgtctcccggttgccgatacgagacatgccctcttttcgcagtggcggggaaaagtttgcgtcgagctagcagctggttaattcccctggcgatcttcgcgtctctcgagccttcctgcgctgcttttccgtgttttctccaccctcatcaaggcggcaaagtccactcctagtgtttttctctctccccttgccacagatttcacatcgtcccgaaacgcgctggcgggtgcttggccgaaactggaagcggcgtgtcaattcactttccggcggcttccgtggttttttttctctgcatttgtgggaagattttcttgtcggcttcttgtccgacgaga

SEQ ID NO: 1571 - DNA, 1936 bp, Toxoplasma gondii
  source 1..1936: mol_type = genomic DNA
ttcctacagaccatgcttgtcttccttggattctggcaagcatcagatgtggcatcttcccgacagagaagagctgactctccaaaccgcctcaaagtctatgcagacccttcacataagaggctcacgattttgggccaggtagaaacacgacacagcgatgactctgcaccgcggtgtcggtgaaaaccccatggcatgagaccacaccaaagaagagagagtcacccaagtagcacagttttatcggaaacgtcccggatgacgccagtccctgttcctgaagtgctcgggcctcctacaccgaccatcacaaggcttatcgcttatcgccctacgagacctcgctcttcgctatgcacgcagagctgccttgccagctggacaagttctgtgtaccgacctacctccttcacccagtccttgaggtcaacagcctcattcagttcctgattgaaagagaggaatttggctgccattttcccgaggaactaaaagaaatttaggagagggcactcttcttctaccaggtggaagtaggcgcctagagacggtagacgattggaacttgacaaagttccgcagtgagtcacagcgatattagacgtttacaccccggaaaaaagactcgaagcaggacgacggcgcctgtgggcgtcgggatccactacagtcgattcgaacacgttgaagccttgtcgaggacaagtggcaacgaagaaagacactccaaatcagcattcagcagcaaaacgtcgtcctgaacagctgctcggttgaaacactgaactgtgtgacacgcccaagcctcggactatatgctctcggcgttgtcgcgctcagcctccacgcgactctgagaagcacagagaaggagcaattccaaatgaattgccagacaagcgaaagaacaggacaggagctaccgaagcgagggagggggtcggagaactcccaagcagacggaagtcgattgacgccaaaaaaaaaacacgcggtcccgttcgcgctgcgacactgtaccgatcaaaatgcacgtcgaagaaaccagctcccgctacagcacacgccgctacccccgataaacgagaaaaaagaacatgggggttcactgacatgcatcttctcaaacgtaacacaacagcacgacagattttttgctcccttcaacgatgcagctcgtcggccgctgtcctccagagtttgtgcgcagctccggacgagacctcggcctgatgttcaagatgaccttcgaaaaagcggtctctgtgctttttctctcgcttggcccccccatccccccacggcggaggcgccactaggatgctgataccacagtcagccagcgaccaccttccaggccttcctttttctcgctggtgcatgcatgcagctttgagcgagaccgatcctacagtcaagtattgccaacaggggcaatggcaggaggcccgtcccaaacgcctcaatctaaaaagaaaggcaaactcgaatttgcttcgcttaggcacagggacaagctgtacggcgggatctgtcttcccaaacgttgtctgctgtaccgcccttgttgcgacagcgtatccaattccgcgatgtacggagaaccagcgctcgtctgcgtgagcatgttaaccggcttcgcttacctcgttccctctcttgtacgctgatgtgaagattccgggtctctcgggatggaaaggtgttgaacgaagttgtctccaacggggcagtgggttgctcaaacagataaaggtacaagacaatacttccgcccgccgcgaaaatgcccctccagcactagccaacacgcgatcgattatgtctcctgtcagcgtttctatgatgtcaaagactgaagcacaattgagtctgttctgaagcccatcttttccagcggtgcttcgacgcctctgacgaagtgtctgctgta

SEQ ID NO: 1572 - DNA, 2097 bp, Toxoplasma gondii
  source 1..2097: mol_type = genomic DNA
atctctaatggtggttcggaagagtcactcaagaaagatgtgaccctgtttatcatttcgaacggtcgctcacgggggccaacgccagcagaatcagttacgatttctgtacattcacacgtacacataggtctgtacttatctactatatccataaatatatatacatatatacacatttatatctatatatatctaaatctatctatgtatctctatgcatctttatatatatatatatatgtaaatatatgcgtctatatctgtctagtacatatctatttatacgtgtatgtggtaacacataaatgcgtgcgtttgttgaagggatttgtatttccatgtctttgccgacttttaggggggcattctttaggagagacggtgacgagcagcgatggccctgtttcgattagaacgaaagctgaagaaacgcaggagctcccgcgtcgagagtgttgggtgccctgagacttgcctcggagttttggaaggaaagacaattcaagacctggaagcctccaggaaaagcggtccccacagccagaaaagaggcacacaggttaaagagaacgggtcggcagagacacagatataatttcaggagacaggaagaggaagacctaagcatgcagatcgccaggtagacatgaagaggaagacctaagcctacagatcgccaggtagacatgaagtggaagacctaagcctacagaaatcgaggcagatatggagaggacgacacagatatgaagacgaatgcgtaaatggatacaggaatagacagctagatgcatgtcgatggttcggcgtccataggtagagactgtagaagagagagccactcagcttgaaaaagacctgtccgtaaacgaggagacagcacaccttgtctccagttgatgcggtttacgtcaaactcctgctttaagtttccctatatcctcgtgtattctcgcgaggcatctgtggaagaagatgaaacaagtatttctctatcgaaaaacaaaggtggagcacgaactttcgctgggtctgcgtcggagccaggcgtgtcttcggtcttgccttctgttcacttgtctctgctttctttatctgcattcgtcttttcctctccactcaaaaggacttgtctcctttcagcggaagtttgaacgggcgagtctgcggatcgaatcgtcctcaaaaacgtctccacctgttcatcgggacgacgaaaaaaacgcggccatttacgcctgtcacaactgcagcgttgcaacgctggagctcattcctttctctgcaagaatcctctcaaatgcgttgcggctgagtcgcaatcaacctttcttttcgtcaagaagcgtcactttgttttcatcgttgtcagaagtacaggtgccggctcgaggggggagtctgtaggcggtcgcggcgttcgactgcgcgccgctgtctgcatgcacatcgagaaactcgcggttgaaccttcggtggaaatctctcggaaatcccaagaacgcaggagtccttaaacacacgagagcatcctcagtttctcagttgctcgtctttacggctctcctcgctttttactcagaacgaacgcggtcggaaagaacgcgactggccgagcaggggggagacagaggaagatcggaagacaccgagtgtgttgatgatgtatttcatggaaggcgaggagacacagaaacgagcaacgagcaactcaggaagaaagaacatactttctcttcactttcacctgcgttctctctgctggcgtcgctccgagcagacttttttgcgcctgtttttccttctctgttttcaccgtctcctcgaggaccgggtctcgtgtctctctgcaaattaaaaaacgacaagtcaccttttcctccgtttcctgctcccaatttccttctcctctcgccctaagaagaacaatttctcagcgcacacaacgcacatcaatcagccttttccgtctctccaccgatcctttcttctctcttctcttctctcttccctcctttctttctttccttgcctttgtctctgcacgaagggaagccaaagttcttcgcagtctcttctttcctctccgcgaga

SEQ ID NO: 1573 - DNA, 2529 bp, Toxoplasma gondii
  source 1..2529: mol_type = genomic DNA
aaggagtgcaagcaggttgccttccaggttgataagacctgctacaaggccgtgccaactcaggaagcatacaagtgctccaagactgtgtttgagaaccagtgtaccacccagtcgtacacggttcccaagacttgctataaggatcacgtaaaacagcaggcatatccgtgcatggaaaccaagtacaggacccagtgcaaaacgaagaaggcagtggcaccccctcctcccgttatgttgtctaagaagggcatgtaaccgattccttgattatttgacctgtgcacaagaagggcatgtaattgtgtcgaactgcattatctccattgtgtgtctgcgtaagttgatgtggtctcgttgcgccttctgcacggtgcttgtgattcacaactcaggtcccttcagggatgtaaaacaggtttaatgatttctgctttcaaggtcggagacggtcatcgagctcgttcttgatggcggctgcgcaccgcagtttccttcgcaaaatagttttttaccaggaccgggcgaaccatggcatgagcaagtggtgtgaggcacgtgataatgagtcgtagcaggacaggcagttgcgtgcaggcagacagtgattatgtccccatagcacagacgatagccggcttcataagcacagcaagcacagtatggaactcagaccaagaggcatcaaccggttgtcagcagttggtttcaagatgcgttttatggctgctcgacagggactaaaggaagtcaggaaagaagcgggactggaacttccgttacaggctgtctagcacacgcatcagaagacttcgtcagccagggcgacagcctgccaccactgtgagaggttctttgattccctttccagacttttcgcatgcccctcaaaaggaaatttgcgccttttcttttttccattagtggggcatcctctgtattcactggccacgttaagaaaaggaggtatcttaacagattccctggaatcttgggctacccgtactccgcatggctgacgggacgaacctacgccgtgctcgcccaaataagacttggcgttgtggctggtcaaaggttttcgatacctcgaatgtttgagtagcacgggtgtactgctactcccggtagtacccttttaggttattcctaagaagtaccttgcatttgcgacaagagatcgggtgatgtggtgtctatgaacaggatcatcttgtgacaaaaatatttcaaagcagtgaagtcaagaatagtttaagctgaagatgatgatgctgccgattgcacaaggagacacggcagtgtccggagtgaacggcttcgaaaaaacagttacagcgaaacgaaggccacaatttaggcatgagaggccgaggggcttgtgtgtgtcgaactggccaatcgcgatacatcaatcatgctgtgtatgcctttccggagccatccgtttcaaaaaatagaggtgtcctggcatgtatcccttgaaaagaatcccggtggttagaacaactatgctttcgatatttgtaggtagtagagctcgttacgctgccggacgacgcgagaagtggctgttgctcatccgccacgcgagtgacgcatttctggactgagatcaaaggtagatcagaaccaggttagagcacagcaagtctctggaggagatggaaatggaacacaaggaaaatccttttgttgctggtttgatgtcatcctacatgatgccacatttgtgtatgcgcattcactttgtaccctcttcgaaggctaaatctaggcgtacgtgcttgctggtctgtgaggcatggcataatcggagaggttctgtttctccgacgacatcaagcgttctcccagcgcaggagactgggtgcatgcggagatagacgtggctccatgcatgttttcggaaacaatggaccacgctaataccaacttacggggggaacgacacccaaggaccctgttttcgaacaccagagcttcgacagacttgccccgagcatctggttcttccatttcctatctgcttcaagcgaccccgcgaaagctgtctcgttgcgtgtgcccatgtttgaagtcgacaaacgctgtccagcattgctagacccgtgataatgcaaacatattcatttggcatgtattccaatgctgattgtaatcgtaaagggcacttgtctcggtttctattccgaggcaactcaacgtcgtcctcaggagtgtctgacatcagacagtcaggtggcacagtcgaacctaccggggagacgaaccaccaagagtgagagacgtgagtgagtgggcagacttttcccttttttgtcaactacgaaattacattacgctgaccggcctgttttcctggtggaaaattaccgaacatcccctcggcaaaagctgtgctcctacctctggttgaaaaagaggcaacgggggactgcccttctaaacaaaccctgcatacgccataatttgaatgggcttaagcccagcgtgttcatctggactccacatttattataaaca

SEQ ID NO: 1574 - DNA, 1579 bp, Toxoplasma gondii
  source 1..1579: mol_type = genomic DNA
tttctccgccagttcgccgttccgagggattctcgacgaagtcgaagggggagagatgcagaggcgttcggcatgtctctgccgcagaaccatgggcgagtggagtgtgccggcgcccccacaggtttggcgcctgagaagacccgcgcagatgatggacggaagcctccgcgggggtggtgccaacagctgctgtggagaggagcgaagacttgcggtgatggcatcgctgcgcctccggagacactcgcgaaagcgggagagacgactcgttcgtcgtccctgagagccgcctgtcgctgcctgcgggggtcgaaaacaggcttgttcctcgtctaggaaaaagagcagaagaagcctgaacgctggccctcgacaacctcccagagcctgcctccacttgccacaggcgcggatccattggcgctgcctgtgacggttccctgcccagggaggcggcgccgccaaggaaacgcatgcagcccggtctggaagggagaaaagactccgggggacaagacagcatcgacgcaagtgcgacggctcaacaaatcgaagtgcagtcagcagttccgtcgcgccttggctgtagactgtggtcttctcgcgaggaaggacgaagagggagagagagaggacagggaggacgatggagaagcgagagagggggcgcgtcagtctagcgggggggaggggggggagcggcggcggcagggtcagacaggagcgtcgaaaacaaataagaaatcatctgcgaacgcgtcttggttggtccatgaagcgaggagctcgggaacgagggcaagacgagatgccatcaggactccctctgtccctagctcctcgtccaccgctctaaggacagagacgcccgatgtagagctctgtcttccgagagagtccccccgcccctacaggagcatcttcatatatgcgcatgcacatcgacatttatatttatacacagagggaggtgtagggagagtcagagaggtcggatgcagcagacggagagcaagtatcgcgtagttgtggttcccgttggcagcagtgcgcagcgagaaagcgaaggtaatcttgcaaaggacggtcacctggagttcgagaagcaagacggaagagcattgcggtctcgagcgagagcggaaaacaccgacagcaaaacggatgtcttccggttcgttgggccgttccgagcagacacaccagagggacttccgtaccagacaggttcgcgcgtggatttcccgatcgcaagttctgcacgcaactcatgtagaaagaagtagcagcgtaggccgatcgatgctgaagtcgaagaagcgcggaatttctcagagcccatgaagactcccgaaaagggtctctctgcgtagcagaccatgaacttgggtcgatctcggagttgaaagggagtccggcttccaaggagtgcacttcaaaaaacgagacgagacttccagaacagagtccagcgtttcaactcccgacggttttcacgggaaagcggccactctttgggcttgcagacatcgcgaacagatcgcatctaccgatcggacagaggcaggaattccga

SEQ ID NO: 1575 - DNA, 4118 bp, Toxoplasma gondii
  source 1..4118: mol_type = genomic DNA
cgtcacactgcgctcgtcaccgagtctggaaatcccagaagaagacggagttaaagggcgtccccttcctccgtcacttcctctgctccgacccgcggacgcgtcctcgcacttccttccgtgagacccatgacaagcaaaaaagaagggtgagacaaataccggtggggattctccactcggtaagtagtcatcgccatcccggtgctgtcggtctctcatatctgccttttgtgccgtgcattctccgtccacagtttcatgtggttcgcgcgtgctgtagaaaagcgcctgacgaatcgttgcgtctcttgtttctctgctgtcttgttcgcttcggtcttcgtcctccctctcgctcttccccgcgttcgcctcgcgatgacttccctcccttgtcttgtcatcgcgaaacgtgtctcggctttggtagtcgttgtgctggaaattcctcctggagtcacagatcaggtcgccattcaccccgctgctttcgtcctcctcttcttgcgtcgcctcgtgggttttctgtggaagtgtgactccccgcgaagagcgcgacacagaggaagttgtgcaagagagaaatgatctgtctgttggaggggcgtcagaggtgctggccagcgttagcgggtccccagagaaaggcattaagagcggtagcacttgcggtaagaggccgcaagtgacaacggtcgaaaaaggcaggaagaggagcacgtcgacagaaatagagaagggcggacaagagggaaaagattggagttccggggcggcagcgaaaagagcgttcctcaaagaggggatccgcggcgaacaaggtattccaaagagcggaggtgcagaagacgcacttgtgggaactgacgatgtcgggtaaaagccgtgagcggccaccggaggattcgaggaagaagagcggaggagcggaggctcgaagactgtggaagcagatgacattagcgaagatgaaggggcggaaagccgtgacgaaagaactgtttcgatagcagagcaaagccattctgcaaaaacgcccagtgtcgccgtctcctgtgccattcttaaagtgaaaaactacatctcaagtccagctgtagataccggcacgtgtgtctcgcatcaaaacggaagccgttcctccgcagcaagagcgaagatcgcgggccagaaaggaatgcagtgatgtttgcgaaaacgaatggaaactagcacgtacggcggttgtctgagagcacagttacaattagctcaacgcgatagaaccgccagcacggtcgccagtgattcgagtctggaaaaactcgcgaaagataagggactattaacaacggaaaactccagcactagtgcgaatgccaaaaatggctccagtccatgaacaatacgaaacgtgaatctacatggcttcctgtgaaaacacgcaggcacccttttcactctactaaaatccaacgcgggaaccgagtcgacgcattgtctgagaccaccctttgctacaggggaaaggaagcactgaaaacattccagcagtagttctcttctacgaaaggatatctgtgaaggtgtctctaaatggtgacgtttctttgcccagagaagctagaaaactgcaaactagcgagttcggatgagtcgccttggcgccgagcaaaaagctagacaagcagtgcgcatagctgacaaacgcttttccagtaacgcgacgtgtgctggagagacagaagcttcgagacaggaaccagaaaacaattatgtttcacaccattgcaaaacgccgaaggaaaaggcttacacgtgtatggctgtgtgcgctttcctctggaggtctcgtctctaactcggggggtaatacggataatacgctggattgggaacggtttctgtgccaggcgaagacaaagcatttctcctttcgcacagcaacacaatgaattcacaaaaagcgaggataattaaggacgtatcggaaacacacgattcttttgcaacagcctgcgagccgtgtccccggtgtaggaaaaagctgtgagggctcactctcgagcataacacagcctgtcaaggccctctaaaaatattgtagatgtcgcctgcatgaagccaaagggaatggatttgggctgggcataaaataggcaagaaaatgtccggctcaatccataaaaaatgcagcttcgtccacgtacgaattcgtcacattcttcagggcgatagaacgaaaacttctgcccaagagcggactgaaaatggaattcaaagaacaatgggagaagcatctgcattacaacgaaagcagctacgaagtctcttaggatcgatatcgtagcgataaggagcacgtgtgttgtgtatgatccgatagacagttctctcttaagtatggtgggacggaaccacagtataaataaacgaatgcgcgtacatggaaacaatgaacgaagtattgcggcaaagagatttgcttcttagtaatttcgctgcgttcgttttccgttgtaagttactttcccgaccaagtgactctgggtccactcttgatacttcgtaattgcttgagctcccgctgcagctaaccagtcttccagccttcaaacaaacatgactcctttgtcttcgacagcgggatgggagagtatgaaaaagttagactgacagagagtctgtcgttgctctatgtgtgtctacttttcgtccattgcaagaaacaaacgggcgaaacatagaaaactgccgtgtgggtacggaacgcctacagccttctcagcagcacggcttatacccttttgcagtagtgcaaacataccttaatctctgtatgctgtaagcatatcaaggaaattgaagagtgacgaaattatctttgtccatatacctatttaatgtttgtaaagttcatactcttaaccaggtccgcatacgcgcaacgatatataaaatgacggtacacacccgcagacctcgctcgacattctatttgccacatgccctgtgctcagctgcacattttaatatatttctattcatttatacacgtagttcctagctacaccttccgtataaagtatgtgaatcgtgcaggcgacggtcatctaccgacctacataacatccggtggatgctgaaacactcgggccgccactttgttcggaaaaattcggacgcttcgtgtttcaaaacgcattaacaaataagaaagtaaataaaaggccgcgatttagctgaaagcctctgatgatgcagctttgaagatggacaaaaaagtagacagatagagaagcggtatgtttcgtgcgggaggagctgttgccttgcattatggagagtagggactcccgtggtaaggagcactatcgcgaatggtaggtgaaatgaagaagaaaactaacgctgaaaactcctcctgttctgcctgtcttcccacatttcactggtgtttcgtttcttcccgagacacacgacgagacttgccgcgtgcgcatgcagccccggaattccgaatacgcacctgtgaggctttccttaacttttcaagacatggccgttttgcccgttgttgcttgtcgaaaattgcaaagctaaaaggaaaaaactccctaacctgtacttggctttatccttggttctgttccaagtaaattagtctgttccaacggtcaggagacacaggagacagaaatgtgccttggtgagtcaaagggagggcgacgtaacggtcgatagagcagcgttttccgtgagaacagatgcaggaacggaagtggagacgcgaggtgatccaagaattatcttttctcgtctttcgcatgttctggcggccttttttcttccggcgtttccctcgatttctcgcggttccctccacgtccacgcagatttcgatgtttcgctgacccctgctcttgctgcgtctcgcctcctgtctcgtctccgttccttccgacgatctttcccccttcttctctcgttatttcctgcattcgtctctaggtgtttttcttcgtttctctttaccccgtctttctgcctaggcgcattgcctgagacttgtttccactcctcgacccgcatgtcaagtccgcgttgattcggcagtcgccgtccctacagaagga

SEQ ID NO: 1576 - DNA, 2945 bp, Toxoplasma gondii
  source 1..2945: mol_type = genomic DNA
gaattagtgttacgcgatgtatctgtgtctagtcggccgcagaatgttcggcgctgactgaggctcttgtttgccggtggggtgaccagagaaaacggcgcggcacccgagttctggctcacttgcttgctcctcggttagagtttcttctctgaggctgcgaatgacagacgcggccgcaggcggcgatccgtatcggttgacatcgttttgcatgatcatcgtgagaatctggtccatcgcatcttcgccgacaccgagtcccgccgctgccccgccagaaagcgcctggttcagagcttgcatgacgaggtttccaatctgaatgaacggggcttgaccggcattctgcgccggtccgtcggcgccttgagcgccgtgtccaagcggcctctgcccgattgacgtcccgaagacagagcgcatcattcgccgcgcctcttcttgttgtcgctgttgctccgagccgaagacgacgcgcggacagagcgggtctccttgcgaggcgcgcctgggagacctgccttctgctccatgttcttcaaagtctgcgtcgccgtagaaaaaaaggccggtgtcctcggactgcagtcccgccaaaccgcccatcagttgagccatgagctctcccacgggaacgccaaacgcattctcgaccacagctgccgggtcagaagtcgcagacccaggtgctcccgtcggaattcctgatgcagtaggtgggacagacgaacttggagcggtcgccgtctccggcaaacgttcaacgaaaccgatcgcgccgcagcctccacacacgagatcgccggacgcggaatcaactgtggccggtcccctgacatcgcatgcgtagcagtgaccccgcaggagagacccactggccgccgcactgctctgagagtttgcatgggaagaagctggcgctcctaacgggcgcgacgccaaattcgacgaaccacctgcgtcgccaggcccatgcggccgcgcacccccggtgctgttgttgttccccatttccttgtcgggaatgacgaagagaggagccagacaggccgcgaactggctgcactcctgcagacgccgccggaccagaacccagatgtagttcctgaaacgtcagagcggaactcggtaagccgagaaaggtctgctactgtagtgcggagaaaactcgcgctaggtaatcctggcacatgtccggatactcctttccgctaacgccaaccataatataccttggtcctggtaaacgaagaaatgaaactgcggaagacgctgacagtccgcagttggtttcgaagagctccacgccgctgcagtgtatgctcagtcggttttggccagtaggtcaacaaacttgtcccgtgtgttgtggtgttgccactaaggcgctgctcgcgaatctcaactcttgctgcggaccagagggttctgcgctctgcgacagaaacagacgtaacgcagcatcgcgtaagggttgatagccaatggtaagcgcagaaataggagaaaaaatcggaaaacagcgacagcgacgctgactgcagtggctcaaggtcgacctgggggacccacgcccaagggtcagctgggaagctggctctgcctttttgattcgcctctcgtcctcttctcgtgctggaaaaacgcgctaccttctttctcttaaagcacacaaagtgacgggtgggtggtcgaaagatgctcttttttcgacgcagaccaaatgtggccggtccgcgtgtcgcgaatggcacgacgacggagggtttcttcctgaacaaagaaaatgcggtgtcctagaagcattgaaggagacggggacaaaaaaaaacagaatagttgaagttgcaaggcgtgaacatgcagtgctgttttttccagtgtgtcctggtacaagaatagaggtaaatgcaccacatgcctgcatgtaggactgcacatccccgctgttggaaccccccatcagatgacactgccttacagtggcaaactgctcaggcaggaacttttttcgcattcttttcgcaaagaagtgcttaacccagcgagctggttcacgtggcttctctgctcacttagccactgcggcagtgaggcacaaagaaatcattccgtggcgccgactccgatggtagggtcctttccttttagtgattgggttgtggccgccaggctcctggacaagagtgcagtttacagacactgtgcaaatagctgtctctcgcgatcaagctcgagagaagtggaggcggtatgaggtcttttctcgactctttttgtcagcttccttcttccctcactagacgctctttcgcgagcgctatttacacggaggcacggtcttacctcctcgttttgcgtgttctctctcggtcggttctcatcccgatcggtcagcagctgcgtgttggccgtcaaaccgcttcgcagtccggcagtcgcggacttgacacgtttggcgtttcgtgtccgttttctaaaacggaagtttcatctctatcaagacatgacaaatcctggtcgcctgttctgtgacctgttgtatttccgtgtttttttttcgtgaggcaagcgtgtggcctccacgtttgtctctcacgagtcgatgcctgcatgcgagttcctctttcaagtgtccacacttcttcgagttttcctcggatgtttcccgtgttttctaaacttctccgcttgttgcatcccatgagacactgagctcagacatctgcgccgcaatttgctgctctcttgaggtgcgcgtccggtctgactgcttgagtcgttccttttctagtggacggtgcctgtcggtagattacccgtttttctccggtgcctatcccatgatattcaggtatttgctttaccagaataggctctaggtgccggaaatttcctttcaatcttgccttcgttttccggtgaaattcaagagtgcaaca

SEQ ID NO: 1577 - DNA, 1649 bp, Toxoplasma gondii
  source 1..1649: mol_type = genomic DNA
tacaaaccgagaagggagctgcgttttctggccatttctctacatggagttttccccgccaaccgagaagttagcatctatgagacagagctcttgttcttggcagtggcgcccccagacggaaggacctgcagtagcacaccactgcaacggtgtatttagatgatggaactggaagaaacttgtcaagaactcgtgactttaactgcgctaagtatgcgttttcctctctctcctaaagtcaacagaaaaacacaaacaagagattcaacaaggacgaaagccggcgttcgtattccgataactcgtagtggcaggcgtatcgctagacgcagggacaccgagaagactctcctgtccaagtctagacatatatatgtacaaatatatatatatatatatatatatgcataatatacgcgtatttggagtattgaaatgactcgaccacgtaggtttacgcatgtgcatttacgtatatgtgcttacatatttatgaggacagcgcagcgagtgtctgtgtgaggaggctctttgaaaagccgggagagagaggaaacagaactcgtggagatgcggacagcaagttgagacgcagccttctgtgaagtggagggtggaaaaacggagttgctccgcttgggcgagggctttcgttttcttctcgcatggctggcagaagggagagagcaagggtgtgcgtcttgcgcctcgaaagagaacggatttattttcgcagtccttttcttacgttttccgaaatatgtgtgtgaacgtaaatgactcccttttcgaaaataaacacaagccgttgtacacggcctttgccgccttttccttatctctccggcctgtcgagacctctcgcgtcagtccgcgagaccgacaagagggcaagagacgttgagtggcgacgcaagtgcatctgaggagaacgccctcgtgaaacaagaaagggagacgaaggcactgaaaaaagagacgattttgaaaactcccgaaatacggtggagaccgagcgacagtcggtccagccgtctctgcggtgttttgtttgtgcatgcacaatacgcacgagttcgtcgagcggtcgatgaagaggtggatttgcggttttctttcgagaagaaagctggagagaagaatgagccgatttcttcaaaagatttcctcttccgggatgagagcgcctgtcgcgaaggccgtctcgacgaagtaaagcgagacgcgcccctctcttctctgtcgtgtctctgtctcccctgtggtagagcgaccgccaccatttttccggagtttcttcgttttgtctctcttttgtctgccttcttctccctctttctgttcgtgtgttctgttctcgcttcctctccgtcttctcttcaccgtggtcgcttctttttcgcttctggtcctctgtctgcgtctcctgtggtctctcttcctctccatcgcgcgccttcctcgtattttcctcttcatctggattcgcgtcgattcttcttcctcttcatcttcttcctctccgcgtctttcttcgtgttcgcgtcgcctctctacgtctcgctgcgcgtcctctcctctctgttctcggttcctccttttttttgttaccacttgcctcctgactcttttttgagatttctcga

SEQ ID NO: 1578 - DNA, 1674 bp, Toxoplasma gondii
  source 1..1674: mol_type = genomic DNA
cagtggagcatgaggtacaaagaagttgtcatgtcaaagcaggtgcagcagagatacgagcaaaagccaggcgcatgcaagcagtcgtttctgtcagcagggagagatgcgcgagaagcagaagaggcaagaaacaagaagagaagaagcgagggaaaaacagagaaaagaaaaagaagagagagaagagagaggaagacggagagagaagagagagagaagagagaagagagagaagaagacggagagaagaaaaggaggaagaaggtgttgttttctttgtacctggactggtgacccatcgcgtgaggggaacaacgaagaacatgtggaagatcaagtcctccatttttttcgcgattctttccagagttggggaagctggttctcagcacagacgtccgaggcggaggcgcgggaaggccaaagttcccccgcagacgcacaggtcgcgaccttcctgaacgactctagtaacgagacatgtcttttcgagcagcgccagcctcctcgccgccgcggcgtctgcagtccagagacagaggacgttgtgacgccttcgctctgcgaaggcggcgaacgagctgcaggcgacagaagcgcggagaacggcgcgcgacgagaagaagaaggcaaatcggcaaggtgagggggatggaacgcttccgaagaggacagaaggcgggggatagttttttcgaccgcgccagaaaggaggaagacagcgaaggacgaacgcgagaaaaaacggtgtgggcacgagggaagtggacgccggcggattgagaaaggagagaggcgtcagaggtttggcggcgttccaaggcgtccgagaaggaggccagcagcaagagcaccgtttttccagagaaaacgtccgaaaaaaagttcagcggcagctgcgcgttgtcttctgtgcatgcgctttgtcgctacactctctttcctgcccgagtccgacagcgagctcggcgcggaagcgagtctctccctcgagttctctcgttttctctacagacctttccccgtttttcgaggcgaatttccggccaatactccaaagcggccgcgtcgcggctcgcgaatgctcagagtctctttggtgattgtgcgcggcacagcagagaagccgtcgtcggctgttgcgacagcagctccgttccgtccccgcggcgcgcgccctccgcagacatgtctacggccttaattgcctttttcttcaactgcttctgtcttctgcttcctcaccgtcttctctcctgagcctttgtcttctcccttttctccagcgtgtgtctgaaggcctgtccgcggtcgaagactctctccgctcgagagtctggcggccaagaaacagggagtcgagcggcgcctgcttccttgcggcgcggcttgtcctgctcctgctccaggttgtccgttccagatttctcgagcgtttccttggtttccctcgcgcatgtcttccgcgctcttcgtcgacgaaggcagtcttcccctcccgccgtctctccagccggtctgagagtgtgcgtctccggcctttcggtttcctctaaagaagaaaagagacgcaaggaggcgaagaaggcggcttcctactgcctcgtcctctgatgtagacctgtctccttttctcgcctcggcccaggctctaaaagagctcgcgcagga

SEQ ID NO: 1579 - DNA, 2570 bp, Toxoplasma gondii
  source 1..2570: mol_type = genomic DNA
ctcgttggcctgtggcacagaagaagaaggaagtctgcaatttcaagtcacaaatgagagacagggcctccttctggggacctttctggatgcccggatgtgacgagtttccaaattccgtatctccgggccagcttgtcaataagattcattttggtgtggaacgactctctgcttgagaaatcagtgatcttgtcgcagttcgtgcttcgtggtgcctacttgtttccctgcgagcgccagttgacgaatggtaacttcatttgaagaaagagaaaggggaagagagccgatggtagcgagccaacagagcgtagatgagcagagatctagtgcaggagtcgtgcgtcttacgacgaacgcggaagatctggtggtcccgcgcagccacagaaactgcacacgagtccggttgagacagaagcatagtgcccaagacgcgacggcgaaaatcggttgttcttcgcatccaccggtacactccgatctggcaaagtctagctgagacaggaacggaggaagaaatgtaaactgtgacgccgcgcgattcaagtgccgcgctaacagcgacgtacaatgtcagacgccggcgaacgtgggtgcacatacggcacgataggcgtgaacagatttcgggacagaaaagttgccgctgtcgacttcttgaagccaagcccggtgccacgagagaggtgttacgatatgtcagtgaacaatcacatagaagcgagagggagggattttattactagttttgtgcgtaggtggttgtgatttgttctgcttcccgacccatgatgacctagaatgctgagggcactgtcgccgtgatatggctggtatttggtgccagtcctgcgggcataggctcttcacgcgctcagggttacggaccaacagagatgcatcgggacatcgtcggacacagtattgtcacttcgtttatggagccactaaaagcgcccaaagcagaggccgtctcaaagagtggctcagcactgacaggatataggaaagattgaaagtgtcactacgctcggcagacgctttgaacgtgtagtccttagattccttagatcgtgttgccggcccattctcccaggttggctgttcgttgggttctgttgtaaaaacatggtggcagtggtatgctccttagagaaaaagttgtcctcagcagctgtcctccaaactcaaggagtttcatcaccgtcgtacaagagatttgcgcaccccattttgctcgcccaactggactatttacacttcttgcgacgttttctgtttctcattcttgcggagctaccgatattcggtagccggtttgcttctgcctcatttactttgaaagggaatattcattcccagagacaatagtagcaaagggtcgtcagcaaaacggctcctgccgaatgctgccaccgttcttttctggcatacgttagtatgtattaaagcaaatatcgactcccgggtgactgagcggcccgtgcgtcgcaattgtttgagactgcatcgttagttaagcaattggaaagggcacccttcgcaattgtttgagactgcatcgttagttaagcaattggaaagggcaccctcctgtcgacatgtgttttaggagcacgcatccaggttcgcatttgtgttacgctcctagacatcagaaccggtatgtcttaaccagaaatagacagggttcttcgacgatttcgaaccccgtccagtctgcgggttccccttctgctgagcagaggcagtacagtgtatcaggaacagtctagcgctttgcgttgcattttagcagcgagcttgcctcagaacgataacacatagacagccggcgcagctatccgtcatgagacgagctgcattcctgtgtatttgccaaacgcagcactctaggacaacaccacatgtgagactgctcgtctccaaaggtagcaagcaacgcgtgagcaagcactatgcctcaagcaccacaagcgacagagggtttcgacgcagtcagccctgccggaaaaatccttgcttgattgacatcgaaacagcaaatgccggtccagtcgccactgcgcgctgatccagtgagacacgtaacttccctccatcacagacatcgtaagtcaaatagaaagtttctgtgtagagcttgtgatcgattcccggggaactcgggggggtggctgactaaaacagcttttcgacttggaatttgacgatgccacgcgtaagtcattcgcctgatgatgtgggtttttattcatcgataacactctacgttgaaacatttcctagcaaaggcttttgagcttttttgagcttctgcaccgctctgggagctgtcacagatactgaaccacttaaactacaccttggctctgcgatgtcgtcgctgatgtagattcaaggatggtgcccgtaccaagtggccggatttttcagggtcttcgttggcaagtattcacacagtgcgcttgcctttgcatggttttggagacatcacagttgctgtccactgtcgcagccagcgtcctttcactagtctgtggcattccctacttggccgcata

SEQ ID NO: 1580 - DNA, 1592 bp, Toxoplasma gondii
  source 1..1592: mol_type = genomic DNA
tcgaaggaacactcaaaaggtactgccatgctgcaaaccaattagtctcatgtcactgccacactaatttgctcgatgccctcctactttcagcctggccattacaagttgctttagatggtgtttccgagcacgaagaccagcacactgtggcagcggtcgcagactcgggctgtttggaaatcgaaactgtaccagtggtgctgcactgtttgcaatcgtgcttcctacttacgatgtgttcgctgcataaaggtatggaatgtccagtcacgccacctgtatctatgctgaaaccgttagaggtaaaaatcagcgcaagtgacccttatagacgaccaaccttagcatccgttgaaattgaaagcgaaatccaacgacagtgtgcattagagcacagcagcaccacataaaaagccagcgatggccctccattctgccgatcagcggatatcttagccaaaagtgcaaatctttcgtgacgctaggggcgcggtacagctgggccgacactgtacatacagtacaccgttatacaggaagcaactctatttggattggcaacgccttttaagaaagcgcaggcgatgctaacggtggtgcgtggcaaatcgccacaatgcaaacagttcatgctgtgatagaacgtgcctcttcggtgctgggtgctccaccgcccctgtagagacttgtacctagtgcacaagaaacgccgccacagtcctgtagtcgtctgagggtcaatgaaataacaatgtaaattcacatggtcgcacagatatgactcccgcctaccgtgagacagagtaattgatgcttgaactagcagctttagagggaaccagaccccgcgaaaaaaaaaaacgggccgccggtaatcatcctgacgcctttaacagttcaactgtcctcttccacttacgctccttcaacgatataaacatgatctcaccaaacacaaaagtcctgctgtctcccttcgggatgcatacgcatgttcttgtccatccgttttcccaccaggatccagcgcaggtggactccaaaacaacgcctctaacaaccagtagtaccgtagattacgccccccccccccttgtcgtagtatcgatgaccgtgccagatgttcgcaatggacgttcttccagtttagcgggcgcattcatttttcatacgaattgcaccagctacaacggcatcgtttctctgcagctgctgcggctgcatgtgagacgcggttctcgtcaccacgcgacgagtccttggcccgctgtgcgatgcaaagcgcaacagtctctacgtacgccggaagtcaacagttgcaattttacgcatgcgcatgcacctacggtccgagatggcgccgtaggccccacatgccgcatgctgcctccaacacgtcggttggtttcggcgtacccgcaccccaccgcacgtgtccttttccctacttgcaacttcgaccctcttgttcgcgctggcgccgaattattcctttcgtctttccaagcaagtgtggctcgtgcagagagcacactgttttccgttttccatcgttgcctgaagtgctcctctaccacagacaggaaaaa

SEQ ID NO: 1581 - DNA, 2538 bp, Toxoplasma gondii
  source 1..2538: mol_type = genomic DNA
aaatttaattggaccgcaaaagagcaatgtggaaggaacgtacaaactcgagccgctctttccggtgaacgcggttatgcgagggcgtggtctgcccctgtgagagtttcagtgttcaaggcaagcactggactggatgcccaggaaactctgttcccatcatcaagaactgcaatatacgtcaccaccaccaattaagtaacagctgaagctaggcattgtgacacaccttttaaaatgacattgccaagccttgcttccttcggtaagaatcgtagttcaagatgctatgcatgaaataccaatgaagtaacaactgaagtcagattttgcgggggacactatttgtaacgaaactggggtcacggagaaatgcccacggaacgcggagtcgccagaaacactaaatctaccgtaacatcccctttctgcggacttgagcgagagatttcctgacgcttaaaagggattggacacgcacgtgttgtggcacgtcagacgtgtactcgcagatgccgggtgttctgcgtgtccgtcaccggcttgtgcgtggctcgagtcatctgacgaaaggtcagaacaagggttttcaccgtctgaaatgtatatgcgacttgagttttgccaatgaggacgcgtcaaatggtcaaataaaacgtgcgttcgaaggtaacggcgcacggctgctagaatcgcactctcgagcaaacgaaaataggacaccacgaagctgtaaaacgggaacccaggcgaagcaagtgcctgtacggggtcgctgtttccgggcacgccccagacgccctcgttttcacgtacaggaaagcgctcggaagaaagagcctccaggaaaaaacagaaccatgacaacgagtttaaacggaaggtatgatccgtcgatgacttgtggaactacctttttctggggcgtataatacagtgcgaattcaactgcggctttagaagacctcgacggtcctgtttaccggatccaagagctcgtgtgttagaagaccattcttggtggtggctattggtgaaatagaacagaggcatgcagtaccaccggagtcaccactgaagaccgactcgcggttgttaaacgccagttacacaatcctcgagtcatctgaactaaaatatacatgagtacgaaaggagctgttttagcatgcaacgtcctaaactcccagcatgccgctacttcgctaactagatgttgagcgctagcaaatgcacaagatgcttcagaagtacacgtttcacaatggggttcctttgtaaaggtgctcaaggtagaaccgccgggccgtcccgacccttttttgtcaccgagagaaaaaaaatcgagaactgagacgcggcgacgtgagcgtgtcaaactcctctcgttgtctacactttttctgcaacgagttcgcggttctccgtgacctctatggctcttcgaactctcctggcccccccagtcgacttgaaggaagcgcccagtttttctctgtttgtggtccttaccgaagaacgcaagctttcgacgcagtgtgtctctctgcgttctgtaaataaatgtcctggagtgctcctgtcgcttgttgcagagcaaatcgcacgtgaactcgtctctgcatgcagcgctttttcgtttgtcttgtcttgctgctgtttctatacaacacaaaactcgttggcgtacccgacgaagctcaggaccaaacagctgttccaaagttcacttaactaactgtgttcttttccagatcccccttcctgtttttcccgtatgaagacgcgggaccacggcaagcgattcctccctccagcttgcggagttgccggagccttcggtcccgctgtacgtacatttcagaaccgcctgaatgtttggaatccagagtctctttttctttcgaaagtcttgaacatctgcaaataggctttccttctggggtccgaaaccgcgcacatccgctttcctctctccgtcgggggtcgacgacacgatccagccggggctcaaaccctcggctggaaagtgagtggcttggcattttgaagtttcgcgttgtacgcccagaatcaaccaaggacacgagcgggaactcgggatctccggacatcgtcttgtggcgcacgcccaggactctcagggattcgtgcgaccccagggaaacccgctgtcgagaaatgtcgttcgcagcaaatcgttttggggacgcggccgtttttacgcgtagccattgaggtcggtttttctctccacgcactcgcttcctcggtcgactcttggcagcgacgctgtacatccctttctccctgaagccacctccttttcttcagattctctgcatagatgactcggtcagttcgcccgcctattcgccccatctagtttcgcggtactccacccgtattctcttcttgctctccacctctctccttccttctcttgcttctctccctttccttcaccttctccctccagtctcctcggagcctcaccctacccccctaaccccccggcaccaaaagcgtttcccctca

SEQ ID NO: 1582 - DNA, 1974 bp, Toxoplasma gondii
  source 1..1974: mol_type = genomic DNA
cgtattcaggtctatatgtaggtagataattatttgcttatgcatgcatacatgcgtattcatgcatgtcaatatccaaagatatatatgtatatacgtatattttttttatgtatatatatatatatatatatatatgtgcgtgcatgtgaaaaaaggcatatatatatgtatatatatgtatatatatgtatatatatgtatatatatgtatatgtatatatatatatatatataggtatatttatgcatgcaggccttggttttattctctgtctgcaccttcacacagcagaggcaaaagacaccgcgaggtgcaagccgagaactttaaggcaggcgtcgcagagaagagtttcgctaaccggacggaaagctggactgcggcggaggcttcttggagaagacgtagaagagaaagcaggcgccgccgaaggctgtggcgcccgccagccccagcgccgtgtgctttgacatggttcctgtgaagaagcttggacgaggagaagaaagaataaaagaaagcgagactcgggagctttttgcgaggcggctcttgtgaaaccttcagagagagaggaagaggaagcgagaccgcgacggagcgaatccacgaaacaagaataaaggacgagatggcgaccgagaagaagcagttgttcgttttgccacagcgtcttttgaactgggcaacgactctgagatcgagattcgtcgatctccgtttcttcctctttgtctcggttttctgatggagtcctttgtctttcgtcttcttccagagagtccttcctgtcggtgcagtcttctcggtgtctcttctttcctcgtttatattcggcctcacgccgcagtcggccgtttcccttctcttctggtaccgagttctctcgcgcctctcagagcgttttcgatgacgccttcctgccggacgcgctcgccttccccttcgctgcagagcaacttgcgtggatctttactttgttccggtgttcagtttcgcttgtgaagagattttttctcggactttctccgcgtctgcctgcgtcgccggcctgccaccgcgcgcctctcgccgcggttcctcccggcggactggaggagagggagtaaaagcatgggcgccttccggaccgcctcggcttctcgaatcgaagagaagacaagaaagcagagaaagaaggcacagcgcggaagaagaaacgtccaaggcagggtggagaagaagagaaggagaaccaaagagagacatccttgtctccagcagcgctcggttcgaagaggaaggcgaggacgaggaggaggagacaaaattgtgcgtttggggtagatagacgtcactccaccgtcgcagatgaaaaagaagaagagaagactcaaagtcgaaacgccttcgatccttcttttgtcttttttcatcggtcgccctgcatgcaaccaggacagttttctggggctgctgtcaacaacttgcacacatcatctcagccgacgagagaaacctttggcgtctctccttctctcgctttttgtgtatttctcgccaaccaacattttttcttagagtccaacgctttcgttttcaaagcgacagactcacacttgagttctcttcgtcaggttcccctctctccatcgagatcggtctctctcaactcaagctcgacatcgccgttcttcacttcttgttgtctcagtctccttctgtctcctccagagctcctcttcttgtcttttttctggtcctttcttcttctagaaagcggcctttgcctcttctcctctctttctcgtacctgtctcccttcgcttgtttgtctcctttccttcgcttgtttgtctcctttccttcgcttgtttgcccgtttctctcttctctctgagagcctcttttcttttgccttggcgtcgcgccgagaaacgactcggcgctggagacgtgtgtctgttggtgaccttccgagacgaaacaaa

SEQ ID NO: 1583 - DNA, 2370 bp, Toxoplasma gondii
  source 1..2370: mol_type = genomic DNA
gctttacagctgagagatagaacgtttacagcgacaggcttgtggggcagacataggcgtagatgatggagcctcggacgcgcgggctgtgacgtcacaagctctcggtatcgcacaagttaaaaaagcagacaagagacggaggatgcgagccatttgtttacgaacaaaatcacttgttggaaacgactgagggagaacgggaatgtgatacttcgccgtttcattgccgacggaagtcggaggtgaaatgttaaccattgtgtgttttgtcgtgacagtgagcatttgcgttgctttttcacctgttccgggaacgcataatgagttaaggttgatgtattcttgagggcagtggtacatgttacgtcgtgactgacagcagaagcattttctacggagatggggtttttatagtgcctcgctcactggctttccttccccttgttatcttgccaagccaccttaacttccggtttatttcgaacgaagctaagcaacgcgaactagccgcaacagtaaacgcttgctggaggctcagagagttgttgtgacgtcactgaaagtgaactcgcgctgaacaccagtggagatcctcccgtcgcgaagacgccgctatgagtcgcctgcatacaggttggatcccacttgtgaagacccgaatttgagtttgatctgaaaagaatcgcttgatgcaatgcctgtctgtcgacaacacaggggaacataggagggaggtgcctccgacgagactgaattatccagttgccgtatcaccggaatatgcgtggtctactgttgagaatagggcccagagtataatcggagatgccaacctaccgtggccatccgaaggaactatccttgtcattgagatttgtcccgtcggtaccgtaggcttggtggcaatattaaaaaccatcgcttccgcttagacgatgtgcttttatcctgctgctgcaacgtgcgataccttatagcttccacgtctttctctgtaacgtccatcacatgcatgtcaataaattgatacttctgagaaaactttatccgacgcaactcaaaacaccttgttctatgtacagagatgcaaacagactgactgcgcccaatacaatacctatcgtgctttcatcaacgcggacaggaccccctcttccggcaaagtcatcattcagaaggacgcgggaccctgtcgccattccttagattcaggtactccaataaagtcgtcttgaagcttgccgaagcttgagaaaaggcgcaagaatgaggcacaaagacatccagagaagccgaggcacggtggggcggagagcccaagagaccacgggttcagcagcccggtccccactggaggtttgttcacgtcttcgggtctctgcttcttgaatctggggtatctgtgaaggcgttgataatacaagtactaaaggactacggaatgctcgaacacagcagacgaagtttggagaaaacttttggaaccttgaatttgtctcgctctcagctcgattagggggcgcgcacaagctggcgggtaccggttgctcgggccggcgtgcaccgcccttcggagcgggagaagtgtttgtccctcgctggctgccactccctaaagccacaaaaatgaccggatttcctgttatctgagcatgcataaggtatacggcattacctgtagtatcgttttacaaccggagtgcgtcttgcattgtcaatgaaggagacagctgctgtgctgaatttgttctggaccttccgtgatcgagtcgccgattccgatacctctaagtgagactctttttgattgtgcactgttgatgctgctctgacacaccgcgtacggaagaagagtgtctgcatcagtttcgcagattcacggaggagtttgttaaagaaattgagccgactttctgcgagacttgagtaggcggtgcccgttctgtactacaatcgaggaactcgtcactgaaccctccacggtcatctaccaactttttcacaacagactgatgccttgctcatcttgaactgactttccggaagacgtgggtgtgctgtaccaatcgcttgtcaggcagtcccctgctaggtgcattgccccagttcagtctacggccgggaattaagtggcgccttgtcaaagcatccattattgagcagtttacagctcgcctacaagatatctaattctgccacggactcttccttgcctgtgcatggcttctgtggccgccacctgcattcgcgcttgataattgccgagacctacgcccgcaaaggcatacttgagtttttcgagggccgtcctggatctcctttagcagggccaagactattgttggggccgtccactcctcaaaaaga

SEQ ID NO: 1584 - DNA, 2939 bp, Toxoplasma gondii
  source 1..2939: mol_type = genomic DNA
ccatcccggaggaaatccaagacataagtgaagcgttctccatttctgtcaacaaatatgggtttgtcctctgtgccgtggtcacgagaccctggactcgagtcccgccacccagaggacaacagcgctgtgaagtagctgtctggaacactcaacaaagtttcagctgtcgtttcgtggatctttcctcccacatttaatacgacccggtcggccgactgacctcgtgacgcgcctgtcgcagactgcgcgccaatccgcggtagagacccttgaggggatcgtgggtcagtgggtggatcgagcgaagaggcacacaacattggtgaagaacgcaacaagagaagggaagcgggagacgacgctgaagggataacgcacgctttcaccatcggtcatgcgtttccgtgggcactgaggaccgctttgggggacgaatcctcgacgttctcaagcgagtgccgaaaatcggggaaaacgaggtgaagaaacgtttctgaaccgagaaacagaacggaaaaaacagaagagggactcggaagacggaaagtttctgccgagggggaaaaccgggagaaatatctgtttttgcatccgagaggcgcacgcgttttccgtggctgatgcgcctgaactaggaaacggtacctcaggatggtacagacgaggcactgactgggtggcggaggttttcacagtcaacagacacagggactcaccaaaacacgacgaaaactctcattgcgacggcggctcaaaactgtacacgggacacgcatttatcttttctatgaagatttggctaactgagttcgcctgtacatacactccagcatctgaggtgcactgacgaccgatttccctgagaccgcacaaatcaagaacactcgctgaagcttgctttgatgacactgtttttcccagcagccatttgttcatctctttcggtagagtgggacttctgacgctccaacaactccggaaaactgtatcgtttaagctgtcgccgcgagaaagtgtgcaaaccaattgagtttcaccggtggtgtagtggtccatgggatgtacagagctgcgactgctggcagaggaacggcagtgtctctcagccgccactcagtggtgtttgctggttcaagacccacgcaaacaggtggcgcatctgcttcagtccatttcaatgaacgggaagcggaagcaggccgacaactggaggattgtggaggagtctgggacccgcaagtcgccgcagcactcgcgggatacggccggaaaaagtggaaagcaatgcctcggaaaaatatcgaaaagaagggaaacagcctagtcgtaagaaaggcaaaaaagtgcaagcagccagaaaaatgcactgcgccttttctcaaacgatcaacgggctctcgcagtccggtctcaccgagtcaaagtgtcacccacctcgcactgacactgagcactagtgccaaatggctggatacgcaccactccgacgccgtccggcaaccaaagactatggaagacaagattgagtcgcgctacatgcgccacaattgacaccttgagtgaaaatcttgtctcctgaaaactgcaatcccctagattcagtgcacactgagcacaaaagtgaagcgcagggaaggagcgtcatcgtttacttcgagggatctgcgaccaggcggctcctttgtgggaaaatccatttcctttatcagataagagagacgtggggaaaagtgcattttctatggttgtttcctagaagcagacatgacactccgtacgtttggcggacgatgtctcccctgaagtatttgggttcgtcgtaacaacgcaccatgcggcgctttcctcggttttcgcgaggctcgctccgcaaggctacgcagacacatccgacgactttgcggaaacgccctcgctgttgtattcgcgcgctacactttagacaccagatgaaccagaaacacgagacaaagacctggccgtttttagtcaatcctcagcacttcctgatacagagagactggaagaagctcgtgccacggttgccgtcgctatatcgactcaaaacattgcactccaagagccgccttacgatcgggggtcagctagctccgtcgcttcctttgttgggctaggcctctttcgtggctttctgtggcatgtcttgtcgcgggaacgtaagtcctcgaaagttgcacgttctttgtccggtttgttgtgttttggagctgtgcattgtttcggccacatcttgaacgcggctaagactcggcactctgcgacggaagaaagaaacatggctggcttcggagggccgcttaccacggaatttctccaggtctgaggttgtcatgccccacgcgagtgtggccgcgtgctctcaggcatgtagcatttactagagagcggttttctgtgcctgcaaacactctgtcctcctcataatagctacctcgctgcgttgacagccgtcagtcagttctgtcttgtgggaatgtctttccaactactgttcgtggctaccactcgtacctcgaaaggaaggcttttaaatgctgccaggcgtctgtagtttcctccagtttccttctccgtcgttcttccgagtatttgtcctatgcacacaggttcagaattcgtctacttttggtgacacgtgaagcacgcatttcctcgtcaactgcactctccgtagaaaccgctgttggtcttcgtcgatacatgttcttcccactgctttttctgcctctgttttttctctcgtgtgttctttgttctgtatcgtaaccgacaacgggtgtcgacgtctccgcagagctctaacgatgtcatagagcgcatcccgaggtttcgtagtcccacgtcggcgtaggaaaggatcgtttctttaccctctttcctaccagcttctccttttcttgtcttttttctggtca

SEQ ID NO: 1585 - DNA, 4555 bp, Toxoplasma gondii
  source 1..4555: mol_type = genomic DNA
gctcaagatgagacgctgtagcgtcgcatgctggattcacaaggagagggtgttctatgcgtccaagtgagtctgcaaatgcggagatgtgccagctagtctctctggtgtcctcttaacaggttggtcgatgcgccgtggtccttactgtgtccaggaactgtatgtacaccgcgagacttctcaggaacggatttgggctagcactcattgcttggacctcgctggggtccaccttgccctgcgtctggcgattctgcatgagccgacaggcgtaaagcattccttctttctcttgttgggcgagagtccccgtcacgtgtgtgacgccgcagcgcgcgatgcacatgtcatagaagcccacataatacagagcccggcactgcagacaaaagcaaggcgataccacaaaaggacttgcaagaaaaaaaaggaaaacggcaccacacatcgacctacacctgagtagatatgcatagtcacatctacctaaaaaaatgcattcacgtgggtgcgcttcactgagtcgtgtgtacaacatcatcggcgtgtgaaacgcatgcgcatcgatacgtcttcccaaccaagcccttcgaagcagaaaatagctctgttccccggctgcagtttctcgggactggagttggagagacgaagtcgcgtttggagttgcgtgggtcgcaggagagagggtaaaacagacacgatgcctccgaatattgggagtgggacgatcaggaatcgaagctgacacggaaaaatagaggaaactccggttgtgagtgaacaaagagcagtaaggcattgccgctcctcgactctatcctcgctcctgcatgaatacatttcggtgaagtgtgtctgcgcacggtataccacacacacttgcatgcgtaggtgtatccagtgccgtttgttcaacgcattaaacgcactcacttgagaaagttcgtcttcttccattgtgcagacaagaaatgcagacacagctcagaaacaggtcacagagggtgttcaggacagcgaggagggtggcgagagttcgaagtcgcttcagctgaaacagaccgacactgcctccgtccaatctcagatcagaacaaacagagaaaacctttagcacatttttaatggcgaaagggagtcagtgtgtcgcgagaaatcgaggaacgtgaagcagtcacgtgtatccgacgcctccggccacggggaaatgagaaagacgccgagagatgagcgccacgaaagccagaagtgtctgacttttcgacgagggtttcgaggagactttggatgcagctgaagaggaaacaaacgctcgcgaacaaggagcaaaggtggcttttgagggctccaggaggatcgaactcgcagcatgcaacctgaagactctgctgcgctggacacgctgaccccctggttgtgagcgcagatactcccaaggcgttcgcgtggtcacgaaagtgcattctatcctccgtaaaaaaagaagaacgacaagccttttggattcgctttccattcactggaggacaaaggcgtcacggaggatgtgcaggcatttcggcgtttcgggtgtctggtggtcgggccctcatacgcgctcgccggactcccgtagaaaaacctcgttgtgcagaaggaagaaacgattggcttttttttctccggataagaagaaagatcaaccgagagcttaccttctccaatatccggcgggcacgggagcgaccgggaaatcggtagaaggtgtcttcttgagtacgagaacgtaaccacgtgctggtggctgcgtcacttgtaatcttcgtttatcaaaaaatcctgctctggcctgatacacaactgttcttacatagagacttcgtctgcatttgtcgttgtctccctgtaccgagttcatgattggctgaaatcctcgcctgtcgtttgtgtctgttttccggagaacacagcgaatccttgtttcacacgaaagcttaggactcgtcgccactcctgcaaggcgtttgcccatttaagagcaacttttgtggatggttttcaggattgtgatccgaggaagatcacgtcttttccgcactgaccaccgacgtcacgctttactaaacttgaagggttactgcctgctatgggacagggtggcgatttctacttctttgagggtggaaaactggcatagtgtgcgccttcatagaggaagactaagcgacctcttgttgttcttcgaaaaacaaataggtctgtgtgagtgtcagcgtcaataccttgccctgtcacggccctgggtggtggagatcgttttttttttcggtagcatggttcacaattgtactttgctattcgcggtgacaaacatgtctttgtatgatttattcgacgtacgcaatcgagagccaagatgctttggaccacaggttcttcactcgaattcttagacaagaggtgtcatgctggtcgtcggccacagtcactgcttagcgatgtcacaagagaacatggtggtgcattcacacgcttcaaaagttgcgcggatggaagtgtccacctgagatagacacttactgaatgacagtgcagagctggacgtcgaccatcagctgtctttcgtggtacagataaaggacaaagcgttcgcgatacctatacatatatatatatatatatataaacacaagtgtgctttaggtgatccttgttacagaaaaacgggtaatagttcttgagttgtcttcagtgcgggtgaaatccgcagcatcgtctacaagcagatgcgccgctgttcttactctatttggacaggccgcccgtctgacgcagcttcaactctctctgacttactgctacagaacaaaaacagtttgccactggtgcaaatttaaaaaacaatcggtatcccggagttcaaatcaaccatcgcaatcccacccaaacctactctgctggtgtaaaagacttcacacggcacgccgtacctcgccgttggatattggtgtcctgagtcacataatagcaggtgtctggatattgcgcctacaatgtggccgatgtgcaaagacctcagtgtcgtaggatgtggaaatcgaacacttccagccatcttaatcagtccaatgtagtggtggtgtacagcaatcatagatcaagtggctttcaggatcttacaactggagtcatatttagagcgactaacttttgaaggtttttcccgtcagttcgtccttggcaaagatgcttcagcggtggtgctccactcaccacagccacggtgatcagtcgtcagagaatcgctcttgatacagaaagacctatagcgttgggcatttcttgacatcgccgctctcaatgcgcggcggtgctcactttggattccaacacaggacatcgattctgtgaatttgagaggtttccgacttccaaaaatgactctcaggttctacagtccgtctactgcctccatgacgtggctgccaggacattctgggcgcacgccttgctcaggctgcgggcgccactgctgtggtgaaggcttgaaccctagctggccttttgtgtcgttgaggctacgggagcattttctccgtgaaacggcgtgaatgcctccctttcatgatggcaatgatagtttccttatcagtacactggccggaaacggccatcatctgtcgagtcactcttagccccccgggaaatggctacatccgtggctagcgaacccgattttccgtggggcctgtagcgagtcgctaaagagggttgaatattgagctgtatgtgcttttctgaaggaaccaatggtctttatcaaagtatcaaccgcatgtcgttaggatcaactgctgtcggaaatcgtgacgacacacttttgttgcgcgaaagcgcatttctctttgcctcgtgatgccagcacacggcaccgtccggtcgacgaaggcagtttatgtggttgtactcgggtgaattcgaatgctcaccggagcgttttgccgcagatcaccacgctacgagtgtcacactgatgcgcctcggtctgcggggaattaaactcagtcagttttctagtaagctgtgcctgtcattttttgcgtcgtgtttggagcgcggacccagagaatccgagcaccgtgcgttttaggcccctgtatacagtgccttccgttcgtgaatataacaggtgctgttcgaaacattggcatttttgcatctttcctgctgggtgactccgggactttcctcctcccaaccgtatactcctctgtttcgtctgtccgtgaatgggtcttgcaccgcaagcgttcgtaaaagcgcagtgcggcagtcggggcggcgatttgcgagccctgaagatttcccgaagcaaaccgtgagatttgtagaatgaagaacgcaagttgtgcctcgtacaacgaagttgggggaggtaacgagagtaattttcaggtgtgctacccgggtttccgacacctggggctgaaggtcgatacgggagaacggagaccctgaatcacctagctacccgaggtgtcgcttcctctatcttccactgcagaattaa

SEQ ID NO: 1586 - DNA, 2064 bp, Toxoplasma gondii
  source 1..2064: mol_type = genomic DNA
atttgtctgtcttctttgttgaccagattgttgtcttcgcggtttgggtgtttcctaccgcggcgtgcggaattccgtctttttttgctacggtttttcgtcttcgactgtttgttcggcacacctgaaacacagagagaagatcgagaaacctgcagggaaaagctttcgaccatccggttccactgcgttgctttctcgtggaaatgcgcccaatctcggaactccacgtttcgcgtttggatagtcgatttgagaacaagaaagggggaggatggagcccgagacagcgtgctacttccacacaagctggaaaagacatgaccatgaaattcgcgcacatatacgtgggcaaaccagcaatttattcacgagaaaatgtaagcgactaagagcggtctccagagatcctcatctccgggtagaataaaaaagcaaagtcttccggaaggagcaggactgctacgggcgccgcacatgcttcgcgggccacgatttgcccgtagaaaatatcgactggttttcaccctacatccacataactcgtagactctctctctggaaggtgcgtgcagatcacttgtgaaaccaccgttagctccttttgtgtcctacgttttctgcacgactatcgataccgcttataaactcattccctggttcgtggtagtctcgagtataaggaaaactactacatctacggtctacatcagacgcacattgaacacaaaaagcactactttgtgtacgttctgattcgaacgcacctttaccccaatccctgcagttttggtactctagggaagaagcaatggcactaacgcgtctgtgtttagaatcaaacgccacgctggtttgctgtaaacgtaacgccagcactctgtcagcgtagaaacccgcaagtcaccgtggggagtcccaggactggggggcgagaaacaaggtgcgaacttcactttctctcagtcgtttcttccccgacaaaaaactcaacgtactgtgataagacaaccaagtgaagcagtaccgctgaagacactgtgtgctgtgttccattgttttgccaaagcgcttttgtcgactgccgaaaaaaactgtcatccttgatcatccacatccaggttatctgcacatcgcacacccaaagtctcagaaaatagcactcaatctctctgacgtggagttcgcttgggagcaaagccgatccttagcgttgagagcgagagacagagaagctggtagggctgttccgaaaatgccctgtaccgcctgcgaggaagtttttcttctcagcggtttcttcgagaaggatggagtcattgttaatgcaggatctgccttcttccgagccacaccagtgcgggactaaagaccctgcagtctctggaactctacgtgtggagactgaggcagaaactgcttgtgcatgcatgcacacacgagacaagtgattgcgaccacaggcgagtttcgaagcctcttggtgaaaaagggaaagaaacttcgacacgcttccgtcttgttctctttcttgtcaaggttttgctggctgctttctgttttcttcatggaccaggcagatgcgcctcaaaaacgtcgatgagccggatgccctgacgagtcgtgatgaaccgcatggaacgcgttccccaagcgaaaccttgaggcggtattgatgcccatgacggttgtgcacctaaacgagcgtttaaacattaattgaagtcattttgacctcagtgtgtaggtgtagttgacgtgcctctcatcgttatatggagccgagcgattcactccgctgctccgtccaaccacaagaggttcaaagtatcattacatgcagtgatacctctgcctccctctctggttaatacttgtgtcttcgtttgaccttttccggtttagtatatactcaactgccttcgtaggacgggagccttactttggaaagagtgttctgacgacccgcttggcgcgagtgtttttatccatcgtcaagacggaacacgtccgccttaccctgatgcggcccttttcgtcgtttttttcttcttacgtgaagaa

SEQ ID NO: 1587 - DNA, 3675 bp, Toxoplasma gondii
  source 1..3675: mol_type = genomic DNA
accgtgtcgattagatattcaaacccatgcacatccattcacttttgacgatgtgtaaaacaaagagatgtcagaagagaacacgagggcgttcgcttgtggctgcgtagatacgtcgtccggagtggtcgttagttttctgtgaatcttcgggtgtcgtgaagtgataaaatgccaggcaccagagacgaaatcgcacgcggtatagggtatagtgtgagctcgagtttttcgtcctctgattagttaagcggttagaaccacttagaaaattcaattcaagaacactctgcccttgcgtcccagtggaaatactgcgaaggcgtctccgacacaatggtgtcgtacgtcatggaagggactgaacagcagtccttgtttgcttggtgctttccgtgtgtaaaggtctgcgagtctggcaaggttcatgacgtgagcatcaaacagcttctcctggttactgatatggccaaggagttttcgaagcccggtaagcgttcattcaaaaatggagcttctttcgtgtctgcggcactatttccccagccacaaaaatagagggaaagttactcgtaagtctacagtcgcaggatcagaaccatcaaaccactctacaaaactaacactccaagcctagtagtttcatgggtcaggatttcggcggcacaatggtagcattgatggcgcggtagtgagatgtaactgcagagtaacagaaattgttcggtaaacagaggtagtggtcacgcactcgtgaccctgatcagaagcgctcactttgacatgcttcgaacattcctgtttactaggatactcgcaggtaaaatgttttgtcattgccgacaaagtccggttgtgcttgtgtcttgatgtgacatactgtgactttcaggtcccatcaaatgtggcccgttccttcagtgcttacacgattgtggctacgaggggagttatgacccaatgcccttctgatgcgttactcggcatgaactctttcgtgatttcagccatttacaccggtccagtggcagtgaaacggaacggcgaccgcacgtcagttgtcgtttgctctttttgtcaaagacacaaaacttctcaaacttttcacggagttttcgcccttcattatttgtattaccccctctgaagacagtctggcggaaggtattttcaggtgaacgccggatgtttccgaaaatttatattcgtagaggcctttacccaacttcagctgtctacgactactagttcagttctccaggaatcgctgacaggatgcgttccgcgtcctgcattcgcattattccccccatgcagtaaacggcagatcttcctttagacggctttcctaaaacacagcatccacggtgttggtacatacgaacaaggccaagaaaacacaagcgctcctcccacggatagaatgactctgtttctccatatttaacatcgggcccaaagaaattgtaacagacttcgacgctttcgagacgaccacacgatttcaatctgctgtgaacgctgtagtgaagtcgcgttacttcctatttttctgtagcaacgcagatgaggacagacatctcaccgtcttttcctgtaggtcagcagcccgttgtgaatgaaaggtcgacaggtcctgaagagcaaatatgtttgcatgtagtggtacattcggaaaggtcaacggcgtagggcaaaaaaattatcaatgaagggccttaaaaagcagagtacataccaatcagcagtcaaaaaccagtgatccgctgtgttttatctaaaatcgtgatgtcgtttatataacgctagtaatgcttgtcaagttccttgtaccctaacgccggatggtactcatgtcttcccgctgccaaacaggacgggactgtagtccaggagaggaaggggacgggagtatgtggatagaaattctgagtcgattgcatccttgctcacaattcattgtgccgagaacttgttttgcctataaagttgttacagggccacctactgcttccgacagcccgtctacggtgtaagtcgctaggggcaagagacttgattaaaaccgaaatactcgccagtctacatattcatgaagattaggggcattgcgcgtccattgtcgaatggccacataggtttctccaagtctataagaagtccaatatgtgtgttaagctgtgctaccacttcagcagaagtcaactcagcggtgaaacacacacacaacgcaccgttcccccgtgtgacgagtggactccacgtcttcctaaacccctccatggaggctagacactacaaatgagcattcctttgaagttagaggattgttacaatcgagtattggagtgaaaaaagagctgtcgccatgaaagtaccttaaggtagctgaagcattcgacgcaacgcgctgtggagcccccggccctaagtatctctcgaagtcccaaggcaggttcgcactacaacactgaattgccgagcaacggatcttgtttcaaactccaaaactcttgccattctgagtacaaactgtcgggtaactaattcttttgctataacgcctttttctgagtcgaacgacgccagttttccggtcaattccctaccatctagtcctttgggccaacatacttgaacagctgtttgcatcacgaaatcctcttgtgcctcgaaatgctagcgaaaactctagttgtctctactagcgccagcgagaaatgccatcgccgctgatgagtctgctattacttccgttagacccctccccgcaaaagctagctcagagttgagatcgactaaacgagtacaagacatgatggataaaaattcagtttgccctccaggcggccaccgtaagaatttagcccggcatgcagcgggtggacgagtagcgaggcgcccgtgtcaatgtcttcccagctcgtgtgtactacggctcgtcggtttggtgactgacagtcggtcactgcattccagtcatgcacgtatcgtgaacttttgcgcttgagtcctcacggaaacttgctgtttatatcgtgagaaaacaacgacaaaataacaagagatcccagagacttctcctctcaatcggcgccagacacgccacaccggaggcctgtccatcccgtccagctcaagcggtcaatcgcagcctagaagacgccgatttcgggggtggaaggcacatgctcaggcgagcgagcgatgtcgagccgaaaccccagcgagcccctcgtgtttctgtcgttccttggggtaaagcagtgagtagtcgctatccgcggcattccctgtccattgatgacgcattcgttttactgtggcgacaaatagccgcacttacgtacctgtttcgccgataataaaggccagttgtctatacccctcccagcgaacgagatctggtgccgctcccaggcgcgcgaggatacccctcaggacagacaagacccggcctgcctgcaattttcgatgacccgtcttctgaaactgcgacaacttttgcattttctgtgaatcgttttttcttgttcagttccgtattctttctgagtggtctgggaagggcatgtaacccctctgagtaactggaagactgggcccgtctcgcgtggcacccggctccgaatgtttttcgccaacaaggagaccctgctcaaggcaccggcacca

SEQ ID NO: 1588 - DNA, 1909 bp, Toxoplasma gondii
  source 1..1909: mol_type = genomic DNA
aaaaagattgtcctcggcgcgttcattcacaacgaaccaattttggaggaacgggaccagaaaaaacacgaaaaacggccgttctatctattatgcatatatatatatatatatatatatatattgttcaagcttgctaggttcgtttcatctgagacggtctctcagataacggctcttgagcgaacacctcagcatcatagtcagccgtggggaaacaaaagtgccttgtcgcagctacagccgcggttgtttgtgaagaaagatgaacatcatcctagttgctcgagtattcccactgtttgtcacatacacaccctttaaaactcgattgtttacctcttagagggcgcgaaagcgttgtttctgtctctgagggatatgtcacatacatattcgaacctgtgcatactatacatgcatatgtttatacatctgtccatcggtgtatacagtttcgaactgttttgggtgcatgcgtagctgagcaattgccacagcgtccgcctctgcagggtctcgattcagtgtctcctcccgctgatacaaacgatgtgggtgttttcgagagatcatgttttgttccgcagttcctgagtgaaataaagagaggcacctgcagagagaccggaaaaccgtcctggggtatttgaaatccgccgtgaagaaacgcgacccccggacttgagtttctctcgacagttcactctcctgtgtgtctactccttcggcagtcgctctctctattcgagagagatgtccacgtgtctggagtgcctatctcagaaaggaagattcagaaaagctggttgcccagttgctctctaagccctattttctacatcgcctcgagatacagctcgcgtgtctctaggcgaattccccttgagcgtagacgcccgaagagagaaatagcaaatgagaaaagagcagaatgagctagggggacagggaagacactgacaaagggtcgagaaaaatcaaggtgagagaacggagaacacagacacagcagagaggcgagggaaggaagagagtgcaagcacgaggaaaacagaccacaacgtttcttctttgacgagtcgtctgctagcggaacaaagctcgacggtgtcgctgtctgtttgtcgcatgccgaggaaaatttcacgggatgagaaaccacgcgttttttcgcacgtttgcatgtggagaagtccagctcgcgtttttgagttgaccctggcaaaggcatcgtgtggggctcgacggcagacttcgttttcggaataagatgcgctttctcgtcgacgttttcgtgattctcttctctctctcccccttttctccttaaccccccatttcccctctgttgttacgccccaggagcgattcgcggctcgctgctgaattgctccttccgttgaccagcgctctttttgcacagacccatctgttctcgagttcgtcgtttcgcttgtttagaaaattcattttcccgcatttgaattgagttctctccttggtttttctcgcttcctccctcgtacacaggcgttccatccccgctgtcctccctctctcttctcttccaccgtctcggtctcagcggctccgtctgtccgcctctttcaaaactcacgacgcgtcttttttttctcccagtttcctctttttctcagaggaagcaacgcgcgcctccaagtggacgtgcactgcacaagcgttgctggtccactccccccgagggttgtcgactgacgcaaagttccgacactcggcttcttcgcaagcttctcgcttcgttcacgcgtttcttccttcacagctgcatgcggcgtctcttcaactccggctctttctcctgaggagcgtcgtgcgagttctgagcgctctcttccacgttcgacgaccgagccgtgagccgcca

SEQ ID NO: 1589 - DNA, 1812 bp, Toxoplasma gondii
  source 1..1812: mol_type = genomic DNA
agtgtgttatcaccgtcgaactggcactacatcaaaggtttaggacggtcccgccgccctgcgttttactagcggaatggacatgccatgtctaggggaggtttacggtactaaagtgaatcggtaacaaagcaattagggagttagtggcgaatgtcccccacactacaacgtactcaaccttgatcagtcctagctcggggcaatcgtgaagcaaaaatcgacgacttctgttctgccgtttaccactgacaaatttggagtgcggatgcgctctaatttttccgaacgaatgccacaaaacaatgacttgtttcgacttacagaggtaccgtgactttcgctccgcgttacagagaacggatatcacctcgactcttcctcggttcgccttaacgtgctagagtcacattcctacaggaaaacgtttttgcactgtctctcaaggttgactgaaagctttcggttaaagaagtgtgtaatgtctgaacaaaacggtgttttttctgtgtccgcgagattcggcgaagcgaccggcacgaagtggaaaggttcctagcatgttctctaaacaggattaaaatgcgacattcatggtgccagtaccacgaacagagccgggaaactaggttgctcagcagtaatcggttatctcaaatgtgcatctgtcgctgcatggcgtatgcgtttggaggaaacaccggggacatcgaccctagataatagagctgcatgaattctaactggtgcgtgatagtggagctacattgtgtcttgccatacctgtggcgggaatgaacactcagattcatcggataccagggcacatcgagaggtgtttggagctgcgccagtaacgtggaagagcgggtgaaggcggcatctccactgagccgttggtacatccacgcaatccttcaggtcgcagcaccatcttcgacgctgtgcatgactggggctcttgtttaacctacttttgtgtttgatctatccacgttatattttatgtctcatgaagggtaatgtgggtcccttttccgcaccgcattgaatctcagactgcgcttcaagctgtgttgtgtcctcgcatgtgaatggcgcatgctgggattaaggttctaaagcacgcgcgcgccagaaaactctccctccggatagagctcgaagtaaatctacttttcaatgtccacaaaacaggaacacgtgttggcatagtacaatatatcccgtgttttccagcttggctggtcagctccacatctaatgacatcccgccggaaagcgtatctgcatgcatgtgccccctttgtctccgtttggcgcgacgctgttacccagagacctgatacatgacaggactgttcacgacccctatcctcacccagaggctgtactagatcgtctgttcatcaagatcagggcggtgtcttccagaataccacatgtcacggacgcatttatcggcgttctgtttttacgtcggaaggagcactctcttcggcaaatgtcgccccggcaacgtatctcgacgcgcacgcatctgtatgttcgttgcaagggttttcatccgcctaaggtcttgcgaatcaattgttgtctcagaaaggaaatttctgccctacggttatccttccatcaggagtagaggggcccaagtccgcatatcagcacgtacacaggcaaagtgtggtagtctgcaagccgtctgcagcggtacctgcggactccatgtccagcccgtgcatttccgcgtgctttcattttgcagtttgactggatgctgagcgctggatgttcctcctccctacctaa

SEQ ID NO: 1590 - DNA, 2561 bp, Toxoplasma gondii
  source 1..2561: mol_type = genomic DNA
gaggtcagacaattccagggtgaaaagatgacaaggaaacgtcgatatacgacagaccgcagacacacggacttccggcctcgatcctcaggctgactatttgacagtctccgcaccgtgtgacgcatcctctctcgtggcgtgcatgcaagaatccacaagcatctcctctcacccagatgtcgtcttgaaatgcacctcaaacatatatatatatatatatatatatatatgcatgcagttgtgcacacaaaacgatgcatacgtggatgtattaaccacacacacagttatgcgtggatgcgcatactcttacatataaataaataaatatatatatatatatatatgtttgcttgcgtgtatttgtgtgggtatgcatgggcgtccagatatgcctgtctaggtggcatgtgtttttggtgagcactgaggctgcggaagcgtcctttcctttttccattttaaagtctcacctcgagtgtctcccatgagtggaagagaatcacggtgtgcagcgagttttgaaaagacatgggcatgaccccacagcaagaggacttatgtccctccgcagcgacgtgggcggttccttccgcagccactgctttcttctttttacagcaggactgttttccttcactggaaggtccctctccgcccgaccctccggcagcgcctttcttgtcgcagcaagactcctcttttccgtccgcctctctcgcagcagaagcgtcgtcggcagcgcgcttcttctgtcccttgcagcagtcctcgacatcttcatacctgtttctcggccgctgcttgtcatgcgtcttatctggcgtagcatcggaactggaaggttttgagctgtcacggtttcgctgagggtcgggcacctcgttgtcagaagagacgggagagttcgaggcggaggacagagcgccggggagagaagacacgcagtgaagcgcgcaaacaaggaagaacgtggacactcgcagaagagaggcctttgattgaggaccggtcggaagacctcgccgtctggaactggggattttgcggagggacagaaggtaggcttccgtctttctctgtcctccttcgcgtccagatctcggagaagtgctcagagagcaggaagcacctgactgagcgtgcgttgccatcttgactctcttggtctgccctctgtaggtctttctcgaacgcgttctctctccccacggagcgcacacacttgttaatcggaggttcgcttcagcctatgattcttgtgaagttttctttcctctctcgcggagagtcgccacaggagagacacgcggcgtgtgtctttgactcgcgggggggccctcggcagttgaaggcttaaaccctaaaagtccctaaaccctcgactcagaggcagcaagaacgcaggaagagttttgccacctgagtcagacaaggcagacgggaatttccttcgtgaattgccaaggtgtcgtgaaaggagacgcttcctgcatcgcctgtgcctcccgcggggaaacagaggcgcctgccttacacgtctcctgcaatccacagcgcagaacgcgagatcaaggtggacgcgtgcttgcacggaaaaggagagccccccgcgaacgggacagaattgccaggttgacatccacttttccgagaattcttccgaaactctcgcttccttccatcgaaaacaaccaccaactcaattctgtcaagggttgctgatccaccacacagaaaactcactcgcgagacgggtgagaaggcggtggggctgcgggctggggtggcagcgaagcacgtgtgttttctgtggctttcacagaagaaacccttctctctttgcaggggttatgtcggcgcaactcactgctttctttcacgtctttcgagagaatttcctgcccgagatgtgcggagaaaaaaggggaagtagcgactcattttactgacgcgttacagctgaaaaagctgcgggtaaaaaacctagcctgacctactctgcaaacaattttagttttagcggcagaaaatgccactgagagcccacaagaagcctgtttcccatatgcactcacacacagtgctctgttcgagatcttgtttgaaaaatactcacacggaagcgaacaaggcaccgggtttgccgttcggtgtttgcagacgcgcggcattttaccggtctcgactttgcaggaatcgtacttccctctcctcgtccgtgcttgttttttcgacgttcgttccgagctggagtgccttgcagcagcgacacgtagttttctcgagggtttgcggtggaagcgaaacacacgggccttcacagggttccacttcgctgttcagtccagtcgttctaggtttgtgctctgtactactcaagactggatctgtcggtgactagaaggcagaggctgtcgcagaagtacctcttctctggagatttgcgggtggagttgcaaaggggagaaaacgacactgcagagcgaatagatgaagaggagagttgacgagaaatggatttcttcagaccatcttgagtttcagcgttactcaaa

SEQ ID NO: 1591 - DNA, 1369 bp, Toxoplasma gondii
  source 1..1369: mol_type = genomic DNA
agtgcggctgtccaaatgttagtcagggtaaagcgagtaagttctgcggaacgctgaattacataccatgcatattggtgcattcaagtgacagacggattcatttgcgagcccctacacagtacactgcttattaccctctcctgaagaggcattatcctcgagtgaaggactccgactgacttgtgaatattccccgagcacgaagaagcactattccctgagtagacggtgcatcattttcctatgtttagctctgttgctactactgctccctcctctttccccatgtctcttataactgcgctttcttgtagaaatttcccaggttgccaaaaactgtggatgattaatcacgtaatgatcggtggttcccgactgttgccgcaataggcagctggcgaaaaactggggaaatactgccagcttttgacgctccctagtcttgctggattctccagaaaattgtcgtagataccgagaacctcgactaacaaaacagggttctctccagcaacattagcaacaactcatttttttcgcgcaattgtaaaaagaggccaaggtttgcagaagtccaggagccgtccactcggcagatatcgctttggtgaaaatgctcgcttccgaagtgactcactcgacactagcgttgccgagcaaaacatcaccagagagcacatttcgacaattcaggaaatgtgaatgtgtggtggtgggttcttttcacctttcctagccgagcaaactaatgtgatcttgaattcatctccggctctgagaactctcagtttttaacaagaatttgctatttttaaagtactgaaggttgtttcgaagaaatatggaaacgcacacctgattcacagaaacgctctgcagactcagtgttcagggggggacaaagatcgggacagccaatccgtgggcggtctacccctcacgaaactcgacaattctgagggaacctacaacgcattagatcctgtctttctctccaaatgtgaacgtagatattctgagcagttgcactagttttttccagtgtaacttagacggcggctgctgaccaatagaaggtgcatgcacacctgccctgtcgcatgcaccgacatttttacgcttgaaactctgggacatggaacgtctttacaggatcaaaacctgaagttgccatacccctttttttgttcggataattttagatgcttcccagggtctcttcaagttttcgtctgttgctcgtctgggtggttttgctcacctgcatgtcaatcaccgagacccttgcgcacacgaacgcgtgaatacggcgcgttctcgattgaaacgaaggcatcacaacatcatcctcgccccggacccaaca

SEQ ID NO: 1592 - DNA, 2204 bp, Toxoplasma gondii
  source 1..2204: mol_type = genomic DNA
ttcctccaggtttggagaaggtgaaggaagtggcaaagaacattgcggcggtgtgcgtggaaagtcgatacattgaccccgtagggtcttcggcgacgaagccgtcggagaattccgcctctccgtgcacgcagacagtggacgattacgtgaataaattccagcatgcaattatgtcgcttacgtaccggtgggcaaaaggcgagaaattcgccgatgtcctcagcggcacctcgatctacgaaggaaccgtcattcgctgtcttcgtagactggaagaactcatgcggcaaatggcctgtgcctccaagtcgattggaaaccccgaccttgaaaaaaagtttttggagggaatcaagaagatccgtcgcgggattgtcttttcatcctccctctatttgtagacaggaaagcagtcttcacggggagcatttttgccgacgtttcaaaggggtacgaggggacaccgattggggagggctgtcttgcttgttttgtttccgagtcttgcaaagaatccgtaactctgatttcgaacggcggagacgaaatccaggaaatccgaaaagaccgtgcacgcttggcaaacagtacgaaaggtcgttgttgtcgattattgccgatgtatgtccggcgggaaatactaaagagaaataccagagacggggaagtgatcctcgtttccttttgcgaattggctccagagaaaaaggggatcttcattggagacagacactccaaagttgtcactgaagcgacctcggtggtcgtttgccatttcacacatccgataggctgagcgtcggtaacaactgcgagaaaccgaatccacaaagacatgtttctggttggaaagagccgtacatcttgtcaggagttctgcagaaataccacgccgatcgagtgttgagtgatctttgccaatcacgttcggtggacggatgcatcggtacacactgaacacgcaggcgctcgtgggtgattcacaaaattgctgatatccacaggcctccggtgaatgcagctggaaatcgcagcgtatgtgaatgtcctcccttacaatgctagacaaagcaggatttgacatgctgaagtagtcgaacaggcaaatgtgcctgcttcatagatagtctaggtggagtattgcggtgaacacttattctgtctgtaataccgcatactgtgcttcgtttgtgtcacgatggcgacgtttaagtcttccaaaatcacgccatcagagccagtgacccgtggtaaagatagaacggaagtgctgcagtgagtgtttgtgcggcacctctggccatttcatatccaaggtcttccatccagcgacaacgttggccgcaagcaagagcatgtttcttcgaaatgatggaactcgtgggagcgcacagaacgatggttctgtgtagagaaagccgacctagtcgtggacgcaaaataacttttgagcgaactatgtggaaggaaatgagcccgtgttctctaccagtgctcagagtaaggcttggctcgatcgcagaaaaattaaggtgcccttccgcagaaaccactctgctagctattggagttgtttgacgacacaaagacgaattcctgctgtacactagttgtacaatggaacagatttgttgccagaaaggtccatcgaggcctgccagcattgcacacagcagagttgtcacccggatcgtcttgtaggaaaacggatgagaatttcggaaagattaattggtaaacccggcagtcggctgaacaatgcagtgattcctcttcggtttcttatttgaatatccaggaagatgcactttgggaaattcccgcgttagcatcgctgcccgaatctaccgttaagagtccggaaatgcccgttcgaatgctaacaacctggagcgattgacggcggtgttgattcattttgagacctgcctacttgctgcacacggttctgtcgtttggttgtaccttgtctgttttgtttcgttcctggatcatcttcttttcaaagaagcaatacatcgcggtcacgtgttgtggaattccgtctactcgagacttctctgcatttcagttaaggatacctcccttcgtcgacagttggcccagtgcatgtcaaatatccgtttttgttgtaggtccgagttctaggagctctgtacaagcgctgtgacactggtttcttaactggcttcgccgatcta

SEQ ID NO: 1593 - DNA, 1763 bp, Toxoplasma gondii
  source 1..1763: mol_type = genomic DNA
gaggagcatggcaagacgcgcttcgacaaatacacaagtttctgaggcgtttcaggtacaactggccatcccttctccctcacccctcgcacctcttctctctgcggtctcttccacgcttatagcctgaggcaggttctcgaattaaaggatcaataatgttcttttccgcgcttaagtactgcccagacccaccctgtacaggcttggcttcctctaacatgtttgtttctcgttttcgaggtttgtggcacatcttagagcactctcagcaattcagatggtcatatttatatttactcagagataatatgcaaacccacatttgtatgcgtccgtgtacatgggccatttcgtctcgagctcagactacgtgattgtaatcggtcatgtctcagtttcagttagagctgtactggacggcgccgctggacaatttttcaaagtgaaaagtaaacagtacagaaacgccttctctggcagtctttcgcagattctaatccgtttataaacagtgtgtgtggagaagcacttggcgccattgtcggcaaatgccagtccagtcaaccgcaacatgcagcaaacgaactggaaaacgaggtgcaagagaaactgacgactaatggtctaatgaataaaggagagggaataatgtagttttcaacgcgtagatgcatacatacagatttgagtcgtctcctgacgtagtcaccgctgtatctcaatacaaacctcttccagacatccgagaatctgcacaaacagttctatttttgtatgcgggtatttacatgctccccctgcaattctgctttgttagggggtatttgaaatacagttctattttttatggggatgtttgcatgtgcagttcaatttctaaaagggtgcctgcgagcattccaacgctcttggtgggccagtcggcgtgtgtctgttctacgcagtttttgcctgtttcggtgtaacgcgggaacttgcaggtttcgctttcttttcaaattccacgtcattacgctggcttccttatcgggggaattcatctgcagaaagaacctttccacgcagtctgctgtcttgtccaggacggttctcctctatgtgctgttcagaagcgcgacttcctcgtcaatttgtgtttcgagggggaacttcttctcagtgcgttgtcaaggaggagaagcgttctccgcaattccttctcgaaaaaggtttctccgtttcctctacagagggaaaccttctcgattcgctgactgcagcgagagtgcctgcatgcgtcaagcgcacatcgatgcttcgtttgtgcggttcgtcgagcgttttcctctctgcatgcggaggcgagcgtttctttcctcggactcgtctttgtggcctggagtttttctgcttcgctgggattcctccgtatttgcacattcacacggtgctcgcgagacttttttattcgcgccgcgcgaaccacggcccttcggcgcgcatgcatgcgcagaaagaagagagacaccgagcagtcgtcctcccgcagaaagatagccgtttctttcctctttctccctccaccatttcttctttgtctcgactttctccacgaacgcgccaatggctgaagaagatcgtcacagtcctttccctttacccagttggcggacatcgcgctgatcgagactgcagggaagcatcgcgaaaggcagtgtggctggtgcctgtcgtcgtctccctccctgcgtctctcgagagaattcatgatgtagagacca

SEQ ID NO: 1594 - DNA, 2270 bp, Toxoplasma gondii
  source 1..2270: mol_type = genomic DNA
cgttggaggcagagctttgcctgtgctgccggcccttctttttctgtgggctggcggggtttacactttcagaagaaacctcaaacacttcaaggtcgacagctctcacaaacattacttcgtcctcctcgttgctttctcccttgccggcacctcccgcattgtgcaatcggctgatgtccggggacctctgtctttcctcatcactctcaataactattctctgtcttccgagaatgggcttcgcttgctcgccctcgttctgcatcgtcagctgcacattttagtcacttctgctgccacctgagaatgccagggtgtgagctccgcaactcgtctacaagccgagtctgtcattgcagctgtgcaacaaagttctatgtctctctcgcttcctccagaagtgtctggaagcgatccaaatatccaccccctcagaggggaagggtctgaaaggaaaaagagctgaagaattccgcgacgagacttgatgtcaccgacagagtcaaaagagaggcggacgggcagcagaaacaaggaacatgagcacggtagatttgaggagagcgacgcttctgaatcctaataagccgctagagtgacacaggttgtaatctgaagtacaaaaggcactgcaggtaagaattcgaaagttccagggtttctatatacagaagcatgcgtcgaagactccaaggattgcccgttggagcaaaggtaaagaaacgacgatcgcgactgaattagaatggacaaaaaacgaggggaaacacgggacaggggcacagacccacatcagcagcaagaatcgatcgggagcgcgggaaaacgcgcaaatactggccgaagcgagacgcacacggcgtacagtttttctttgcaatgcctcggagactccacaatacatccatggaagagccagagagaaaataacaacgggacggatgaaagtagaactggtggaagcgggcgtgtcctcaaggcggatctactcgtgggtctcgtaacctagatgcgccaatgacggggaaaagcgagtttcgacaagcaaaggaaacaagcgtaaagtgcaatggaataagagagacagaaaacgactaagacaaaggtacatggtcagcagctggggactgtgatgtgctgtgtctgcgggcgaggcagcggctttcgttcatcacttgggcgaatgccctggccagggactctttgcgcccttctaggtctatcgaaagtggacgttcctgatctcctgagagttcttgccttctgaaaaccaagacagggagatctgacatttttctccccgtttgtcctcgaaactttagtctccaacgtgcggttgcatgcactgcccgtgcatctgcctcggaaactgcgcatgcggcatcgctatcgagacttctgaaagtctctcgacgtgcagcgataagttttcgtgacacgcctgccagaaacgttttaagacaggaaaaataagtgatcaattgcttcagccaatgaggccgtgctgccaatggccggtgtcgaggcggcccgtgacgtgtgctgctttttttctgcacgcggcatgtgagcagccggtttctcttaaaagaatcatttgtcctgtgaagcagacaccaaaacttggacatgcctattttactgttgaagtctaaaacgtggcttctcgtcaacaccgatgacagaaacttgccggcaaattcctgtcttcaagcgctcaagcagagcagtcgctattgttctgttctcatacggacccaggtctggacgatgctggtttcgcatgttgtactttttgattcccaaaacactgcctaatcctgctccagaagtccttgaagttcgccgagagggaggttggggagtctctgcggaagaaagtcaggaaaagtgtgcgttcgttgatcgtaaacccgctcctgtgaaagagccactgcctcctcggtttcaccgggaagacagagttcgttccaaaaggcgcatttcttctctgtccagcacttgcgtttcttcctggtgattcttctcattggaagttctttgcctctcaaaggcttttaacccttgcctgcgggtcacagccagttgctctgaacccgtcgcgcaccgttccgccgcttcgaaactcgaattcgcgaatttgtcgggttctgagttgcgttttctcgagactgcctcgtgtttcccgcatacgggtcccctctgtggtcctttatcaatttcgttgctgggttcttcctcctttctcagtggcaggttccaaaaaa

SEQ ID NO: 1595 - DNA, 3178 bp, Toxoplasma gondii
  source 1..3178: mol_type = genomic DNA
aagttgagaagctcatttggagtcatgtcgaggcagagaagaacagacagttcggcagattgcaaaggtggggagaaggtctggaagccacgaaggagattgcaagaatcgatgaagaaagttcggtttgctgtcactcaaggagatgcaagactctgcaggattctccttctctttctgtcgctgcgactcgccgtggtggcttgttcccttgtctgtagtcgcctttacggtcttgacgcacgcagccagaagaggtagctgttcatagacatttatcaatatttgaaagtcgcattcagcgtcggtgtttcacggcgcctccacaggtttttcttcaaacacgacaaaaaaccgcgcttcctctcttcaacttgttgcggagctcttctctctgtgcctgcgtacctgctgtctgtacacttctgcttcgaccccagttcgagaagcatccgcttgttggcttctgtccttctttcgtcaccgagcctccaccttgctccctcactgattagagaggcctaggcatctgtctctcttcttgcactgtgcgtttgctgagaaaagacgccgagtcacccttcggcctagccacgattacaaagagttgcgaaaaatatgcatttattcggagaactgtgaatcacatgtatacagcacgccgagtccctctggagcggcctgtgtggcagaggaaactctcgacagaaacgttcccgtacgtccgccttttgtggtgcgttgcggcttaaacacccggtgaagttcagctgggagcgctggtcacatctgagtggaatgtgaggagttcttctcgcgccgcggttccttccagacagctgggaggtgaatgcgcgttccccctcgacagaaagacgcagaaacagtagactcgatgacgcgtacgcacactcgttgagggatgacagagtcgtcttgtgctcaactcacacttatgttttcctctatgtataaatagttacatatatacttacgttattcacatgcttatacatgtatattggcaaacacctgccctagcgcacgagaggtagaagggagttttcgttggccggtgcagaaagccgagaggctgggcaacgcagatccacaggtccacgaaaacagaggggagaaagcgtcgaagacaggcgcatttgagcgctacccagccacgcatgtgcgagaacgcgtgcacaactcatcagctacaatgatccaataattatttataaggagacatgcagaggccttatgcttatttatttatacatatatatatatattatatatatatatatatatatattcatatagatagatagacgcggcggagagaaggaaaggcgtacatcgtgtttgagaggtcacgggcgagacgcgagtcccttctgctgagatggggggatggctatttaccatttttcgaaaaaagcgtcagctgtggagatctgatttgcgcgaagaacgtgtgcttgcttttggtgtgacaagagagttgcatcttgccgcctcgacgaaggcacgagaaacagtaccttcgcggcaggcgcgaaagcaacacgaagatcgacgtttgcgtggggtgtatctccgaagtgaatttgtcttttatcgctgggggggggggggtcggcaagtgacctagcgttcttttcacgtagctgcactgcagcgcgaggagagtcagagaagaggttttcgcaagttctagagagagaagacgagagctcatgtttgtcgacgcaagttggtgtgcttccgaatcgccaagaaaaaaagagttccttcgtcactccttggctccacagagagtcacacgcatctctctctctttaccatcgcgtgtctgctctgaccggaactaaactgccaaacatcgagcacctgtctctacatctactcgtggggaacgtgggcggtcgcagtacacctgcttctagatgtctactccagacacagagaaataaagatacgcgcatgcatgtgtatactttattgagaccgagatccccggagccgagtgtgcagccgagaagaaggcaagtccggaagcgcgcgaaaaatacctctcaaaggttttagaccaccccccactcttggttcatgtcgaagtgttgtgcatccggacttcgtctctccggagagtcgctttttcttagaaactgcgaagcgacaagacggcgttcgcggctctccctcgctgccacaaaaaaagcggaggtgtctgtagacactcgacgaagcctgcagtcgcacgccgtcgttcattacggcactctcctgaacccagtggcgcagagtcacgcgcatgaagacgccgcggttttcttcccctgtcttgtatggaagcgtcgcgccaagttcctcggtctctcaaagtcgcaaggcgtcaagtgggagaaactgtgctcgctttggagacctcaacaggcgttgtgtcgcgtggtggcgcgcccggttctttgcataggcaatatatggcccctagctgcctgacctcgcagcgcgcatgtgtggttgctacgcgccggttggcgttctgcgtcgactaagcttcttctttttccttttttttccgacttctgcgcactgcagtcttaagccggctgacaattcttcgcctctcatgcccggctgcggcgtggtgcaagtggctttccaagcggcagaaaagtcttgtgcatctcatcattgctcaccgccgccacggccgttgtcttctctcttttccgctccgttcccttccgctttcaactcgagacgacacacggcagcgggctctcacagatttcttgcgtttcgcggggcgtgagaactcgccgacggtttgcggcaacgcgaagactctgctttgtcttcctataaagagcaaggagacagggcgcgagcgacaagagcggaggaggagcaggacgcagcagccacgaggtcaggctgtcggtgatccggtggaacgaaacaatggatcagcaaccgcgtttctgctctgcgcttttgccgccctcctttcgatatcttccgaggccgcgttttagtgcgtaagacaggggcgaggagaaggacggatagacggttgaaaaaaaacgtagctgctctttttctgatgcgaggcgtcgaacaagactggagaaccgacacacgccggcgtaactgctggcgacgcacatcctgaaaa

SEQ ID NO: 1596 - DNA, 3432 bp, Toxoplasma gondii
  source 1..3432: mol_type = genomic DNA
gacaatgtatgtgcttgggtgcaccgaaacgtcccagttcctttctcgggcatgtacaacctcttttgcagtttcctctgtcatcagagaacgcctgaaaacgcgtaatcttgaaacgggaaacgctgcgcggttccgtgtgcttagaaaaaaacatccgcacaattcagggtctagatcagtcgcactccgacggtctctacgtgtcactcttccatatgcgatttcgctctggtgtacgtgcactttacagaagctgtgcggacatctccgcgagcaacgtgaaaatatcaaagggagtggatcgccgtcgagtgtgttcacctcgctacagcatccaggattcagcatttctccccaaacagcatatctttgcaccattcctctcataagcgccgaggaggcgcccccgaatcaaactgaaagaacagttccagaattgtagagcaacccaattgtccgactcaccttgaatagacagtcagctaggggagagtctccgtctgcatgcacaaataaaacaaccttgaccctgctcctctgagttgcggcattgattgccctagtcaatcacgttgctgtctggcaaacaactggttcacttggcggtgtctctgcagctggcgtacgaaacagtgaagcggatgccaatctctttcgactgcgtctcacgtcgtctttgctgtcgtgtgtagctcctcgaggaaccggaggacggctctgaaatcaggctgggaccgtttacaaccacaaatttccgtgcctgtgggttgggagtgagctccacagagagagtgatctgactagtgggtgctgcgctatcaccgcgaggagcgtcagcttctagacagccgccagcacgggcggaagttccgagcgcgcgagtgtgattcttctttgcctgaaccagtgtgatgttctcgagaccagaccgatgctcagagagaccaagcgctccgcagtttcgccggagcgaaaatggctgcgacacggctgccacgggacgcgcaagaaaagtagacgctcgagagaacgcctctgtcgacacgagaaagtgaaaaggattcttcaacacccgacaccaccccagaggggataaatgcgtagagtaagccatgagactcacagcattacttacacagggtgctctcgcggagtacggcacagatggatacccccaaaatcggttgcgggaaaagacacagtcacctgaaaatggaacacagcttctgttgcggcggcggagaaatgggagacgcgttttcggctcttaagcagcttctcgagtcaaaaggctggaaaagtcgagcatgaaacacggcacactgctgttctaccgcgtaagatcggtttgtgactctcgctagatgcaagttgaaaagatgcgctgtccgccaagacccgaaacgcatgcatttccagccccaggaatgcctggcgatctctgagtcacgagctatacgagtttttgctcccgccccatcgataagtagccactggtttcgaacttcttcaagcgaaaaggcaccgtgtcacgtgagaaaaaacggacgtgttgacatgccagaaaggaagagactgactctcacttccggtggatgccaagcacacacgcgtgtggagcgtcaggcgcacgacaaacaagaacaggcgaccccgagcaatcaaacgcccgttctgtcaatttccacttgactgagaaagagatgacactcctagctttgaggcagaatggcgtcctcatgcatcgatcagtcatatgctaggaggtcaaacagtgcagtgaaagactccagtgacagtggcacacctgacggtatcgaacctttcttgttccccatagtggcatgcctgggttgtttgactaccgtggcgtgcgggcaaaaagatggagactttattagtcctgctgagtacgctcaaggatgcacggaatctccgtacgagactaccttgctgttagccaacgccgaggcaagagttagaaaatgcacatcgtcccctaaacttcaaaaacaaactgacactccgtactctccctcgggatgcagggcagagccgatggatgcaacgcatgtggcgaggatggtaaacgcagcgacagaaggtgaaggttcccaactgccatctgcagggaaggacggaaacagcagactgcacaggaacgctcaggcatcgccgccttccactggggtgcagaatgccgtactccaggatggcaaggaagtgagctcatatgctacctctttccgcggcgaaagtagcaagtcgatgcaaagcgtgcacacacctcacgacggccgtactgtggcgtaccgtgtcatcatacacccttccgtcttaggtatgctaagaaaagggctttgtcaaatttttcccaagacgcaaatgctgacttgccgcaggaaactctattgaaccgaatgtagagttcaaatgagttcggctttatttccttctggaaaccgtcggcctcacaaaaggctcttaagcgaaccatgtgtggcctccatcaaattttgccacacatccgctcaagagcggggaaaagtgcccttgtgaaactctgtgttaacagagaaccaactggattctgctttcgcttgggagagcgccggtatcggtagttatttctcagtctcgtttttcttgatctaatgaaaaggtggaaagccccgaatgtacaagatcagaatacaaaatgcagctccaactctagtttccgatatgtttaccaaagagctgcgcttgtcgactcagacgagttttcctgtagtgggtttctctgttaactcaaagaaaacaaaggctcctccccctctgtctgaaaatactgcagcgccgctgtatgatcggagttcatccgcaacaatatggagagtcaagaacaaaaccgatgcataatagccttgatgtcaacagcaccgtttcctgcacccgacgggtcttcattaccaacacctgggctgcaacacctcctatgagtgatctgccgatgcaacgtgggtccaactcagcttcgttatttcactaagacagtatgcgtttgctttccccttaaccaactgtcttctcttagagtcagtctctaacggaccaagagctactcgaacaaattgtcacagatttctctcttcgagcagttcgcttcgatgactcggtgagccttgaatgcgatatgcgacgaatgggatggaatcaaagacacagcggggaaaccttttcggttgggagatcggaaggctagcgaacaagtgttccaaagataatcgaatgacagctgccggttttgcaaatatgcaagatgtggtccttcgcttcgatacccatacagaaccttgccgggccataggagttgctactcatgcacagttaagtaccactccctgaatgaatatctacactatgccctaactcttccttgacgtacca

SEQ ID NO: 1597 - DNA, 1454 bp, Toxoplasma gondii
  source 1..1454: mol_type = genomic DNA
gaggttcgcggactagcgtgtgtacagtcgtattcttcagtgttgaatacgagtgatagtaggataccgctgtgtctctcgagatgtaccttttatgcgttgtgaaggaagtggtgtctcctcagcttccctgttgaaacactccgaaagccatgagggtcactcgatatgcgcaagttcggggtctccggaaatgccattttctagtagagttttttccaagaggaaaggggaagtggaggaacgaataaatgatacaccagtgaaaaaggaatggttaaaatcacatgagacgcagggatctccttctgttcgtgtatccctctcgaagtgaacctcctgcaggagacacgcgaatttgctttttccaaaagcagtagtgacgccattgaaaggagaaaaaaggggaccccctgacagagaggacagagagaagcacaggggtgctggtgtgccgcgcgctcgctgtgtgctataattgttttttagttttactcaactgatagaatcaccgcgctgaagatgagggaagccgtgcttaacggcattgcgccaaagagaacgtagcgtgatccaagttaaaagaatggagcgttgcactcggaagcaggaaggctgcgaggcactggaaaagattccccgtgcagggtctgtgttcaggctaaggcccgagacgccaggctcgtgatctgcatgtttctggaacagaaatgtgaattcagcaaaccaacgttttcgccgaaaactagctctttgtgaagcacttgacgactgtgacgccgagaaccgcttcgacgtgctgcttctcgtttttttgacaccacgggcttccccctccttttactcgctttcaccttaaagcgtatccgctagcctcctgcctgttcaatcctcgagtctcttcttcatgcttctccattcttcacattcactcctagacgagcaccagctacttgcgatagcctccggatcccgaggctgttgatttgccgcctcggcctgaaacaaagagaatatggcagcagacgttccttcctgttgtgatacggttgctcacgaacggcaactattcccctcctcgtaatccgtttgtgcattatgcagagaacatcagcaaagtcaagggtagggagtgcgcgttgcggagacgaccgtgttcgtcttcctttttatcaccagttgtttcttcctctggcgtgatgtttagatttgttcctctgctagctaagaaaagattcatccgcattattaagagaactggacatcttaatttcagaccaattcgtccagagacaacacttttttgccttcagcgttctgcctgctatttcatccaaacatagtggaggacagtccgtttctcgttattatcttcgtaggcgtagcttttgctcgtagccgcatctacatagcaacaagcgtccttccgatatctgcccaatgtctcgccgaaa

SEQ ID NO: 1598 - DNA, 2736 bp, Toxoplasma gondii
  source 1..2736: mol_type = genomic DNA
aagtccaacgactttcaggtgcttcctatcaagtttatttattcacgtgtggtctatccagcaggagagagcgttgcttgccgcgtttgttgttgctcatttgtggggtccgtcatctatgcagacagggtacaaaagttcgactacactgtctgtaccctttacattcattcgccggcgcatgtgtgagtctctgcggtcccctaaaacagagagaatagatgactgacgtagcaatgaccataaaagcacagctttgccgcatgtttcctccctatcttctgtaggtgtcgcttagaccccaaaactaagacaaaaggagttcagattatcctgtgaactcttcgaaaacataacggcatcggaggggttatacgcctagtataattccatttgacgcagccaggcgttatgaaaggagaagaaacacctgagaaagcaggcttcacttgagcttaccgagtgattcatgaataggaacaggctcagcctttccagcttcttcttctgcaggagcaaacgaaatcgtgtgagtagtacaaccggtttgctgaggaagtgcatctgagtaacaccgtcctgatcagcagattcgcggtattttgtgacaaagtcggttccagtttcccagacaggcggcagcacaggaacgaagaaaatactgagggcagttgccgcttctttccttcgaaacggtgttttttgcgctgcagtattctcgtcgctggactacgcagcatactccggagggaaaaactgttccgtcaatattgtcacaaatgtaaacgacacaaacacacgacaaaatgtccgtttaattagccctctggtaatctaccttttttcacaccctgttctacctccacagacgggtaaccctacaatgttcccctatggtctgaaaacgcatttcaccagcggcgtcttgttcgaagacaaaacaaaacttctgttcgagaagaggcccccgtttcgctgcctaagttgacataaactgttctggctagagaaatcgccccccatttgaacctttcacagctagatgcagtctgcggagatagctcattccaaaggcaacggaaagctcagggacctgcgcattgaccgaattttaagagcaaagggtcttctttccacactcctctttacctgttttgtcgcacgggcctgtgtgagcgaggtctacattcgcgcagacacgttcgcattcatttgcgtaagtcttgccgttgaccccacattggggatcaaagatttttggacacatgcagactgcgaaaaggacaaagcatcaaaccaaagagcgggattcgattatgaaaacacatccgacactctaacgcgttcaccctaaatggccgtctacttggggcggcagaggggggggacggatttttctgccgtgaaacgaagtaggagacgggaatcctcagtcctttacggaaaacgagactgcgcgagcataagttttttaccgaaaaagaaatttttaccgaagaagagataggaagaatgacagggtagacatgtgtcgatgagaaacccttgaggttgagttagccagactcaatagggctagtcagttctacgttccagttgttcgtgcggtgaataaactgccatctccctcctcaaaaccttaattcagacttagaacgtcgctagttcgtcgatgttgaaagtgtattctgttccgctgtaatatctttctcacagtgacgggcaagggtcgcgcacgggagtatcgcgatgcacactcacgagtttgtcgttccgctgccatgccattgcacctgagaggcagcaggcaggcaaccataagaacggcagtacatttgctcttcatgttggcaatgtcgctttaaatttacaagggtcttcttccaggatagagccaagttgcaccgaagactgtagaaaagggatttacccgggcgggcgctacctcggctgagtgcggacttgtgacgctctcgacgagaggctttgcttctaagaaccccacgacgtctttgaggaggaaaaataactcctgtagaatgtgtaaggacacgagtttcacgctacaggctccacaagagctgatcttcatcgcttcctgctggataaatcgaggaggtcatgtttgcatagcagcgcttgtcgtcccttgttgtaggcctttgacccgcgccggatcaagcaacggagcggggtaatagattcagctgacggtgcgctgtgcaacttggcgcaaattgcgttggcgccctgcgaaaagaagggaccggagtcaggcgggccaagactgctgaagtgactacgcaaaacaggaccatcacgctctgcccaaagagacaagcacatgcccagagggcggcagtgtacctgtggatgggctttgttgggaacgagtcaacgaggcagcaagaaacatctctacaaagttgaggaaagattcgtgtgctgaggggggactagctcggacttttgtctaggggattctggccgctggggagcacctgagggcctgtgtgattccttttcgacgacaacggaagcggcgcctggtggaaaaacgttttgttgaagtttctcgaaaactacgactcgcaactttcgtctcaaggagtgttccgttggtgacgtgtgctctttctcagcttcagatattcgcggcccatcgggccgaaaagtctccgccgtgtgtgttaaagtggcaaatctgtatattcatcgtccacgtgtcaacgaaaa

SEQ ID NO: 1599 - DNA, 2816 bp, Toxoplasma gondii
  source 1..2816: mol_type = genomic DNA
gaagtattggcagacgccgaattcgtcaccgtggtactccaaaaacgatttggggggacaggaatcatcatcgggaccaccttcctcgcgtaagtccgacaaaaaccgaccggactgtagataacgtgcagaagacttgtccttcgtataaacggcgagggaactcggacctcgaatccctgccgagtcactcaacgtacttgagctggtactgcaaaccgggtgcagtcctggcgctgcacgcctgttggcaaagatgcagtcgtcgttttcatcactgtcctcctcactgtcctcatcactctccgtaacgaatacaattgaagggtcggacttgcaaacgagcataggtgcttctggactaccgtgctgcgcgtcacgtggatatgtgtggacaaccatggtcccaaagtgcacagacttcactctcgataaagccggatccgactgcgtagccgtaacgggtgccctggggttcgaactgtgaacagttgttgtcgcctctttccgctttcttcccttttgtttcctcagcagccgcctgtacatctctctgaaagacagccgacgtgaaggtcgtggcagcagtgagtcctgtctcgcgcgcacaggtgttcctctcaagttttcgcgaggcggggctgcctccgctgcgctgctcgccaggctctctgctgtcgccacggcttccggtcgggtccgtccattgtcgccagcttctcttggcggagtgtccaacgcggatgaatgcgtgctaattcctcgcttgctgaacagcgaggtaaagcgactggacatggggcttcgccacactgtgtctctcggcggggcctggccctcacaagaaagtgccatgctcagcaacacgcgagaccagcgttgcaggagatcgaccggagataagcaggttagttaaactcgtttcatctccatgccggggactatgcggtatcaagaacaacgatgccagccaagtgaattcctgttcaactctgaacttctcctatcgtatggcacaggagcacctggtcagtccaaacacaacacgctaacgcacaaccaagcccatcgaacaacattcaagctcactactgcagaacttgtctgcggcgcgctctgaacgagccaattcgggttcggcgtgcaagccgtacactgccagaacagtcgctgcctaggtgagaatggcgcttgcgaagagagttgaaacaacactgccaacgccttttactaaagcgaggacacgtacgaacaaacttgagaagagccgaaaagacgacccacagagtcgaaaggaaccatcggggccaccgcacacgctgggcaacgcacatcactgaaacgaaggccaacggcatagagtttggcgttcggtataccacgcatatgtattgcgggcgggaggacagtcaaaagcacctcagccgccagtcgccgaagcgtgatcgcatgcgaccaaaaatggcagtgttcccccctaatagagaagtgacagtgccgtatccactgaaggctcagctcatgtctacgagccctggagagaccgccgacctccacacagagagggaactgcgggtcaaaactgcgaaccccgtaacgacgagtacgctacatgttttttacactctggtggtgcagtgctcgcagcagcacctttcaaaaaccagcaaaagttgagaaaagttctcatgctcagcgtctcgcctcgggcgaccggggaactctcaatatcggccttcgcaagtctgcatgtcggcgcacaatcaacggtgtacagcctctcgacttgggtgggaaggcgatgcattctgtgcgcagctattccccgtttgtaggccgggcacagtgacggcgcgcatgcttgccaagggcaacgccttcggctaatggaacagacggtctatcaacacctagccgtttctgctttccctcagtgacctagcattacgctgtgcgtctgtgcgggacacggccggcgccggcgcagatcttcgggccgcaagctggtccgacttccgttggcgcgaccagcgcacagcgtggaagtcgctgcgagctggcggaccgcgcaaaaggttgcgggacacgcgcgccaggccggtggaaggtgaagtgagggtccgcccgttgactccttccgaactgttcgtggaccaggagccacctcgtctgcgtgcaacttttccagcaacaacggctctatttcctgccagaaagctttatttctgaacgacttcctctttcgtggcgcaggcgtctgttgctcgtttctgactggctgttcgtcggtgtacgtacacggcctgaaagacgtttttgtgcacacaagacgtcgggcgtatttttccctcccaaattctgtcttgcggcgttgcgcttagttggccgaaccagtcagcgcacattcggtttcgcatacaattcgcgcggcaaatttcaactgttctcttgtctttttctaccagggtgtagacagcaattatctcacctgctctttgtaccgtcctgtgtacctagtcacgctgctgcagggacagccgcaaaaatttctacgcgcagcaaccggcagccgattcgcccagtcgcaacaacgttggctttccccacttgaatcggacacgcaagtcaatttcttgctgatttctgttggggccccgtcgttttctcgtgtgtagttcaaatagtgctgcagttgtgtctgccataagcccgctgcagccccatcgagttttacgtcagctcggcccacacggtgcaagctggagtctcgcactgggaagcttcccgccgtgatttgtcctcgaaacattttaaaa

SEQ ID NO: 1600 - DNA, 2058 bp, Toxoplasma gondii
  source 1..2058: mol_type = genomic DNA
caatgctaccgacggaaagaagttaccgatttcacagaaatatgcaggaaggttctccatgcttctcgatgccttttctggggaacatagactacgaggtggacaactgttttgcaccttgaaggtctctgtttgcaggatccgagctccactgtgttagcagaaccttcccttcacatctcgtgccctcctttagtcgtcactctgaatttgtcctaccttcatgcggttgatgtccgagtttttccaatcaagtggctctccatgttgcctcttgcctgcttttctaatcttcctgtcacctctatactttgttctgaaacaacgcgacggctgaatgctaactccggagtcagaagaggagcagcacaggtaccggaactgcagctcggtgctcttcacgccacaattttctgctgtggtttcgtcgaagctttcccttcgaagtggaagatatcaattgtgcactgctatgaaacagtggcagccgcattattcctcatgcatttcacaagtagaagcgttttctgatacgctagaggggttgcccgagtactgtactgcgccggctaatgtcggctgtttcacgaacagcaactaccgcgaggtcttcggtgcagatcggtcagttcctcatacctacaacggagacgtttcactctaaagagaataaaaccacaagccaatcgagaaactgcggaagtcgtcggggacttcctccggctttcagacagataatccacttccgggtatagtgacgtattattgttcaagttgctttgtggctggattcaagctgtgaaaccagcacagggcaatctggtcaccggcacttcgcttctcctctttgcagcatagcagaagcatgcttgtggcttgccccctcaagcgtggtaagttcctccagacttgtttgtttatacttcttgcgtgtccggctgagtgtacgcgcgagatgtttgctgaggtccttcccttctctgcggctgcttagtcttctgcatgtattgcttccggcaggctggtttctttctcgcctaattacactcctccctttcggcgcgagttgtgcctgtagctccgtcgcccatcaattcgcttcagtatcttttcattcaatttcatgaacagaaatttttcctttcgtagtcatagttaaaggtcgtggtcctcttagactcaaccggtgacagcaggcagatgtgcatggcacgagtgtcgttcgggcaggcgcctcggactcgtcgacggggatgtatttgagagtcactattttccgaggtttgcgttcccagccgcaatgcagagagcttccatctcacactgcaaaaagaacacaggcgcggctcaagggtgaagcggcaaaagagagccgtcgccgtgtgcacacgcacctccgtaccgctccgctgacaagggttccaagcgcacccgtggaaaaacaaactcttctttttcctgtccgttccagaaccccccactaactcattgaatcaatcctcttgatgccgtgaggaatcattacaagttgaaactgtagggggtttgactcgaaaaaattggcattcccgctgttccacgagcgtgtctcgcacgcgcatgcagctgtggaagaagtttctgcaaaaaagtggaactcttctgttgaacgcgtgtttgagccggaattccgatgaaatggactgatccgtctgcactttcacattaatctacattcgttggtgtatgggtcacaatcagtttttttactttgctttttccccgggtgcttccccggtcctgtttgtctcccgattgtaggtcgtcgcgccggaagttagaattcagaattcggctgtgctgcttcccttcgttcatgtctcttggagaagcatcagctagaaaggtcggtttcaaaaaggaggcatttcgttgttcttcgcgtctgggaggttgagaggagcccctggagagcagaataaagctggcactacagccagtcttacagagtggcgagagaaacgcgcagtcgattgtggtgtctcgaacgcggacgaccaccatgaccaactacgacca

SEQ ID NO: 1601 - DNA, 1358 bp, Toxoplasma gondii
  source 1..1358: mol_type = genomic DNA
catcttcgattctcccgaactcgcgcacagctgcattgactgcacttcgacctccaggacaagttccatagacatgatcgcgaggatctgtgctcgccaggagggacgtcagtgccgcagacgcggacttccttctcggcttctgggcagaggtgggacgcgaaggccctggcactcccatctcccataccagggaattccgatgctcctcgtcgcaagttgagagagactcgagctccgggtcgcgcagtctgcgcctctcccgtggacacgcagcctccgagaggggcgaggacctccgagacatcctcgagtcggagtcctgaggtacagaagtctcgagggcgtgaagcgcgaaaccgacggagccagagggaggacgggactgcggcaaaggaacgacaactagagagggctgagtgatggaagcaaccgttgaagcggatgataagcacgagagtcgcgaggagccgatgaggacagagcagtcggaacccacgtgacagcaaggcaggtgacagacagctcgacgacgacagctagtggcatgcagagacggcgtcgcactgcgcgttttcattccgtaaaaagcacagcggaaaaagccgctggactcacgtaggaaggagtaactcctcagggaacattggcttccgcggacgaatctggaagtaacgtgcgggaactgagacagctatgcaggcacgacacctcgagaaattcgaggcacagcgagacacggagaaaaggacgacaattctctccgaaaaaaatggcgaagaaggctcctggcctttcacgtggtacgacacggaaatgaagcagaagtgatggttagccggaaggtaaaataaatatgcagtggcaaggagttcgcaggcaggggagccgtgcgaattcacacccgttgcgggaagagatcaaaatgacggctggatagcagtccttcagagaatagagtttgagcatgggcgagagcaaaaagcgagagacgtgaaatcgcaattcaaatcgaggttgaacaaccgaccagctaacagaactctttccttttacaagcacgaattacccgccacagatcgcttgacgcggtcagcccgcgaccgcagtctgcagggcacagcctgttagatggcagtaccgtagcgcaaaggacaagttacctgcacacggaaggacctggagagggaaaacatatgaaaaacctaaacctcaccagatggcgcggtggtcttgttgactcgtctcgaaaaggtgtcttgttcgctggcggtcagcagcaagatcgccgcttcatcgaagattgtccgaagtcctgagagcttcgtttcgttcagccagtggatcctcactgaaaa

SEQ ID NO: 1602 - DNA, 1948 bp, Toxoplasma gondii
  source 1..1948: mol_type = genomic DNA
aacagccgctcgcagcagatggagattactagtcttagctagtggtgacggggatcactctggctcggctgtgcatccgtgtcgggactgacgctgtgcttctcttgttcatgcctcgtttcgcagacttcgctaaaccctattgtggttccccagtttgctcgcgggtgactgaggaactgtaaaccttttgaatctaacgcctccgtacgcattctatccgttcccgaggttcaggttggcggatgaccctcggattgcctgtcggtattctctatcactgacatgctttttcgcttccgctttccccgctaccaatatgcgtgcttatctctgaagggagaactacagtttcttgctttgggaagcagagactatcttcgtagcgaggaaactcgtggacgcgaaaccccaagtaccggcagtctcaataccaaacacccgtaggaatagtgtgagatgctgtgttcccgttcaagtacatctctagagcggagttatatttggagaagacatggttcgttcttggctgcgcacttcagactggtccaagtggcgccgcacatcaacggcttccaaaactaaccgtacagagttcgacttacttgcatcgcagggatttggacttcgactctagctcttccctctctgggtgttcagtgtttcaggcagaaaaatacagggaaaaaagatgtttctctgtctcgttcagaacaaacctagctgcatactactcgatgtgataatttttggagtgggtggctaaaatagatgcacagattattcatagaacatcgcgctctctggcctctcagatcgcaggggtcgtgtgtccctatcaattcgccggtttgcgccgacgaactaaatacggaagctgaagcctcgctcttggtgtacacacttcggcagtacatctttccatggaaaacggcatgttttccgaggccgagaactcggatcagtggaacagaatgtcgagagcaggaacggccataaataaacgaatttttctggttctgcgtgaccgccacgataccaggtagacgtactgacactgacaggtagcttcggtgtctttttttcttgttggttacaacggaatcctctccgtagtcaagggccgttacgcagcgcgaattctcacgggagcgcacaacgagtgtctcttaaacacatcgtttgagcatggtcatggaactgccagtctctaactgacggcggattatccgccagacatgtgtgtactgcgcatatacgcagacatgtacttgttcttacacaagtttgcgtgtacgagcaagcggaccaagaccatgacgatgtaacagtggcaccgtcgacgaatctgccttgctcgatctagctcgactcggtaggtcggaactctgagtatcacgaagtataccattgcaaatctattttcctcagaaatggaaattcaacatttcgtactgggtccgatcatgagctctgccatcaatcaaatttctgcctgcacgcacactccgattcctgcaaaacaagggtcgtcccctctctggctgatttttgtgcatgcaactggccccgtcagggcgagaggcgctttaaagctttgtgcgcctctagccgtaaaatcttaaagtttaacgtttaactttcgttttatactgtcgacgacaagcacacaaatatggagcctgcctcttagttattcgactcttcccagagacggcccactctgcttcagtccccgtttcgtctacgcctcgctttcgttttcatcgcagcagcttccaattctcaaactgccggcttctgcccgcgataatcgcgtagatcctttattccgccagagcactgtcacaagtgtgcatctctgtttctgttcgttttttgctcatccgttcaagctaccagggctctcagttgtcgtgccaagctgggaaataaagacctttcaaga

SEQ ID NO: 1603 - DNA, 2723 bp, Toxoplasma gondii
  source 1..2723: mol_type = genomic DNA
atatatctgcatgcttctcgtttctctctctcctgtctatcgatatagatagaaacatgcgtgtcgattcgaagtgaatgcgttttagtagtagactccggacgagaggagaaggaaggagagagcgaatcccagaagaacggaggcgacggctgaccatacaatttcctttgcgagacttctttccctgggagagaatcgaatatggtagatgaagaaacttgcgctggcgactaggccgaggaaaaggaggacgagagaaatgacgtcgaacaaccgtggcgcgatgaaaatgggagtcggcacaaacttcggctcagtcgtcgagccgggggcttggggagacgccggggacgcggctgcatgcgcgagaagaaggggcagacggcgaaggagaggcatcgtgctcgccagcgaaaacctgaggctcggtgcgcagggtcgcatattttcttctgggcgtttcaagagtcgaagagagggcagaagacgacgaaactccggagacggagacacgacgtcgacactgtggagcacacagagagaagaacgcagagaacagggacgacgcgcactgcgggcgagcgcgtgactccgagaagcgactctccagaagctcggccaaacgcgagagcggcggacagagacgaaagccggaatccagaagggaggcgaaaaagacgctcgcgagcagcgacagacgcaccggagagacaagagaatgcagatcgggcaaaggggcgttgaagtgaggcttcgaaaaagacacgaatgcgccaatcaaggaagcgcggaacaaggacaaatcaaacaagttcgacgcaccaggcgtccgcggagagaaagaactgggacgcgtcagaaaacagttttttcgtggaaaaatctgcgatgcaacaggcaaaaagtcttcaagagttccaccttctcatgcagacagaaggcagagcatggcgaggagacagaaagtcaaagttcccgcggagacgccgtgcgcaaacaccggcgacaaccaaagttctaagagaaaacactaatcgacgcaatttctgacaataacagactaggcagacgccgcgacatccaaacgcggcaatactccactgcctgtgattgacatacatgcacttaaggaaaacaaatacaagaaactgcaaataaatatatatatatatatatatatatatatcgaagatgaactacgcttgtattgcatgcacctgtctacacacacactcttcttccttgtagatgttgaccgatgcacatatttatggacgccgttgtctatgaagagcacagagacatactacgaatatatatatatatatatatatatatatatatatatatgttttcacaagagtcgacacgcatgaggagacctcggtggtattgtccgagttcgagaagagcgatttggggagagagactcttcactgcaatgctggaaaagtcgattttcgctgcaaaaacagacgagaaatgatgagcacctgcagaaggagcgaatggacttcgcgaagaattgaaaacgaaagtcttttcttctcagagagacgggaagaggcgagggtgcctcgtctggatagacgaaaccaacctttatttcgcttttttcccacgaatctttccttctgcacatctgcacacaaagggacaagctgcgagcttttctttttctcctccttttcttccctttcgtttcttttcttctctttttcttcgccttttctccgtgttccacagccgaaaaagagggcgcatgtaagctgacggctctcggttctccgctagcaaagcagtccgaagcacactttctcagtgcgccagctttttcactttctccgcttttttactttctccgctttttcactttctccgctctaattcagctttttgtgtcgcggcaaaacagcctcgccggatggagctctcacgtctctcgacgtctcgctcacgttctggaaaagtgacccgggaagtgaaggacgctctggtgagttcgcctgccgctccattgagaaatgcctctgagccaagcagcaagagagcaaggaacacgagggagaaatccggttctcttctttgctttccatgtctcaacgtttgcgtctgaagaggagtttcttcgcagccgcgacgagggggcccctgcccgccttttcggtcgcctctctgcggttcttgcgcgtttccggactccaccgcgtctataaattcgcttcgaaagcgaggagacgcctgtctcctgagacttctcttcctgcagactctgcagggcgtttagctttccttctctccagaggaaagtgcgaaggcaactcgcgggagcacggcgtttgccgcgacgtgagaaagcgagagaaaacaggaacaggaacgtcttctcctctgcctccgaagacgtccgtccgttgcggtcaacttgtctttttttctcggtccgacttgtctcccccgtctcctcgttgccgtcgccttgctgtgtgtggtgttctctcttgtcggcatttctctttggccagatatgaagactgagcaagcagtgcagctgtcgcttcgttcgcgttgaagacgcgcttcccatccgactcctgagaggcctgagacaggacgaagtggacgcaggcgaaaggtccaagtgtgcagagacgcgtcgaactttcgagccaagaagacctgaacagctttctgcagagacaattggcaaggcggcgcga

SEQ ID NO: 1604 - DNA, 1666 bp, Toxoplasma gondii
  source 1..1666: mol_type = genomic DNA
cagcactgtcgacgtcgcgtcttgtcgactcacctgcagtttgctggcgagttgttcgctctgttcctgcagcgacctcgagtccgactcgatttcaatcgttgcatgcggcgacgcgccgccgacggagaagattccactttcgaatcgcttcgaccgagcgcggggactgcaccctatcacccgatagcgcgcagccgcaaaggcctccgcgaccgcgccgcccagcgcgcctgagtgcccgaagaggagaatcgatttacgcaggagactcatctctcgacgaagcgagaaacggagacggctgctgacgccgggagcgggacgagagaaggaacgaacagaagacagagagggaagcgcgaagagacggttgagacgttggagggtgctgccgcgaaggcgttggaggctttcgtggagagcggaagtccggggattggagccagaaacgagaaaaaagcagcggatgtcttctgtcccagtgtgtctgggggacgcggaagcagagagaaagaggagagagaaaatgagggaaaacaggttgacgaggagaagacacacaccggcgttcatggaactgacagcaggttcccggggaacaaacgccgcgtagagacgcgcgattgcggcgtccatgaacgccttaccttgcgaaggagagcgtctggggcgccgaggtctcctttcaggtcttcacacaccgccaaaaagccgctcgagactcacgtgaaggccgctgagtagaccgaaaacgcgaatcttcagaaaaaacgaagaagcagaggaagtgcagcgaattaaggcgacaactaaggagacagctcggaggcccgctggggacgcacccacgcagttgtgtgagttgaaaccgcaagttctttttgcagaaaaaacggattttttgagtcggtgtgtgtcgcctttttcacgcgtatcgcctgtcaaaaacggagagccgtcgtgcaagttgactccccgtctttccttcgacgatttgaacgaaaacgcggcgaaaatcgctgaccctcccgtctgcatgcaactcgtcaaaaatgcatggcgacaaggagagcgaggcagaaaaggcgaggtaaaatccaagagacctacagggcgtttccttcacacaaaaaaaaattcttctcgcaggcaaaaggagaattttccgtctccgaaacgcgcgcccacgatctctccttaaacatgccttaacgcttcttctggtcgcgtattctgtcctttctttaccctagaaaaaaaactcttctttctctctccttctcttccacggcaaacgaaatctcttccttctcctctctggttccttctcatcttaaatgtttgcccttctctgccgccttgaccttccaacgtcttctctgcgattcttctctccgattgtcctctctcctctccgaagtcacaatccctgcccatttcactctcttctttctgctcccttgtctctttattgtctcctttcgtcgtctccctcttcttctctgccttctccttttgcttctcctccttctcccgcttcttctgcgtttcctccttctcccgcttcttctgcttctccgccttctcagttttcttcggcttctccgcattctcagttttcctcggcttcttgttctccgttttcttctctcttttgcgacca

SEQ ID NO: 1605 - DNA, 2034 bp, Toxoplasma gondii
  source 1..2034: mol_type = genomic DNA
ctcaggcatgacttgttctgcagagtcacgaaaaagcagcagacgcgtctcactcgccaccgtggcgcgccgatcctggcaacagctaacgcacaaaagctctcgctccgcaaaggcggtcttgattttttctcagactcctgcttctctccgtcgggtgactccgcggttcgcggatgcagacgccctggacacacggagggccgcaccgcatgcggcggcaaaccggatgggaggcaggggaggaaagcataattcgcctgcataggaacttgaattaaacagaacgaaaagccttttcctgaaatgagacatgagggaacagtgaaaagagaaccttgcggctgcgcgcttcgcagaagtcacaaggcctccgtgcaactgctgttgaaggcctacgttgaaactcctaagattgtctcgtctcgcgcgaagcgtccgagcggaaagaaaactcagcgagtcgcgaatcctcagagaaagctcgctactgaaacaatcattctagccttaaactcctaaaacgcgagagagtcgcgcgcaacgcggaggccaaaacacatggggtagtgcccacggttggaggtcccggtacagtgtgagagttcgcattgccttttcaagactcagggctgtcgacctttctgtggacgcagaagaaaaacgatttgttccgggcaaaaaggaagaaggaaaaggcgcatgcaaagccgaaccgcagaaggagtgaacgggcaacctgctcagccacagagaattgtccgtcaacagcaactctccctgacacactctctgtgaaaagtgagagtcgtaggcttatctaaactgcgttttgtgcgaagtgcatgctacgagttggacctttggtcgaaaccttgaggtccgtcggttcaccggcttcaagttctcgtttgtagcagaaccagagcacgagaaaacgtttgctctcaaattcccccaaagcacaatgactctggtgtctcctgacctgtcaaaggagactcgcagttcgaagaaaggcctctgtacgcccttctggatttgttgagattcttcttcatcgagtgcagcgtgctgcgtccaccttcgttggtctgtgtgcgttttctctctgcaccaaactatcgatttggagaactctcggtgtcgactgacatgccgatgtacctcaacctctactatcttcaattcccttccacgtatctatatccccaaatacatctatacttctgtctcgctctggagatatctatgtcttcccctctctccgcatatatatatatatatatatatatatattatacagacatgtatacacctccctctctgtgtatacgaacacatatatctacgcttctctttcgtacaaaatatctacctctcactctttgtgagtggtaatctatcgcggattacgcatttctgtagaggtctgtcaaacggccactgcggcgtcgctgccgcgattgatgtcgcccgtgctggagaaaccgaaacatttcgaaaactgaaaaaaggaaacaaagtaacagagcgagacggctgtccatttcagaagcttcgttcgttgtggaggctgcggcaaagggtgagaaagaaaagcgaagagaaaaagctgtcttttacccttgcatgcgcagggcctgcttctcatcacaaggagacgcgtttctcggcgcctcaaccagtcgtgtggggttggccgactttgaacctttgatttcctctctgtgtctgactaatagaagcattttcttttaaagggttcttttcattagacaaaggtcctctctgggattttaaatctctgcacccgcttcaggctgatatccggagcttgtgtctccgaggtcgcggtgtctcgtttctttcttccggtctccaacttttttcttctgttgttctcctgctctttctgtttttctcgcgtctcgccgactcttcgcttgtcgtcacttctcacttttctccttctgtctgaacttcgtcgaacgcttttctctgtcgagacactcgaacgcggctctgcgcgca

SEQ ID NO: 1606 - DNA, 2434 bp, Toxoplasma gondii
  source 1..2434: mol_type = genomic DNA
ttcttgaaggagtttgtatcaaacaatcctgaatttactttggctaagcgcctcgactctccttcgatgacgcaggcaggtgtggtgactgtcggacaagaagcgctttgtcaattgcgcgtgtacatatggattaaacgagatgtgctgtgaacgtcaaacatgcaatgtgagcaaacggcaaagatgttcacgaactaaccttttcataaattattgagcggtccaccaagccccatgcattcgttgtttgtactgcagacataagtgaagcgcagttcctcggaaaacgcatttatttgtggacgtagcctactcaccccttgaaggtgttaacaaagactaatggtgccggttcgctgatacgatcctatttgagcaacaaacgaatataaggtggtgatgtaacaatatatattttgaaaagacatttagtggtgtgttttgctatcaaggacgttgtgatttcagatggtaaggtctgtgatctggcgggatgtgtgcgcaaactggtgtgctgaacgtttatcttgacgaagggctccctttcaccgatgcgatggaagtatgagcccgatggaggacatccgattgcagttccgaagcatccatccttctgcggtgctgaagtctcctcgcgtgtttttactgtttagtccagaagtcaacaatactgttgcagtgtattgatgtatctgttcaacccgcatgaatgttgcgagacaggttgctacccaccgaatgcagtatcgacttgagatggaaacgactccgtcacagctgcgcagttttcagtaaaacaacactttagttattattctgagacccacgaacggtcctgtgtatttcaggaattcggaatgtacttggtagtggtacgccttggatctggaggaactgagtcccccgaccgcaggtgcagatcttacattcggaacacaaatacaactagtattgtagaagaatcacgcaactggcacatcggcatccttctagaacaatactggttgccggggaaagtagcggcatctgacattggcacgggcaggaaaaaacaccggtggtagaagggacttcccactagtataccagtcattgctcagagtggacacccagcggtctgcagttcgggtcggtaacggcaggagcactcggccacgaggtggcactcacaaattctaaactccaccatgtggggtgcctcctagtccatgtatattggctgtgcttttctgagggagcatgtcggcatgaaaagcacattactctaagagggcgcctcaaatgtctcttagcggatgtcggtacacgtctaagcataacgcctagaggtgtacaacaacgggagttcagcgggtgttcgtatgaagtgcatctctcataaatcaatttatcaaaccaaacacacggaagtctcttgcatggccaatgaatgtggtttgtcctgagtgcggaatggaaaccgagaggtgttgaaatgtagcctccttggtgaagtgagaaggcaccgcgcgttacacacttagtaacaaactagcttcaatgcaaggagacagactaacaggatgccagagacagaagtgtcaactgatccattcatcgactgtacagtcaactcgtgtctggcctgcagtgttcgttaggaagtgaatcaattcggcgcaaccgctagcgcacaactaaagctgaaatttgcggacctcagtacacggtgcattactggagagaaaatctcggtccaataggttttttgtttcgatgccagcctctgcgtggtaatgcggatacagttcaggaaaaatatgttgatgtgaaccagagtaattacatcgctaaagaaaggcgcagagcgagttttgttctctcgtgttttgagcactgccgttacgccaggagccccgcctgccacgcgggatacgtgcgagcctatctggttcggacaggtgctggtacggaagctgccgattcaaacggctttgtacaaggcacgttccgtctatggaccaggaacggttccctaagcatgtagggacggccacaggagatcgtctgaatagccgtgtgccagaggcaactccccagagattttgttttccgctagagtgtttcgcggtcgcaataatatgtcgcttttttcctcacgcgaggtcagggttctgttctcgagccactaggaagggcggtttgtaacagagatagtcatcaggcaatgcttttggttgagttttgagtaatttgtctggcgtatgtcggcgccctcgagaggttgcaagctttagttgaacaaatattgtgatcctggacaaaaaattaacagcttcaacaccaagcgcgccctctccgaagactctggaatagcggaccagagatcaaacagagatccaagactttttgccgcaactttaaacgccaacaagacgataatttgagacaa

SEQ ID NO: 1607 - DNA, 2517 bp, Toxoplasma gondii
  source 1..2517: mol_type = genomic DNA
actgtcgaggagagcaatggactgcatgataggtttgtcctgcttccgggggtcttcctgcatcttggagcggctgtagctgtggccgagtccaacctggaacttttcgatgggcagctcacccagctgcttcgcgagcttcttcatgtgttgcctgcagcctctgtgcagttcctggacgtttgagttgaacacgatttggaagcctgcgtcggcgagactcttccccaacgcagggtcgcacacccccacggcggcctggctcttggctcggccgccggcctctgcatcggcgcccttcttcttcttcagcgaggaaggcaggttgaagttgagaaagttcagcagcgcggggcaactggtcccgttcgtgattgcgagttgcacctccatcgcctcctctgcgtccgagaaggggtggaaggcgacagcctcgacgacttgtttgaagcgagcaaagtccagacaggcctcctggactgcgtctgtgtcctgtgcaatctggtcccagcccttgacgcgagccaagagcaggcccggcgcggactcaaagagaagaaaaatctcgttcactgccatcttgtgtgagattcaggacatgatcaccggagacaactggggaaaaaacggggaacacacgggcagatgccaaggcagatacgagcagcgaagccagcgacgcaatcgcggcgttgttcgtgagaggaatgggacagaaatggagaaaacaaggagcgaaagcaggttgatggcgaacgacggcacaaaaaatgcgtggcggaagaggagagaaaaagccagcgttgtgagagctatttacaggaaggcgaggagagtcagaagggaagttgtggcggcagttgcggtgcttgaagttatgcgagagagacccacgtcaaacgggaaacgtccacgggcggcagggaactggaaggcgaaggggtggcaagaacccggaaaaacactggggaaatgaaaaggacgacgccgcgcgtaaacctgagatgtgcaaaaggacgaaaaaatggagagaagataaacaaaagaagaaaagaagacctcgtcgtccagaaatgccgaacgcttcttgttggtcgcagaaagtgacgccggaggggcaggtggtgacttgccgaccgattcaaaagattggaaatgaaagggaagaaagaaaccaaagaggaaagacgagaaaactacccacaacgacgaaacaagagaagaaaagccagttaaaacgaacgaatggctagagcatatatttgtgtggggcgaatgtagcctctgggctactgtcgcagtgtcgacgttgttttgccgtcccccattatcttacaagaacgccaaaaagaggaaatatctcaagggatgaaccgagtaagcagacgtgggtcgcgagatctctcgcaccttgcaagaacgtcagtcccagtcaactttttccgaatcgaatttttccggagcatgtaacgaactgtgccgtcgcgcgttctcgcggccgcagcgagggctcgcagacgccaggggaccaaactccgcctgtgcctaaagtcggtccagcttctttgacagggtccctctgaagacccgaaatttgcccttacctcccccgcctggtacaaattgaccctacacatggatgttaatcgtcagttgtcgcagaaaaactctcgtcgtttagagaaacctagcggaaaagaggagttttcctgaagaacgccagtaactcgcgagtcgcaaggataaggtaccgccagagtcgagtcgccagcgtgggagcgggacaagaaaagtggcatggtggcaaagaagccctgaaccacgcgcgctgtggaacgccgcatggtaaagaggggtggacgcgcattcgtgtttccgtttccggggtgggtggcttcatgtcaccggtgtcgacccgaggtctcgatgtgtttcgatatcccatactgccaagacgaaatccgcggcacgcacactcgcccaaaccgcagcttctggcgttctgtccatggttttcgtctcgtcgtcgaatgcttgtcagcggcgcaccacaacaatctcagctgtatgtacacttgaacatctgctgcgcaagagaggcggcttccaccacagctacgcccaccctcccaatgtggctggactggtgttccacttttgaagttgtcttgcgttctcctggccgtctgttttctcctttcgcctggtctaggggaagagagagcctctgaaccctttggtttgcttacgtcgtccgttgtccgtctgtctcttggcacgaaacatcccggttaccccgtcgatcggcgtgtgtttcgcaggtgttcttgctgcttgcccctccgtctgctgtccatttcgtcttgccttgtgggcaatcacgccgttctggcggttctgccaccgatttgttttctttcctgcattgctgcgatttattccgagcctattgccctcgctgggctctcagcgactccagttcactcctaccccgatttttttttgtgcccgcgaaga

SEQ ID NO: 1608 - DNA, 3349 bp, Toxoplasma gondii
  source 1..3349: mol_type = genomic DNA
caccgccactcacagtaaatgttcatagacatacagttatctttccctgtggagtctgagcttccgagccccttttttggggagacctcgccgtaattgttttcggtagagtcgcgtttccctgtaggtcttccacgttctcttctccttgtgcatttcgacaaaaggtattttcttcagacgcattaacttcttcttgtactttttcttatggaatttacgcatcttgaaatatcgtcgccggcacgtgctgatactgcggacaaaggcctcagcgacaggctgattcggcagcacggaaaaaacaccagggcaacggctcaagagaacgatgtgcgtcagcgatgggagagtgccttgatcttgcaaatgcaagccccgctcttcgcctttggagcggcagcttgtacaacagcgtgcacgtgacaaatctgctgacgccgctcggcctcggcaccgtacattcacatgacgtagatgtgctaacggaagagttactgccctttcaccagccgacatgggatctgacaggccagcctgtacagagtgctgacgccaaccttgcatcagcctttcagctcctctgatcgcgcaagggccagttccagctgggcgctgtgacagggaagtcacaccaccgctcctaaaactttgtgtggcgtgccaccgcctacacgggagaatacgaaattttgcaaggagcacatcggttctctccagacagctcggaagtggagcattcgcacgtggtgcgatgcctctgggcaacgagcataaggacgccatttctgcccctgcccaggtgggaactttacaaaaaactgccattctagcgacgtcactccggtcggtccctgaactcttccgcgaacttcacctgtttggatgcagctgcatgcgcacaccaggtcagcgccttcttttcagtctgaagctccgaaaaattactcctgcattggcaacgtcatcgatgaaaccttgtcgtgcacatctttgtggagcgttcctggggtgaagacgcgttacggaccggaggctacaccagtaacaactgaagtcgcttcagatcgaagtccacgaaatacacgggagaggtgacggaaggttgccgtcgaagagtttctgtcagaagcggatatcccgcaagacactgtcacgaaaagcgtacgctcgccacgctgaaaaaaaaatgtcgtggcggagacatcaggcagcacgaccggaaaatgatgcacatagatggagtagcacagagcacattgtgaagcaagtatgatgccctgaaaaacgaagtccttttctccattttccactggagggtcgctgcggtgacgtatttctctcttgacccgcatctgcagtggagaaaaatggcttcgttcttactctgcatgccctggctgatgtgtgcctctgggactgcatgcagcaatcaagaccctgaggtaggctcactggctactaggcttatcgtacgacttctgttcttgacgttcttcgaatgcctcacaagacgagccgtacaaaggcattcaaacgcgaataaaaccatgcttgcgcgcacactgctgtgcaaaagtcacctccggcaaaaataaaagactacagaggttcggagcctggtgtacatacagacggagccacagttcttcaagctccttgacacattatgttctgcacgttgtagtggcatcttctttcacctctctcacctagctgttgtttcgctccaagtgtttttctagacaatgaaacgcctgttactggtagtcagtgtggtggcttgtttggtgccaacgacccttagtctttctcagcatgcccgatctacatcggggcaacctgctgcgcaggcggcggctgctcccgtaagcaacggaccagttccactactccctgtgcaggatccaacacaagtgtgagacgctgcgtcaagttttgatgaaccaacagagacttcacagaactgccttaccaggccttcccttgggactgttaatgttttccgtagtcacagtctgacgaaagctgctcaggtcgaagttcacggagctcacgaggtagataaggagcaaagcaaggaacgtacgtgagtttaaaggcgtctaggcattcactcttatacgttgttccgtagccagcgaaacagccgatttccaacactcagttctgcaaaagcaacaagaggccctctctgcctcagactggttcagccggcaggtacacttcctctgaatgcgtttcgaaacgtggcgagtgttgtcacaaacatctgtggtgtagctagatgcactcgagcatctcaaaggtaacatgagacgagattgatgtagcatgtgtgtgtaaccattgaaacatcagaacacgaaggaaaaatccgacagtacattcaagtaacggcttctatagattctgagacgagtgtgtgtcatattactactgtgcaacatttcagaaagccccggcgtctgaagggcgacgcatcatgtaacgggcggtcgcggcgagacgcttcgtggacggactttactttagcataggggttgtcatcttcacctgaattgttaccaacgagtcagccgttccaacgtggaagttttgttccgtacgtggattctctcccagcgcaaacaacagagcgcctcctcatgttgatgaaacgaaacagtagcagctcgaactaagcgggtcaacacactgacacaggctagcgggaactgccactatattgcggctcgtgccatgtaccattccaacagacggcgatgccctcataacgaaacatatcatgtgggttgcacattttcaaggccattacatgagaaaagaacccacattttccgactaattggcgtctgaaatctgcttcaggaagtgcgtgtgtgacccgtgacatgtttgtgtcatcgcgggagactggcgggaggtaaacgcaaatctcccgctgtcagcaaagtggccttcgctttgaaattgaatgtcttttatactttgaatgaatcatttcaaagcacgcaagcgcgtctcagtatcatttggtacaaaagcacgcaatccaggggtaaagtctcctgtatatttctggccgttaccgcaaccacagatgggccagttcgatagtgttgatgtgacaccgtgggccttttcatatttccgtgccaacacgcgggttttttgtcttcctaccagacacattgtcgcctggatgtgcttgaagtctaagggcatagtggcgcattctcccgcagtagactcctgtgacagtgcgtggcagtgacttcgtatcaccgcgacaacacaccggaaccggcgttgtgtcaagatgcgaaagtatctccaccttataaaa

SEQ ID NO: 1609 - DNA, 2945 bp, Toxoplasma gondii
  source 1..2945: mol_type = genomic DNA
gtctgtagaggctgtggaagtaacgcacagcacgaagttggcgacgcacgtcccttgagatgtcaggaatacacggagggatgagctttctttcaaggcgggccagtgtacatctggttaactgacaccaggttttattgacccgttgtagtgtacagtttcccgtcgtgtgcctaagagggagcaataaactgttcatcataggcgccttttcccagcggttttctcgtttctccttcctcccgctgtcacaacgcaaattgaaggggtagtgcaagtattacggtagtacagttctgtaacaaaaaagtgaaatttattcccgcgtgtgacttggcgggtagtgtagggtcagggtgtgtgtggtggggaagtagtgtatgcgaagtttgcgcatttccaatggtgcctggttggaaagtgaatccgtctcccgaagaaggggtatttctgttcaacataaacttagctacttgttacactagtgaacgagtactgcgcatgaactgtacctcaatatcacacaaactatctttaaaaatgtgtcgtttcatcgaaattttgacggcagcggatcagggtaattccgggcagtggtagagaactgcctcaggctctgtaatggagagtgctttccgacaccaggagtagtaaagaggttcgaagcgaacgcacttgccttccatagaacgctcgcacatttcactgacgtgaaaagcgccttggcgcgtgcagatgtcttgcgctgataccggagcgtatctttttctggaagtttctgagctaggtcaacgtggttgctgttgtggaggtgggtcttgttggtagaaccatgagggcctcgtagatatgtggaggcttcgtagctgggtatgacgagaaccgaggtatgatgaaacccgaaaatcatggcctgcttccgtcttcactaaatatattatccaggttttgcctgctccccttgaacgacttaccctgttcgatctttcccaactgaggcagacttctttcagattattcagtgtagtagcagttcttttaggctttcacttttcgtgctggggaacctcgtgagcccggccttgttccatttttgtctcagcaaagcgtgacatatcgcaccttgaactcgccatcctacgtgtataaaagggattactcattgtacggcgtccgtcaaaaacttacgtttttctgtcgttggcgattggacacacgattatattgctaatttgtacgttttcacgggagtctaaaacagccgtttacttggggaagacttaaaggtccccatttctcttttgctttctcgattatctaagcgactgggtaccacttctgcctcttcccacgacgtagagccagtccacctgacggcgtagaaccttccaggtttttccctgcccttcccgcgtggtcgagcgattccaacacgtgtctacactatcaagctgcaccactttgcatacattggtttgaatggctccgccctttggtgggagttgtacagatccacatatcatcgatggaaaaaagagtgtgtggtgtgtcactagattagttacgaaagacccttgtagcacagtgccccattagccacacaaaagtcttcagcgcgcgcccgattcaacagctgggctattcaggactaggcttcgatccagctaataccgcggacagagggtgaaacatcgtcaacgcctttttcttgtttccgtttgttccaagaggcaccctcctatccaacgaaagaagaaaacgaagagttttctgcgttggaacaagaataccatcatcctttgaaagggagctcgcgcggtgactacaacgagcgacgtagcacgccattcggtgaggacaacgtggctatcgccctttcgtgttcctaacattttcccctctcaagtaagcggagaccgggtgtatcgaattttctgtgtaagcaatcgtcctttcggtcggatttttccccgctgtacgctctgacgagagccgtcacctctcgattctgggagtaagccgtgagagtctgctgctgttcgtgcgcgttgtcacactgaggaaccgccgttgaccagtttcttgccgtctgtcgtccgcgtttagaccgtctcgtctgcgcatctccagctttttctctcattcatcgaacacagcacacagctgtgtcctctcatttttgctcctacgcacaggtcaagagtttttttccgtcttcagctcctgccgctcgacaccctgcctccgcgcccgccgagccgcgagtcaattgcagctcccgcgccgatttcccctctgcgactcatcgcctttgccactgcttccaagaggttgggcttcgttctagatctttccaagagtttaggcttctttccggagccaaaaacttgtggtctcgaccctgtgcaggtggtcgattcggtagatctgtcaaatccccatctgctcactcagcaggactcgcaatatgtgtgcgactgagacttcgtctgtccacttttgagcaaagaaaggtcgttgaggcgtttcaattcttgccgcatctctccgccggtagggtaacgcacgactgtaatgtcctcgatcaccagcagtccatgcgcttcttctgagggaagaacctagggagccgcgttacctagcagtcgacctttggacgctatcggagtctcagcctaccctaggttctatgatttttttcaaaaacaggagccgaagtttttgctaccgcgagggtacgatgcgttacgcctttctgtgtgtctcagagcgtgactgagcctaggccgcatgtgccgtatccgcttatggcggcaacttgaactgtgttgttcgcggctggaccgtgagagcgccatttaatgaaatgtgttttgcccctgtgtcatttccttcttcccaacagcttgtcgttgaaagaactccagaactaacggactatacaa

SEQ ID NO: 1610 - DNA, 2096 bp, Toxoplasma gondii
  source 1..2096: mol_type = genomic DNA
agacgtaaaacgtgagcatccagttataaccaggtaccaactaaaatctggcccgcggcgaaagaacacgaatggggtaaaaacagaaggcgaaaatgtggacctcactgccgagaagtggtgcctcatgtgtgtgtgtgtgtgtcaaccacggctgccggctgggaacctcggtgtgacagtcacgtctgatcagcacccaagaaaaaatgttcgtcaccaggaaaagaagctgcgccagacgtggccactcactcgagcgcgcgcattctgtgactgggaaattccgaggtccacttatgtatgcataaagtagtctttaaccttgtcctcgagctaaagcaaaaaattgatatgcatccgtctaaaaaaattgatgtagagtattttatctaaagctttcgtagcggaaccagcaaaagaaacagtgtgtttgatgaagaactggttctacctaataagtcacgagattctaacattatttattttgggaattcgttttgctgtgacagctatttggctgtttaagcatgcgacaccaacactcaaacatttttttgcatggggttggaaagctccggcctcgtttgtgtaaattccaaaatcctttggatttttgccccacagtacagaagaaagcttttgcgtcgggtatcctgtcgatttcaagagatgcgttagcagagagaaatgacccccctcgcgtctcaaaataccggattggttctatgcttatactaaaacaacattgttaatgactacagcttccaagcaaacatacatgtttagcacggagacagaatctacagctgcttccgagaagtatcgcgatccaccagcctccacgtcgcaatggcttcgtgacgggaaagagcgccgttggcgtacctgaaccgttcgggatacggcgttgtagtaaaacgcttcacttcgatttctttcttcagaatgtcaagaaaacgtcggcgcgtacagatctagtgaggcatgaaggtgcgaaatgcgaccgtgtggacggcagagaatttgccagtttggaaagcacacgaagcacacagcacacccttggctgcgaattgtcgtgtatgtcgaagtctgtttatggccgttcttcgttcccctcccggacgaaaacacaaggaggaaatcgtcttgcgaaagtcctcggtcaacaactgagagactacgacgaaagttagcacgcgcacagtgactcttgcgtcgcccattcgaaacgagaccaacggttctggaagacgccaccagccgaaagacaacaataacatacaaagcgcgacccactcaggaagaagttgaagaaactcaacaaagtgccaacacaccccttgcgagtgttcaagttactaaaaaaaagcacgtccacgtcgatgcccggtcatggctgtatttacgcgttcactcgcattcgagtcacaacacgcaactggcaggtatataagatagtccttggcttcagattcagcttaagggcacaaggattttcgagactcaaggtcaaaaaccaaatggtagagctttaaaagtggagcttcagctgggaaatgcgacggaagagaccggtcaacgaagaaagcaaaagcacaagactcaagcgtggcaagcgctcgaccctaaccgggctgacccgaacataccctggtccgacgcaggaaacaagagcagctaaccgaggttttttcggagcctgtttccaggactttcgcacacaccgcgggtgcaacgcctttcgcttgccagaaaaatcggggctgacaatgacaacacaaagaaaccgactcgaaattgcgtaactggacgcctgtcacgcagcagagttcacagcgcccccgctgtctcgattctggctcgctcaccacgaaaaaagccaacgcgagcccttgtcaaggtgccacaactcaatcgacctcgttccctggggctacggctatgccatatatttggtcggcttatattccgaactggggaactgacaggctccgagcgcctggagactgcgcaggaatcccactggcgggttatattcggagcggcgatgcccatataagagagactgctgtgtcaggaggctgggagga

SEQ ID NO: 1611 - DNA, 3650 bp, Toxoplasma gondii
  source 1..3650: mol_type = genomic DNA
tctgaacgtagaacgcgagcaagaagaagcgttcagagacaagacgcctgtcccgacagccagggccagagcgggcacagactgtcggagtcacgagtgaagctggacaagcaaccgacgaagcgagcacatgcgaacaggcgcttacgtgaggtagtgaagaccaggtggagcagccctgcgctaaacaacaggaaacaaggggagaccgaagagacgagagacacgctgtccccagcagaaacgctggcgtacagaaaaagagaagagacaggcggccgaagagacgaaagaaacgacaaagggtcgtcacagagaagggaaacacagagaagagagacagagcaacgaaagagaacgagaagagagagcgaggagagaagagaagcgattcacccttctgcgtactctgcgactgtgggaggtgccattgggtccggctgcctttgtccgtgatgcacagcgaaaatcctttccaatcaagcagcctcgctgcctctgtttgtagtctccagatttgctgaaagcaagccgggcaagaaaggtcgtgaaaaactatccaagttcgcagtggggagtttgccgcacgaggagaggcagcgtgacgcgagacagagcgaagagatagcgacgaatgacccggtggcagacatccgagaaaacgactgtttcaggcgcgaacggttcaaaataaagatcttccgatttcgagcagggaccgctgaaatcggagcacaagccgcaggaggggaaggcgtagtagcttccgggctgcaaagcgtcaggcaagccagctcacctctttgtcagtgcgtggcgaagaaaaaatcaggatagaagctcccgcgtaggaaaaacaggaaccgctgaaaagaggacagacccggccacaaaatacagactctactggagagaggcgcgcacggcttctcagcagcatgcacaaaggcagtcagagtggcggcgcatttggagcggccagaactcgccgcggcgttccgtctcgtcgaattttttcactttccatgaacccctacggaaagcctatatttaaggcgcctttggtgttcttcaggagcggcgcggaatcgcgtccgtcacaccgcgaccgagaggcggtctgaacgcgaggtggatttccacactaaagagaggacgccgtcgtcaacgcaggcttttccctctctcttggacaggggagttaggggctttctgaaatgcagcctttctgaatgacgagccgagagagttcccgagaaagagacggctgccttgccggcgccgcaaagcccgctgtgccggttgagagagatcggcggcgacacactcgaagaaaaggcggaaatttagttgcgaaaagaattcgttcttttctgtctacgtagagagaagtatctgcggaaaaccacaaggaacggtgcctctcggtctcaagaaaactgagaaaggggagcccgcacttcagtcgcttgcggatccgccaagcaaccaattcgcgggggggtcttaacccgaattcggcgcgcgggagtttcgcgtgaccggccttgtttttcgcaatgcttctcgagaatttgcaagagccagtggatatgaaagagttgtgggaacggctcgcactcatcaggttccgtctccgcagtcggttccgctcgtagatcctcaaagcctggtttttcgcacgcattcggtgtcgcccgctacacagcctaaccacccgactttcatgcgacacggggacccgccacagctgcggcacagacgtgaaaacaaaactgcagcccctcacaggtctgtcctccgtcgtttctgtcgattttgcgacctcaatagttaagacagagacgagaatttgaggacacagggatgaaaaagacgaccgatgacacatgaggcagatgggagcaggtcagcagtgggcgctccctgtgtttctgtcgtgccgctgcaccctggaagacgagctgagaaagctccacgtggagaatccgacgttcacgactcgtctcacgcactgcgaagtttcttcagaagcccgcagctcaacgttgtttgagagactcgcaagaaaacgcggtgtgtgcggcgctctatctcaactgtgtggtgtgcgggaacaccctggacacaagacgaggttcgcagaactcgtctttttcctgttcgctggtcttgtccccagatctccacctcgtcagttgcggaactcggtgttttagattaatttccaagattcgtcgttagaactgccaatgcggtggcggcgagtcgacggcggctcctggtgattcggcttatattcggtgacagccaccaggagacggctgaggctgttttgcaccagagagagtacggcgctcgtttttctgtggatatttaagtgtgcaggagacgccttccgttggaaaatgtttgccccgaaggccggttcgacgcgaggtagtctgctctgctcgtctcttgttttcctgctctgtcctcagttctcgagtgcatagcgtgcgtctgcatttatcgcgtgagaaacgaggtcgcgctaacgcaggtggcccgccggacgagttttcgcatgtcgcgagggacatatccgcagcgaaaagcagcacgggaaaaaatccatggcagcaccgggagagtcgtgcgaacgggatatgtccgctgagatcggcgcgtgctactgcctggtgtgcatttctctgtttctctgaactcctggttgacggcggtcgcctgtccacgtgtctttctttgctagctttcgccttcgtcttccacctcttgcgacttctccactggcgccaaccgcacgccagaaccccacgcaacctctctgcgtctgctctgtgcgttttcccttgctcggagttgggagagtcccgagcacttctggcatcccaacctattttgtttcgcttaacgtgtgccgtcttttcctcgagcttttccagttttcctcgaagattccacacagttccggtgcgccgcaaccgagagacccgcgcgcgcttctcccgacgcctggtggcgcaaattacgctgtgtcccaagagattcagtctcaagaaacgttgattctacacagaaaactcccgagtgacggagactctccactttcgtgcgaacaggccttcgcggaaatccctctttacgcccagtattttgttctgcgcccctcggcagccggatttgcgaggtttcaccggcagcaaaactaccgccgtttcttttcctttttttccgcttgttcctgttgttccctgtccgtctcttcaggcgttttctttttcgtagttccgcaacactatctccgtcgccttgccgtcgtcggccacagcagcccgacgaacgctcgactacagcacgaatctccctacttcccggcagtgatttgttttcaccgcattcgttcccttctccagaccgctttgtttctcgttcacattttcgatttttggcgcgtctctcactttttctctgccgccgtcgccgctctgtttctgcgtcggcaaccctgcgcctttcgttccagtgtctcggccgttcgggacttcgtgccatctcgtttttttccttgagctagccgctctcccttctttctcgacttttgctcctccgcgtccaagtcttccggcattcggtgttttgcgaga

SEQ ID NO: 1612 - DNA, 1583 bp, Toxoplasma gondii
  source 1..1583: mol_type = genomic DNA
aagaaagacgcagacagggacgaggaagatgcagaaaagagaagagaggacgagcagggaagagagaggaaggaagttacgacaatcacagagcacagaaggaaggaagacagcagaagagactcgaggagaaaagaggaagcagcagagaagaggagaacgcgtgaaggcgagaaggcatgcagcggtggaagcgagttgagggagagagccggtattcttgagagaagactgaagaagaatataattagtcaaaaatggacaagcataaaataattcgttttcagagagaagcacagagagacgaggatgaaagaaagaagcaaaccacagagaggaccggagcagaagacagcgcggagacaggcgaagagacaagcagcgacgagaaactgacgaatcaaggagaggcgccgttgaacagcaagagagagaagaaatggacggggaaagtagaagggagaaagataagattgagaaggaaaaggagagaaacaagagagaaaagccgagaatgaagctcactccaagaattaaggggatagactccgcttggatgggcgtaggcagaagccagtcatcttcctcaacagctttgatgatttctgggcagacgccgagttcctcgaaggcggacattcttgaaagagtagtgagaaggatcgaaacggcgaaaaaagctaatgcagcagctgtatattgtgagcgatactgcaaataagttggaaataagtgaaggaaaagacagctggaagaaaagataacaaagagagagtagaccgtataaggaaaagaagcgagacggcggagacaggtgaccacgacgaggaagaggggcgggtgaagagaggtacaggagacaccagcgttgggaaaaggagaggaaaagttgtgtgtcgcggcaaaacggagaaaagatttccctgtctctcctttctgctactgtgaagtaaccgtagaaacagaaacgctgttgagcacaggcacactcgaggagaggagacccggtggagacttgccggaaggaaaggcaagaaagagagccatgctttgctcaggagctcttctctttctccacaattctcttctttccttaccctgtcggagctctctgttggaaaaggcttttttgtcacggtttaaccgccgcgcgtcgctcttgtgcctcttgcctggctgtcgcatgcacatccagaaaaaggcgcgggaggccgtcggactcttccttgttccggtagagcaacgattttcacggagtccctcttttgcttgtccgcgtgaagcaagagaaagaagtcgacattttcgaaaaggagtcaaagcataacttctctgacgctgatccccgccttcgcagggaagagacacccccgccatcgtgtggttcgcttctgcttcggtctcgggtgctctctgaagttttccccggattttctctgtgtttttctctctatttgaaccttgcattttgcttccgcgctgttttctccgatccaccgccggggttcgccttcgttggcgtggccgcctctcgatttcctgacttcgtgcggcgccggtgagcctatacagtggaagctgca

SEQ ID NO: 1613 - DNA, 2394 bp, Toxoplasma gondii
  source 1..2394: mol_type = genomic DNA
cttttcttcttttctggtgtccacgcaccgaccttcggctgcttgactgcctgcgatgcgagcgtgcacgcgcggtccgcggtcgacggaaccgtcggttttgctcgcgatgccgttgggaatgccgcacgggccttctagccactcagcgggcacacggggagactcagaaacatctctgatgcaatccggaatcggcgcttggtaggcgggacctatgcgcgggtgcgagtgccgctgcgtcatccagcgactgggatcgaacggcattttgaagactgttgaaacacaggcttcaagcgttaggcttaagcaacatgcgtcgtcgtttcagtccctcgactgagcgcaaactttctggttgtttagaactgcgttcagcagaaactgccgtcttcgagagcgaatccaggagtgcaaggcggcgtggcgacagtccccggaaaacgaagacaacgcagacacgcggatggtgccaacaactctcaagtgaggtcaaggaaaagagggggaggtgcagagagagaagacagaaaggtgctctgtttgacacgctaacctggggagcaagtctgttcacacaggcacgacacacagaagcaaccacatgcatgcaaaacaaaagagttacttcccggaggaattcacttgcagacctcagtttctaaagtgaggaaacgggattcgccttgggaaaatgaagcagggggcgttacacagccgcatgctcatcgaaccccgttaaccacagtgacgacacagaggcggcgaggttgaacggcctgatctcttctccgcccccttctttgtgtttatttgtccagaaaactcgagtcagtaaaaaagagagggattttgctcccgaaattcagcgaagcacaacatcgtcacgtgagagacaagcattgtgtgtcgcccgcgtcccgacagggaaacagagtgcaccacgagttttcttcgacgtctcttccccccccctgtacagattttcagttttttccacttcgcgacaagagcagagacactgaggaggaagacactgtcacaaaaagaagtgccactttaaacgagacgcgcggaacacgcacagaccggctctgctgtgctgcctggcaagaaattcaaactcactcacaacaagccagtgtgcatgcgcgcttagacgctcgagtcacccttgcttctatattgttacattagttcgaacgtgtgtgcgctcaactggacgctacaggcaaagttcatctttaatgcaaatcaaccaatccaaataggccgcgagatggcttgcatgcgcagttccctttacgaattagagaactctgtgtccatgtacactagtagtcaagttcaccagtcgcgccgtcgggcgcgtagcgcgctgctcgcgtcctctccccttgctgggaatggaaaaaccgagtcagatgcaagacagaccggccaagttgtttgagaggtgctctttcctctgtggcagggacacgccacacacacagggtctgtcgtggatttttccccgcgttccggtcttctccgtcggccgcacaccgcggtgtggctgctgggcctgcatgtgcgcgaggtcgtgccctgacacggagaaagctcttttctcggacgaaaaggtgcccctctgttgagcatttggtctctgtgccggcaaagacaaaacttgttctgcgcgaaaacactgaatggatcgcgagggtctcgcgagtccaccttgccgctcccatccgcagagtgtcggggttgacgctggtctgtgccgagtcccgaagcccttctgcgttccttgacagatgcgcgtttcagtgtgtgctttgctttgaagaaagaggagtcattctcacgctcacgtcggccaagagactggtttaatgtctgggcatttccgctcgactttcaatggcaaatacaggaaacaacagtgtcaacggacatgcagagagcaaccacaaaaacaacgggacccgggagacagcagagaccggcgaacgcgcgcccgagagtggaatggagctttcttcgtcaagtctgactgacctgtggaacacacgacttccttgtctgcttcctcggcttctgcattggcgtggacgctccatcgtgccctccttgtagaacttgcctcaagggtccccgctgcgtgactctcacgtgtctgctggtcgcagttcttctcgaagaagatcactcgtctccgttgcccggaacatacgcgtctcgctgactcgcgcggagtcgacggaagcggcgacggcctcgtcgcgtgcacctctccaaggccggtttcgcttctgtctgagcttgcgcctggctagccacagtcgaccctgtgtacgtacacccgaagactccgccccccgccgtcgacctctggactcacaa

SEQ ID NO: 1614 - DNA, 3280 bp, Toxoplasma gondii
  source 1..3280: mol_type = genomic DNA
cctttgccatgttctctttcctcacatgctggttccttcaggttccggcggactgcatcgaatcgtggattcctggtggccaggccaccggcgtgtacgaccacagtgcctactgggcggcagaggcgaagcagtttgagtgctacatgaagtttttgcaggaagaatttattgggaagtcacagcagcagagaatggtcgaggcgcgggcctttcaggaggcgcaggccgctgggaagcagggcgacgaagcagtggaagctgcgcgagccgcagcgaaagacgacaagaaaggcggcagtggcgccgcagactcagacactttactcgagaaagaggagggagaagaagacgttcaggacgaggaagacgaggagtcgaacgccgacctcaacgaagacgaagaaaagaggagaatgttgcaagaggctctgaaaaaagaacaaggcggccacatggccgacacccagtctacgggggcggggcggtagaccagaaaaccaagccgaggggcagagggacagagaaagagacgataacggaccgacggagagagagagaaaaaaaaagagacagagacagaaagagagagaggggtggaaaagactaaaggaaggtttgacagttgtagagggaaaccgcaggtgggagaggatagcaaagaaagggagagtgacgtatcgaatagggagaacacaggaaaggtggaagatcggcgggtgcctttgtcataagacgtgaaggagaaaaagagggggcaaaggcacaagggtggataaagaagggatgacgagacatatgcactacgaggatgtcgacttgtcgagtgagggaaggaggacgtttgagagggaggcgaagagaacgctggggatgtatccgtacgtctttcactctgctgtctctctatcgtatcttctgtctaccgtcagggcattattccgactcgatcatgccttttgtcttgcgtgtcactctcaacacgcgagcgtttgtgcacttttttatccgttctttccacttagttaaaacggacgaatcatgtaggacagagcggtgctctggccacgcgcaacgcctccggtggtgtcaaggagcgggacaagcgttgcacaccttcataaggaatcgacacggtcttcgaacaagcacgcaggtagctactgagagacgcttacgtcacactaaaaccctctcgtttttttccacctttcttttttcccacacgaaacagaggcgaaagattttcgaacctgtgaacgcgcacgagagacgtcagacgtcccgctgcatccacgaagtttttccgccaaggcagtcgatgaggcaagtgtcaactcagctgtgaacgggaagagaagatgcgaccttatcttcctccttttgtgcatgtgtgcaccatcgagaagaattcgagaagtcaacagagtcaaggagttcaaggaaggtctgcttcctcactttggcacgcgtccggccgttgcagcaagacaaagggatcggtgagactcttgtcggctctcagctgtgctagcatcaggcgaattcggcgggtggctgacacacggctgtcacaccctttcgtgggaacagcaaggcgtgcagaacctcctccactggtgtaaatgtggtacttccttttcattctttggtactgaaaattgcaatcgcaagacagtgagaaaagcgtcggagaccatctctacagtggaagctccgaaggcaccgacgggtgcaccactcactgttggcgccgataaaccatgaaaaacagcatacgcgttgtcagtctcgtgcaaatgtgaacattcgctagagttcaagttgcaccgtggtgatttcgtcgactcatgttaaacctccaatggacgcgttcgcacaatggtctgctggacagcagcagccaactaccgcacccgtcttctggccggtgacagaatcgcaacgctctcgaagctttcgattgctgtagaccacagagcgagctgaagtatatcaagtacgaaccacgcatgaagctgtttgcgccacataacggttctaccgaagcagtcttcggttctcgcctcggagaaactgtgtccgccctgccagggattcaagcagtgccgtcatctgaaggtggttgtttgctctatccgatgccagacgtaacgtgcgcattcgttgctgatgaggaaggcacgtcaatatcgcgtgtggatttgaaaatgctgaatgaaggggcttttgaccgaatcgtgttccttgacacgtggggaaaatggtcgcgtaggcaaagagcctcgagggtgattatcccgacgcagtgcctttgaggtcaattctccagcagcgcacggctgaagaatgtcttcgtgaatgcgtttcatcacgaacagctgagttttcgcttctacagttcttgcatgttgcgataactgagtacgtagtggggcactcttcactgtgctacacctgctgccactacgcagcgccggtattagtgcacgaccatatcctcggaacgagacattttttatgcagctaaccaaaaagttgtctggtccggagtcgttagacagactctcaccttctgcgtttctggcatcgtcgtttgccgacgggttctcagcaggttgcatagagactccacaaccacgtaccggagcacatgtgaccccgaaagaccccccgctacccacaatgcaaagacactgagtgcggcactgcttgcttcccctcagacaccacaggctgcagccggcaacctactcatcaaatgcgagttttcaggagtgctacttccgcaccgggacgccaggtcgcatcggacacacgccgtgcggcaccacacgtcgtctccggaagaggatcaagaggaagttcagttcatgtggacggacgcagaggagaaatacgatctctaaggctttctaggggttgtgtcggccgcgttcgacctggtgcggtggatgaggcacatcttattctaagtgagactagcgctgatatcaccgtatctttcagggcttgaggacggttctctcgcgagcggcgaaacctcagaagtgacagtccctgcatgaagtcgaagatataatctccaaggcttcccgcttctcttgggatgtgcggcacagcgacggagagcagcgtcagcccgcgacgccttttctccggtgtacatccaccttgccagtgccacacgacgaggaagccgatcttccgtgccggtgcgtttcttgcacttgtcattggcgtttctatgtggcttaggtccgttccggcggaaagaaga

SEQ ID NO: 1615 - DNA, 3991 bp, Toxoplasma gondii
  source 1..3991: mol_type = genomic DNA
caagctagtgtagtccatattttctattcgcttgtggacgtgcatgaacacgaccggcacatcatgcaactcccctctggcctacaagggagtgaagctgattggaaactgtcagaaccaccaaactccagtcagacgtgttccaaccttattgccttattgtctatgtccgtgcgtcagacgtgcacacatgcctgtttgttaaaagagcatatgcatacaaagaaatgtacacctgaagcggcgagaacggggaatcgtccaagagtttcaggataaagagcgatagaattgacgcagtctacctgtttcggcatcatagacggcagcggtctgttcggtgaggagatggccttgcgacagaggggatccttcacgcacaatgactttctgggtgtcgttttctgcgaatgtgacgcgagggacgtaggcctgcttgtctgccttcgccgcctttatttttgcgagttcttcagcagagaagaaagtcttgaatttcgcgacgacgttgacgtgcggcttgccgggcttgttgatacggatgtcgaaggagtaattgtagcagaccagctgtccatccatgaccaggtatacgacgatgtccgattcactcgttttcttcgcggtgaggacaaagtcggtttcgtactgcagggacttggccattttcgaaggaaactgcaactgcaccgtgatgaacatgttgggagggtgaataaccatcgcgagcttcgagttcccgcctccgcatagcccactcttgcagatgtcaatgtgcttgggaatgatcaggaggccccagggaaagtactcgatgaagaagtcgttcttcgacggtcccggctgctgcggcagagcgagggtgtggacggcctcgggaattgagaaggaaccgtaggacacaacggtctcattgcatggatcgaggctgcagaagccgcgtccgtagctcacaggggtgacgttccaggcagtcgagttctcgtcaggccgagtcagaatcaggacagactctggaatgtacctgacggcgatgtagcatgcgttgagcaggaaaacggatggcctccacgacttcgtgagcacgggcagacgctcgggagacgtccacgatacaaccgtagagatcgtcggcaccttgaggtatacggccttctcgccttcgattgacagacacatcccgcctttccgccacgtgcgcacgtcgtactgccccgtgacggtgtctgtgaactcgggcggagcagaccggccatcgacagagtccaaagcctgcaaccggccgtcgctgaaagaggtaagtctcagtgcaacgtcgggggagacgccaccccagcccttggagtcgcacgcctggttcaaattccacaccagggtaccctcgggaactgtcagctttccactgggttccaccaggcgcaggcctgagtcaagggggagaaacggcgttgccattttgtctcgtttcctcgcttttctgcgcagggtttcccaaggtctcgacctcgattgcgacaacggctggcttcgggcgcgcggaacgcggcaagctcgattgcaccggctgcacaagggacgggaggctgcaagggaaaacggcggaacgttgcggacctagtatgatgcgcgacaaaatcatacgaaattgaaagttactggacaatgtaggacgtgaatcggggaagcaagtggaacaaaagtgggaaactgcaccccgccgcgcttcaccagggaagaatcatctttcggctggcgcatcgctcaccggcgcaagacagcttgccatggtgtgagattggagcacgtgaatttcaacacaccggcacgctggcatgaatgccgtggcgcatgccgggaactgcacgcatgtcgcaaaaagatgaaggaacgaatgagggattttcctgtcgacgagctctcgaaaagcggcctctcgcgaaaagaacagatgcagtgaaaacttacggaaaacccggccttcgagacggacgccaacactccgtgcgctaggtcgatacagcatgttccaatcgtgttgcgcggcagcaacagccgcaaaacgggtagctttctcctgctcaccgattcgaggcaacgtgcatttgacactcctgaagatttccaagaaccataaacaacacaaacgcccaaacggaaggttacaccggcgcactgcgcggaattgcggacctcggtgtagaacatggcacgtaccacgggaaggatcgacggcatccaggtctagtattccagaggtcctgccagtcgatagacgttagccagaacatgaaactggaggaaatgactgtttgctttcctgtgagactgaccacgtgtcccggcacacctgatgatatgtgcgctagaccacaatgttcttcggcagaacgaacgagaacgagtgacgtagaaaaagcggcaccaaaatatgcgggctgtcaacaccagaagggaatcacagcttcactaaaaatcttcgtgcatgaacaactcatatggagccgggaagagggcagtagaaagaagagaatgagatccggcagcgcacggaattcgcttttgatggaatgcgagtagaggtctggagtgactgcaaagtgctttcttaagaaacactttcaccgtcgagcgctggggtagtgggtgccggtgcgagtaatccaaatcttgctgacccgattggaaaaacatcccggctggcctgtgatgcatggtactgcttaccttctgactcttttgtagtgaatagtgaacacggtacacgtggttctttggctattgcggctttgggagcacagtgttcactcgtaaaaaactggcatctgcgatttgaccgggagaatcctgtctaagttggaaaaacgcacaagcagacttcgggtgtgcttgtttatactcatgaactgcactgatgttgatcaatgtgcaactggatccacatgcttatacacacaggcattcgcatattacacgttttgcaatgttcgggacaacaagggatataactctgtttccgtcgaggagtaggtttcctcgccgttgacagcagcacttgaggatctacgcagacgtaattcttgccgagcacttggtacgacaatgatggcgtcattaggaagcggagacctcatgaagtgaagtggcctctctgcacgtttccgctcttatagaaacaatgtacaggatttacgctgctgttttggtacttggtgaaaagccctccagacaccgcgtgttaagtaccgaactgtggcattgtatataggcagacacagggtttccccgtgtgatcccggtcctacagaagtgaagacaacaaacctttctcgccatttcctctgcttctcttgttacctaaaaaggtaccgccaagctcggtgcgtgtgcatgaacagcgagatgcgcgggttccgcccctttgtcctccctcgtttttttccttctgtgaagggaacgttgcctagacacaccggatgagttcagcgaggaggatttgccttttactttggatttcgacggggcaaccagccattggttcacctctcaggctgcttgcatcccagaaacggtttaagatcctccaaccagtgatttctccatttttttaggcaagagacacacgatcattctggggagtggaaaccttcggttggtggagcgcatacgaacccctggaaagctgttgtgtctgctcacacatctgggttaatgctgaaaaatctcatctggccgacagagattcgtttacagagttttaaatttgcagacgtatctacgtctctccgcatgtacgcttttagtaattttctgctgctttacgcggagagactaccgctgtatcgaggacgttaggccgagccactaaggggttgccttttcgtgcacttttaaaattcttctttgttccgactctccttcgaccttttcctttgtgtctttgctctccccattcctcttggtcttcctgtctgtctctccgcggctgacaaaa

SEQ ID NO: 1616 - DNA, 3943 bp, Toxoplasma gondii
  source 1..3943: mol_type = genomic DNA
aacagcactgcctgtcgaatgtcgtgtgcgacttcgatgaattgataaaaagcgtcgaccatcgcgggtgtggggccctcctggagaaaaaacgggggcaggggctcgcgaaggaaaggcgagacagacgaacctttgccaccagcgtcgttcgcgcccggcacgcatgcgccgcttacttctcctgctgggcctccgctgttctttcgtgccaaccggcccaacgaggcggggccacacggagacaaggaagaccacgacagaaggttcggcgaagatccacaggacaagggcgccgagagaacgtaggaagaggatggcgagggcggagcagctgaagagctggcataaggtgactgcagcgccgacgccgcggacgaaccgcgtttgacgcaagtgccttcgagcggcagcacctcctcggccattgtcgacgacagtggagacgaagggggcgagttggtggatgtgagtggagacagatccagcgtgacggcaacaaacggctctgttttgaacgaaagcgtccgcgtcggtctggccgccagaccagacccccgtgggagtctttgctcagacggggacagttggctggatctgcgacaatctctgcgtgctcccttgtgcagactcggtgccgcgttttgtgtcggctgcacccgtgcgtcacaacagcctaggtcctcgcccccacgactgttatcaggcaacggaatgtcctcctcttggtctgcagagaaaatcggagaaagtcgcggggtcttcgaactggcgggcgacaggaaagcgtccggcagcacgagagccggcaggtggagagtgcgtggagaacaggttagatcggacgaaaagtgctctgcggggtctgatgacctgccgcgcgcatgtgctctgtcttttaaaggtagatcaggagcgccttgcgctacatctgtctcctccgagtctccaaaaccgaaaggccatctactgggccaagacaccgtgccaccgatgcggcttcgccaatcacatcccgaattttctgtccaccgttgccaccgggacttgtgtgccgagagagaaaagagcaaaccgaggaaagattcctgcgtcctccctcgaggtgcatccgttgcttgactgtcattgcctccgtttcgcgtcgcctcggtgcttctgtatcgcctccgctgtttttggtgtacggcccgccgctggcgaagctggagttcacgctgtcgaacacttgcatcggcaagcttctctgcctgtgcacggcgctcgttagagcgaggcgaatcgagcgggtgagtcgggggaggcagaggctgtggtggactcggttttcctgtcaaacgccgccctagagacagatttgctccttcagtaccatcgtgacccaacgatgccattgagtaggggagcaatggaactcgcgggagcgaacaaaagaaacgacgtgcgcagagagagacaagaaaggggaaagctttcttgggactgaggcattcataaaaagcgaacggcaatgcagatgggatcagggcagggacggtggcgaacgacagagacgcaacgacaagtgcgtaagggaagagtaacgccagaaaacggaggggtaaatggtgatgtgaaaggagaaaggaaaaggagactgaatatcaaatgtgaagaatgaaacacaagggagagcgtgaggaacggtgggcttgtacttgttgtacttcattcaagctgacgccaaccacggtgggtaaggaagacgacctccattagaggcaagcaagaaaattcctacactgtttcctgccaactgcccgcgcataagaaaggcgaagtcacttaaaagagaaaggtcactcagtagaacacgtgtagccaaatcttcctcgcatcctcctcatttagtccagaagaggaagaggttctgtgtaagtcgaggaaaggatggcagacacgcgcggcgcctcgcgctcaggaggccatacgaaaaccaggaaatgcttgcatcggaacgaagaagcaagactatttatctaaatggaagaacttgagacggagggcagtctgttcaataaacaagttattcctcagtatggcgcggggctcctggacgcaaaggggaataaaccaaaaattcttttcgcgacatccctctctacgaagccgctactttaccgctgactcacggggtacgacagagtaaactggcggcataggaatcccatgtaaaaagccattctttgagaagcaatacactgtcgtgagcgtaaaatcttttttgttcatacggcaatagagggagaggcttgaagctgttgccttgatcaacacggaaaagggacagttgcagagaccctccagcgagcaaacctcgtccgttttgttttggtggggaaggcgccgtgttgggttcaacgcctagtccttttaaggaacatctccgtgactaaacgaaggcagactgagcgccgacagcaaaacgtatctgcacagtgccgtcaaggcaaaatacgagaagtctgcaaattctttccagctcactcgctctccagacattccgcggcttcttaactcacggcaatcgcagctgtgtgtaagcccttcagccacgctgccaccaggcacataagaaccacagaattcacacttgcgctacactccgggtttcgatctggaggagacattatgctgctatgaggctcccttcacctaggaaaatactttagtagatgtaggaacgcccgtgtcaacagcaagcaataatatgggtgcaccaaatggactcatgttttcagcgtcggtatcctgagaatttcgcagacacagacacacgtacatgagcacacagctacacgcacagacgtgtggtagaatctgagccaccgcgagcagcaagaggcacctgggtcagcaggcttcctcgtagcgtcgtagtcaaaacgtctctaccggtctcgtacctggatatcgggagtcaccggaggcagtggcgggggcctcgcaaacacattaccattactacggaaacaattttcagttgatgacggtgcagcttccgggacccaacattggaaaaggattttacagcatcgactccgacatatgctgaaaaattcaaatcggcacccagattcgacggtggatatcctcatgcagcaggtagaagctaccgcacgaacccagtgcatgcccgttttgtgtttgtacaaagtatgttgtggaaaaattatgagatggactcgtcatgaatcacagttagttctcggtttccctttcgctagctccgggaatcttcgcccccctagagtaccgtgttgagagcgatcccgctacctgccgtgctgggtgcagatcgttcgtgcaaaccattcatcaatacgagcagaactgccgtcagccattcccgcaggagcaagtgatccaactaacgcttcgcttcagagaggttgttcttctattccgtcgctcgctcccacagatgtagcagatgaattgctcctttacggtgcacaaatttctcaactaacaaattccaaacaagaccgctgtggtcgtgactcgaaacatcacaacgctttcttccgccacttcaacgtttctttccaaaagattctaccgaaaacccttccacggtagaacaggcaacactgtcaaggggctttgcttgtgtaataacgccacgagattgtccagtcgctggttcaagagagataaagaaggtaagaaaccacacaagattttgttccgtgcagaaaagggttctccgtcggtgtaagagtcacttgtccacgaatatgccctcttcggctccagtctgataaatctttcagtgtcatcgttgcgatttgctaagtcgttcccgatgaagtttaaccaatgtgtttttttactgcgtgcaggtccttatgatattcaacgctgaacagccagcagctgtcatatcggatgagctccggca

SEQ ID NO: 1617 - DNA, 4624 bp, Toxoplasma gondii
  source 1..4624: mol_type = genomic DNA
actgaaggctttccagttcaggaattccctccgttcagtttctacggaggcaggagctgcgaacatgcctttctgcagttcagcgattgttaggaaacagcgagattggtagaagtcgctagcgaaggaacggtaacattttcggaaggaggcaataattttttcgaggagtccgccagagagcttgtcaatgacttcaccgagttcgtggtcccttctttgtgggaacggagtgaccatggaggagtgcagaggctttttttcaacggaaaatcaattttgtgtactgagcgactgcagcttgtctgccgtaatgattcaaacggcaacctaagttttttccgcacatcggcgaagcataaagtgacggtttcagcctacggaggctctcagtactacgcgaatcgagttcaccacaacggcacttgtgttcacacacaagattgatgtatgtttacggatgctttaatagcgtagttgacgtcaaagatgggtcatgtatactagcgggtggcccaaattttcagggggtgtacaacggcgaagcacgtcacaaagggagagcattggtaggcttcgaaataatttctagtcgggagattcagtctccgtgtggttaaatgagaagtgctcttggtgcagcagaagcgtgatggccagtgcaaaaggaaataccgttgtgatatcgagttccatgtttaacgtaaaactcgaaaaggtagatcatacaagcattcgggtactcgcacatctctagaaatacgtgcgtgcttgggcacaacgcattaggagaagtgcccacgctgtttgaaaaccccacgatgctagtacagagtgcagcctgtagcgttgttccacgggggcacgcaaaaatcgtcttttgtagagagcgtgagtcgtgtcactcttcaaggatacggtctcacatgcagccagtgcggcattgctctgcgtcgtaagcacttaactccctgtgcaacgggctggtggtttagagggagcaggaagaaaacctagattttcagtgtatccgtcacagaaaatggcacagaaagagacgctcggttctgtaaggccaggttatgctggaaacgatgttcagcagggtattggggaaataagaactgacgtcccgtgtcctttctatttctcgtaaggaacgaatgtttaagcagacgttgagttttcgaaaacctcaacagtgtcctgattccaaccactcaacaaaggagtcgggcactcgcaagcacttgttctatacaccgctcgtaaggcttgtaggcgtacatgataaattcctgaattaaacgacctgcagtggcgtacgtccatggcgttgctgctctctccaagttcccacgggttagctaacaactgcagtttgcaggctttttgacggagcgtcgctgttgtctcttgccgcctcgtggcaacaagagaaatagcagactcttctttgcgtgtcaagtccaggaacttctcaagctcccctctaacatgtaaggcggttcccctacgaagcctttccatttgcgcttaggtcatttctttttgcgacaacgaggcaacactacgggagattccccactaatgttgcattggttagatgcattgccgctgcagaaatcagaagcatgaataatagcctgggggcccccactctttggctttccgtagtgcatgcgatgtcgaaagaggcaaaagcaatcgatctcggcgtctgtaggataaacaggctgttctgccacctcaactcagtaccagactcccgatctccacgccagaccgactcttttatcgtggcaccattctgctggagttgaacgtggtaactctttcgatcctcgagagaaacgcaggtcatccaagttgaagacaatacccagcagataacagcagatgctagattccctgttctacatcataaaatgcagtgacttctgatactttcagatcgtcctaacggcaagaaggaaagtgtgtgtcgaaaaggggggtgttcagcggaaaaaaaagaaggcaactatttgaagctttagttggaatgaggagttctgtggaacggcctttcttttatatcgacaccagccgatcactggattgagctgatgacctacaatgtcgaagagaggctgcagaagtctaacggacgagcggatgtagatatgtggaggaagcctgtgctcgtcgtcaatttgaagagatgcgagccacctcctttctttcaacacgctgagggttcaatcggaagataattgaactgtattcctctccgacttattgaagaggcaagaagactctttcacgtggagggtttccctaggaggaccaagcgtcatgaatccttaatcatactaaagtacgactgaaggtttgttaaaaccagcacaacatgcagattgtgcgccgtggctattcatttgctttgacagtttgaacgaaaccggacaacaagctgatccagagcatatagcattcacagcaacttgcccagtctgttcgagagaacgatcgacagaatatattcagcctgccgtccttttatcccgacactccacggatttgcatgcgactgttcttggtattgtcgaaagcggatgtatcactgagacagtcgattgatgtttgcttacccacgtcttcggcagtggccatctgcgtccacaacagtgcagtcttttttacgacgcacttggggttattattgcagccagaggtgccagcaaaagtatacagtgaacgggataacgttcttacatttacgtaagagaaagtaagactccagaggagtcatgtgtaagcacctagcgagtttcggccaaatctctggcaaaccagacggacagctttcgaaaaaattcggtcctccgtttgtgcacaaagcctctcttagaaaagaagtcaagacttttttgttggcatgtaaccctatcaacaatacgtcagtacagactgttgccaaactccactcgtggataaatattcaaactgcgaatggcacccgacacagtgtcgcattcgtttccccagtcctgacgcgccaagaacgaaaaccatttcccatgtttatgccagaacgcagtaaacgagatatgctgagtgtatgagcacagcacaaaaacgccagcgtcgactgccagcgtgttccggcggctttgacgatgagaggtggttttttcggtcgcgcctcgccgtggatgtcagtctctcagatgctctcaaatgtcttctgtgttttaggttgggagaatcgtgtcttataatactctgccgtcgcccctggccagcctcgtcagcaaggagtgcctacaaaggaatgtcgtaaaccaggttctaccaattgagagaaacagcctcccaatgtagaagcaaagaaattccgaggcaacgcttccgcgcggcagggtaagctcttagcaaatttcctgcctgttttgcccacagatgcacatggctgaaatcttcttctctgctgaaagagctgctcttttgaggcagggtgaccccgcccgataacgctgttcctgcgagcacacctgtgtccaggggatgtcttcggaattgggagcgtcagatgcgtcggcgggcgcaccctttttagtcttcttgcgtcgcaaagaattgcgatactttccacgtagaaggagtttcgatgccattaaccacgggaataacaccatcgtcatgcaagcgcttccttacccttaacccgacaccagcgcgtatgtgtctagccaagacaggtcgtgctgattcgtgttcggtcgttctgaaattaacggattttcccaattccaccagaaaatggtgagcagcagttcttcatgtcacgcttgaagtacccgggcacccaagtccttgtcttttatgtgttggtgtcctgtgagttcaccgtttcctcgcggccttccaggctcgcttgatcgaaaagccgcccccgaaagctcagcaaaatgcgggaaatccagcgcagaatggacccgcaagatgtgtgtgtgaagcatgtgttttacgcataaaagcctaaagtgctcaaaagcaaaagagcctgcttgggtccacgttgtttcccgcgattcactgtgcatgctcgcaagctctttgcaactccaccgaccctgggcgtgttttctctcccacaagacaacccccaacgctttttagaagaagtgacagccccgagaatccgttgcgtttcacaaaatctcgtggatccgcggaaatcgctggatcccctgttctccgtttcacgacaccgcgacactccggaggctctatcgaaaggagttccgaaaagtcccggtcgtgccttcatcctcttgtagaaagttgtgccagtcctccttgtctttgaatcctggcttggactgtcgaagccgccgcaaaatatttctgaactcgggagtgtgtctacatgtcctggtgaagctgaagacagcttaagttccgttctccaacgtcgcacgacactgcggctctttcagtggactggtcgcagtctcgcaaagcaagcggccgtttgctgtgacgcgtttttccttgacgatggatcgtctactcgctccgagctgaaagactccactcacgccgtgcttcagaaagttgtccaaatctgctccagcca

SEQ ID NO: 1618 - DNA, 2328 bp, Toxoplasma gondii
  source 1..2328: mol_type = genomic DNA
tttcagcgcctctcggttacgggagaaaattcatgcattaaatgaagtgtcgttcagccggctgacgctgagtagaatccttcacgcgactgtaatcactggcagtgtctgattgtaaagttagtggggtttcttttaggacacgagaatgtatgcaatcgccataggaaatggtgggcaggtagagcccgcggttcccagtcactttcgcgtcgagccaatgacaaggaaaaaagcaaatctccttaaccagactcggtcaatagatcagtgaaacgttcccacagaggacgggtgagtctgcgatgagtggaacacctgggcacaagaagtggtctctactatccttttccacccctgcagactgactgttctgtccttccggctccgggtttgaagcacgcaaggcatgaccagagcgtttgccacaggcaggctggccaatggaagttgactatcctacgttgtcccataagcttgctgtaagagggtttttctctacgcatgcatttagtctatgggatggagattcattaccgacaaaagtcttctaaaatgtttgttggtttcctagaacctcccgacacagcaccaaaagagcgagaaatctactgtacttcacgggcagggacgaacaaagttttgctttgaatgctaaagcaaatcgaataggtgtatatgaatgtacgctcacatgcactgtttacttcggtcgtttcacagtttgtggttcaactgcagatatgtcaaaactaactgaaatcgtgtttctgaatcactcatcaacttgtttactgttttcagggaacgggaaccattccgttcgcagaacaactgagccaaggcgttgcttgaatgtgagactcatgttggttcgttcgtgactttgatgggcacatcttgtcgccacgagcattgtcaagtctgtgcatgattgaaagggaaacaatggcaaatgcgggggttaagggtggcggtcatgtaacgtacggctttcccagggtgtctatagttgttgacttaaccatatacgtttgtccaaacttgcattgtagtacattacaacaaatgcaaagtgagcagcacgttccaactgcaagagttatcggttgacactccaaaacgacgaaccacattgttttttgttccttcaaacgatcagtgtgttccttccgtgcctctagcggatggtgcaactgtgtaagtttagaagaacaaaaaagaggagtgatatctgacaacatgggtaaaaagcttgtcggagcccagatacgtgagttgcgaatgcagttctgcatgcgcaccattggcaagcaccgatgctgtttaacggcatttaactcctcgacccaaaaggggatctctcctaaagcgtattgttcttgaaagtagcgccctcttggatgttcttctatttcatcaggcccagtattttccgcacacgcttgctatttttccctattcccgtatttcctctatcacgccttggccgcggttggtgtgtgcattttactcggctgcgcgacacgtcacaccaacgggctttggagagcgtagatacctttcttagttaactttcgcattgaatacatctgacgtacggagcatggtaggtgtgccgtttgtctgtcgaattccactactgaacaatgtgtctacgcttggaagcgacgtgctgttgacctacattggcgctagtcgagtcaaagttgtccaacggggccaaacagaaagcttgagtgtcttttttagtcgcctctgatcatcgtatggttacatcttaagagcaattgttttcggatggtactgataccattttgggctcaacttaaggaattcggtttcttcttcgccgctctgcccttagccttttgtcgcggtaagcggctactttgtgagaactgaacagtgactcgacaaacgaaggggacactgtagtatagctcttcgtagctcaagcactcggtcaagtcccatcatattatgttcaaagttacgtttttccgtgactttttgtcttctattccccctttctctcaaaactctgccgaggaagaagctggcaaagacttgcgtatgtgctctccggggcgcaaccacggcaacccagcccatcatctctcctctcatccacactttccgttttgtttacgagttttctggtcgtttgccgcaaggctgtaaggaatgcatgacggcagagttcgggcagaggtgcgcttgtctcgttctagctggattaattcagcaacggaaagggcatttgacccgcgtcttcacttttagtttacctgggatactttcagagtcttttttccgtctccaaga

SEQ ID NO: 1619 - DNA, 1439 bp, Toxoplasma gondii
  source 1..1439: mol_type = genomic DNA
cgcaatcgattgccttcgccttccatcgtgagactcgaaacatgtttcacctcctcctcccccagcagcatctccgatctccatagaagcgtcaacgctccctgctcatttgctcctctttctccgctctgttttgtatcatgaacgcttgggcgtcctcctgtttgccctcgtccccttcgactccgcatctgtttgttctccttcttttcttctctgtcttccctctgcccaggtcgtcgtggatggccgctgtcgatgcgccttctgcagcaaccacagcgacgtgagctttcgattttttcgccggaaattacagcagtctgacagaaaaactttaacgaagaggacgggggtcgctgaacataccttcgcagcaaagcaaggacaagcgggaacgcaagaaacgagcgctgacaaaacagagggaaggaaagtccggacgcatgcagcggagaccgagggacggcaaggagagcgttcaagcccaggtcttccagctgtcgaaccgagtcgatgaacaggcggattctctgacaaagcgcggtattgtatctcgcaaacgacgttgcattcgagttcctaagttttcaagcagtcgagagccgcagcgacagaaaaaaaaggcggaggagacagggagaacgactggaagagatcgatagagaaagaagtgacaagcgtgaagagatgcgcatgcaattgacgaagaacaaatcaccacaggggacggagacaggacggaaaacagagccagcagaagggcgcgcgcgcgttggcgaaaggaagacaccgcagactgctgaaaggagacaagtgaaaagcagagagacattgcacttgctctactgcggcgggagagcagaaaaggagaagaacaaagacaggaagaagcggaaaagaagaaaaaaagtgaaaaataaagcaacggtgtcttcatgtggcggctgctttgcccttgcatgcgttccaggcctgtcgtctcggcgcggctcttgtctctgcatgcagttggtttttgcatgcgtgagaaaaacgagcctgcttgaaaacttttgcagaaaacttccacacttcctcatttcctgatcgcttcctggccaatgccgtctcttttttccttggatcttccttctcgtcctggccttttctctgtttgcaactccaaccgatatacacctcgtttcttcgtctttcctgcctactttctttctcggttgcttcgctgccttcgccctcctcgtttccttcactcgttcttaacttcctcctttctgcttcgtccttttcttctgcttcctctctctcctctctgtctattcctccccttgctcccttctccagcgttaccttctgctccgcgtcattccttgctctcctcgttttttccttccctctcctctttttttccttccctctccttctcctttctttctcta

SEQ ID NO: 1620 - DNA, 1523 bp, Toxoplasma gondii
  source 1..1523: mol_type = genomic DNA
agaagaagaaacaagaaactggagaaaagagggaaggagcagcgaagagagaaagaaaaggaagagagcaagagataggatgagaggaatatgaaaacagcactaggagtgaaaggagtaagatcagaaggacaagagaaggaataaggaacgtgagaatgaaacggcgacaggtggacgtagagcagaccacaaccgtgagagaccggttctcttctgcagtctctgaacaaagatcgacacttggagatctcctctcacttcacttacacaaagaagagaatatagagaaaccgcgacgacgtatgccatgtttggactgctccaccctttttcttcttcttgttctgcttcttctcgtcttggttttcctcgttgtcgtccgtctccttctcgttcgcttcttccgctctgtccaccgcctgcattggaagttgattcaccttgctctccatttcttctaattcctgatcaactgccgccatctcttccagagggaacaggtttcgccgcgaaggctgagacgcgctgttggcttcctcacaacggagactctttcagagagatctctcaacaagcgcgtctgtcgaactcgacgcgaccgaggcagcagagagaagatccactttccttcgacaggcctctggactcaagagaaattcgagctcgatgagagtcactctctgcttctccatgacttttttcttctctcctttctttctggtcctctccgtcatacttcgtctctcccgttctctcggcttcttctctcgtcacatcgccctgctgtctcctccgggagactccgcgcctgctggctccttctgttgagttttctctcaactcccagccacggagacacaaacaccgagaaagatggcaccggaagcgaacgcttcagctgcaaaagacggaaagaaaaatgcctcgccggtgtctcgcggaggttcttgattccagcgcaaacgcgcgcatgcagtgtcggtttcccgacgacccaggaagtgagagacgctgcacgcgagcggtttctctaccttttcaaattccgactctcctatttgaaagtggagaaaatctctttctcgcagacttttctcttcctcgttcatgctcgcgttcatctcctccttccaacggcttcgggaggttctgcctcagcgtcaacggagacatagaagagaacttcgtcgtcgctccagaccacggcgccgaaaggcagaaacagaagaaaatgcagcgcgttgagtggagacgaaggctttccccctctggcggtgcttctcaggtgtatgtactcctcaacgagctgtctcggtcgcagcttttcgaacgggtgcccgcagatgccttgtcgggtttccgtcccctttgaaaggctttgtttttcggatgcggtttctccactccatctcacagaggcggacgaccttttctcggtctgatctacactccctttcctcaaagacacccaggaagggagaaacagactcttttttctccgtcctcgcctttgccaacga

SEQ ID NO: 1621 - DNA, 2423 bp, Toxoplasma gondii
  source 1..2423: mol_type = genomic DNA
cattgacgagcgaaaccgaaactccatgctacccattatcaagcaaggttcttgggtttatataaacaaccttttgctgaagactagatggtgaaacacgcagaacggtgcaaggctatcggcatcggcagctcaacaggaaacccccgttctttggttgaagaccggaacgctcccagagaacacaacaagagcgaaactgttagacaggcacgaaaacaccagcatcgtcaagccgggtcgaagtcccattacggtgcatatgcacatacgtgtacacacatatatacatgaatagctttgcgtggggttgcacatgcacgcgcagttgcacacagttaagtcgcgacgcgaaactctaaaaacagacagaacacaaagaatgcgaatgcactgaccatggtagatctcgtatttctcctcaagttgactgatgtcgacgggaagtcgccgatcagatgcgcaccacatggacttacccggagaggccctcctcttctgccggtgcgcgagggtgagctggaagcacccggcgagaagggttcatcacgtagagcgttcaagcgagaacttgaagaattgcttctaggcgcgacatggaaagaagctagcggaaaactctggctttgactggcctccacccgggtcacctgtttgaggtccgagcccccgtgttgctcaactgcgacattttgtaaatggtgtagagtagaaaaagagcaagagtttctcttcgacaaaactccgacggcgtgcacgggagggcacggggcagtcccggtgctggcgcaggaaagccccccggctgttcttccacgcgagaactgcacagactccactcgtggcatcttcgcgactgaaggcgctacgaagccgaggcgtctgcagctcacggcctccgactggattcctccatgaagagagaaggggacagtggatgcagactgagaccggcacaagggtgccgagttgagcaagcgggtacgcgagagagaagacagcatgctaggaagctcaagcacctgggtcctcgaagtcgcaggcccgccgctaagggcaaagcagctgtcgggacacaaggaagagatccacaggaaacacacaaggagggtggaaagaagaaacagcacgggacgcgggcggcttggtgagagggagcaagaggaaagaagacaaactgatccggaaggatgtcgctcggaagttcgcagtgacttccatgtctcctcagccctctcaccaaggcctccacgcgctcgcgactgtgcagccatagagacaaggggcagaaaggaacctagaaaggaccagaagcgggtctggggaaggcacacgaggccccggaaaagagaggaacgagcaacaaatgaaagagacaaggtacgcagaactccactggatagggaaaataatggagagagcatgggggacaatggggtcgtcgttccttttgtcgcgtgtaggttcggagagacaaccggcgcaaagtgcaaagagacaagcgggtgtttactgccttcactcgtcgaaacaactttcctccacatatcctcctgcgacgaagaaaaagacccttgttcaatcatgcaaaatatatcggacgtctgtacacggcgcactgaaagccgccctctcaccgggggtcgattcgcgacgtctccattgctgggattggggtcagacgacgaagaaaagaactcgagagcaaacaaaagagacggcgaaacaggaatcggaagtgcttgagtcacacacacacaccaaactgggcgcgcgtttttgtcacagtttcgtgaaggaagaagccggatgtggaatagcagtcaacttctgagggctgcagcaaaaggagacgggaatgatgtcggagcgaaaacacaggcggacagactcggtagccgcgacacagcggagaatgcaactctcagaagaaggaaacgctgcgagttggtgttttactctgtgtattcactgatcacctgaggagaggaactcagtaaaaactagtgggcgggtgcgtagcaaccagaaagcttcctctgcgaccgtctgatcatgtgacacgccgcgggtaccaacggaaccccacgttttgtctttcacacacaaccgtgtaatcgtagtggcgttcccagtcaagaatcactctaaaaacaaagatgcagtacagaacccaggactgtatttcatgctcctcgaaagaattttgacgttgtcaacgactctcttgattggccaacagttcgggacacaaagtgcggtggagcatccccattggaaacacatgtagacatggctgcttcgcgacagaatcgccacggaagggaagtttcgtaatatggatacacactaaagagtccgtggcgggtgctgtttcttttggaactagtttgtgacgcgatgccgaccgaaacgaggttcaa

SEQ ID NO: 1622 - DNA, 3681 bp, Toxoplasma gondii
  source 1..3681: mol_type = genomic DNA
tcagacctcatctgaaatcaaagggaagataaagtatttatgtcattggaacgcacatgtgtgaagactatcacagggtctcgtattgcctgttcgcataaagtgttctctaaactgtcctgtgagattggttgaccttatcgcaggagctaacaagtgacagggtagccaacacgaaaagtagaacaacgaatgtcgcaacgccttagccggtcgccgccataacgaaacaatgacatgcggttacgcatctcacctgccccttttccaccttcctctcagcttcttcgatgagctgcttgacgatctggatcgacagctcttcatatccgtagcgtctcgttttccttgcttccatgtatctcgctctcagttcttcgctgtgcgtcttcttgcatgggcccaaagaaaatcgctgaaaaaatccgaatatgcagaccagaggaacacgtttatgaagacggtgtgacagaacatggaattaccgaagtcaaccggcaactgcatcagtggctcggtcacgactctaccttgtgacagtcagttacttacgtagcccttgatgtagagaccagattcctgaacaaaaagaggacgcaacccccagcaagagtctcattgatcgttgaacgacctgaaaaaattaacactaccgagcacatgcgtaaaattaagaggaatgcttcgcgattaacacgacatgtgtgccctcgacggcagtggagtagaattcggtatggcagctgatgttggttgacttgactgatttcttacgcattgtgacacccataaacgcccggcatgcgcaagtaacccatatagtatttcgctgtcatcagcaccacttcgcagggtgaaaacgtccgcaataaagcgaagtggtaaacataccgtattctcaaacagatcatgagggcagagaccggtcaagaagtacttgcatacttccggatccgtgaaatcagtcggttgggccttgatgctttccatcaaggccgcgagttgtgcccgcatctcctccatggctgccaaaaataacaccgggaaacgtcaccaacgtctccttttcctatgaaagaacaaagcgtaaatcgagtgactaagcggtgacggtacaagctggtggtgtcaccccaacaagatggggaagaggcatatgagacacactgaaccacagaagacgaaccagcagagcaggcaaaaataaagaatcgtgcggcgatggtattccccaaacgaagtaacactgccgccaataacgagtcatcccccgttatagctatgcgcaggaataatggcaaatggcatatagattcttcagtgcaaactaattcggctgccggactcttgtctcatcgacaccagtacatgcgcatgcctccgaaggtgaataatgcggcggagagatacagcgaaaacattcagtacgagtcttggtcgtacagtgctacttgttcgtaatttccgaaagttttcacgagaaaaacaaactatggttccctatgatattacccagccccatctccgagcgcgctgtgctgtaggcgaaatgctggctgcagccctattccgtgcagctttgccggtaccccagtaccacggctccctcgtgctaacactgaagccacgtagccgtaggattttgcttagtaaaaattcatcgaattccgggttacatcctggcgaacacagtagcgagacaaagaaccgacataaaggaacatctccagatattcagtgatatccccgcgagttataaataaattcagtgacgacggggtatacaaggtgcagcctttgtgtcgtgtccacggctatctccgcaacaaagcaggcgaggaggagccttgtataatccaaagctacgttcataattcttatccttattcccctgccacacaaggaaaccacattcatgcccgcccaccccgctctatccctcgcacagggaagtgccaagtgcctgagaagcgtgcgatgcttatttgacgagctcatttacaagtgataccagcgctaattgatccaatggacagctcccttcactctttggaaacagtgtattagtcgaatgaggtctagatctcgcgtctacgctaaccatgcgtacaggtcgtctgcattaatctgggttatcgtgggggaaatgtggagtcaacgttaaccggcgtggatgatggcgtactctaaaacgctcgctgtggcagatcttgacgcctggaggtagtttcgtgtgcttcggtgttcaccgtaggccattctgttagcgcagctctccgcacgctcgaatcaactatcactgctagttcggaccgaagcactggtaacccacgtgttctgctgctcttgtaggccaaataccgcatgcacgcggaccatctgttagctgcatccacacaacccttgctttgttaaccaacaggatgatgtggccaagaaaattcgaactaggatttaccttctttggtagttactctgtaagaaacggttcgctcggtggcgtctacggatgtcgcggattgctgacggcctgaccagcaacgcggctaagtatattaatgctacggactcactagcctgtgggtcacactcaacacactcgccatggttaaaagctctacggcgcccggtagagtcctgaggaaagctgcaatgcgatgccagcgccagagacgcgattcgagcagccagcaagtgccaacggcatcaggcaccgccgaacagaaaactggccgtggtcaccatccttttagcggcaaccattgagacgcctacactaaggttggtcactgacagggccacgctagactcaaattgtcaacagaacatttctgtacgatgctctcgcggcgaggggaactttttgtgccagcgcgagatgtttaggctcgccaatgggctatgtaattagggtttagggcgctgtcgtcatccggctccagaatgtgtgcgcacgtggtcgtcgcctgacctgcaaagtgtgtagagtgtctggaagtattgaggggagctgcctttgcggggaagtatggtttttggagtcctatgggatgccggctggacatttttatgatctaccgtatactttctcggctgtctggttaattctggcggcaggccgcgtggttagctatgatgtaaagggcggtaccgtactggttccgttgagacgctacactgccattgagaccgactcaggcaagaggccctcaaaagtaagttccacgcaccagagatgttctcggcatgagcatgacaacaagaacatgccacacgtgacagtctgttgttttcgatacgtacctatatacggctagctcgtaggcgtcctgtgtgtcttcagcccgcacgctacatgagtgaagggatgcacatcctcttgtctctttacaaatgaaaacggacaaaattttagcggactgcaggtggcgtttgtcttccgtgttcttgtgctcaaacagttcagaaacgaatcgcggatgcgaggtgcatccatccaaccgttttgccagttggaggtgtgatgccgaccggccacagcttcagttctttacgtacgtgctggctctcctgggaggcggatctggcaattaacagaatactgagaggagttccggtcagactggagtgacgagcgtcgcaaacgccgattgttgcagctccaacaatcttcgtgcacta

SEQ ID NO: 1623 - DNA, 1861 bp, Toxoplasma gondii
  source 1..1861: mol_type = genomic DNA
ttaaatttcgacatcttacgcctcctgttcggcctcttcctcgtcgcaaaaacctttcttcctccctggcctttttgcctacgtcggctcctccctatcctctgcttctcccttctccaccctcccccctgcctcgcactcgcgttctctctctctttgccagtctcgcgcgttttctctctctttgccagtctcgcgcgttttctctctctttgccagtctcgcgcgttctctctctctttgccagtctcgtgcgttctctctctctttgccagtctcgcgcgttttctcctggcgcctggcctgtctctgcctctgtcgtcgctcaccgttgtacagagaatagttgaagaggccaatgccaccggccgccgtggcgagggcagcggcgccgaggccgccgagccttttgaggacgttggggtcgacgttcattgcggtttctcgcgcgttctgcgcagcggcgactcggccggagaagcgacagctacgtcgtggacgggaccagacggaggggagaggccgagaagcagccgagcctgaggacgcggaggaggcggaggcggaggaggagagacgtaccaacagcggtggaggctggagtctctgcttctccggccgtcgaaggagaaagagagtttggaggggaggaaagaaggatcggcgaacgcagtcgcagagagagaagaagtctgtctccggaagcgtaaaggcgtccagggcgggaaacgttcgaaaagagagcttgcgtccagagagaaagagggatgctggccctcgagagcaagacgcggaagactggcgtggaagaaggcgtcgggttggcagactggcttctgcctcctcaggaaagaggacagcgccaaggaggagacttttcgggggaaaacggggagcttttgcagagaaaagaagaaagagaagacagggagaggcgaagcgccttttcgcgtagtgctttgctcggtcaaggccgccgcaagcctggcgggagacgcaaagaggccgtcggagcgggggctgagatacagtcgcggagaggcagggaagaagagagaaaacgaggcgtttcacagagagaaaagaggacgagaagaaggtcgcttcccacacaactgtgttcaccgcgtcaccctgcgacaagcgtcgcggcgaactgcgcgagacaggcgctcaaagtgcatgcaacggaagctgctaataaagtgaactcctcctctctcttgcttggcctgtttccgtggggtacgttttcagcagacaagctcagatggcatcgagagggccccgcgccgcggactcgacgatgcggtcaagttcccccgcagcttttttcgttttttttcgttttttttcgtttttttttcgattctgcgcgtttcttgcgacagaacaactccccgccgaggtgtgtatgtgtgtatgttcgcttcgccgagcgcgtgatgcctcgcgtttcttgagccgagagaggcacgagacttcctcctgctgtgcacccgcgcgcgggcgttttgacgctgaaactctctcctcccgcaggtctgcgtctctcggctgcttttctcatcgagcgtcgacgaaccgtgagctgcgtcttcgctcatttctcccccgtcctcactttccgccgttcccttcagagaagatccacctccgtgaggtcgggactcttcaatcgctttcttacagctgggcgcccgcgaaactctgcctcctcctctcgaccgagaccgcgcgacttcacactcgagcagcgcgcctgcgtcgtttttgcctcgtggctgtttggcttgtgggtgtctttccagttcccctttttatatttcttcttccgttgcacttccccagcgaaacaaaa

SEQ ID NO: 1624 - DNA, 2383 bp, Toxoplasma gondii
  source 1..2383: mol_type = genomic DNA
gagagagcagcagtacgtcttccggattgcagctcgcgccgtaacatgcaggaccacagcggcctcctgctccacacggtcaaagaagagacgcgactcaggcgccccgctctcagcagctcccccggagagcgggcgactgtgacggcggcgcctctccgtcacaagggagaggaaacgcgaacgcgtggaagccagaagacgagggaaagggaaacttcgactgcagtgcatgcatgcttctttcctccccttggaaagaccggtcctcgaaagcctgtcgcgcggttgacgctgtcgcgagccgtcctcgagaatccgaacactctgatccttctcttcctctccccgctccttcctccgattccatatcatccctcaagcctcccagcgccagtgtgaccgccctctccctgtctctctctctctcgaggccggcctcccctcctccctctcctgcgaagtcgctccttcgctctcttgtccaggcgcgcgccgcggccttctgcgtctgcagcgccgtgtctctggaccggcttctctctctcacctttttctgggggagagggaagcagttggtgacttcgagtctgtctctgcagtcgattccgaggagttgtccgttcacgggtgtcggatagttctccttgcagtgcttgaggaccttcatgaggacgaggctgtcgacttcgacaacgcgcagcggatacgaagccttcgcgcggcgggcgcctgcggagacgcctgcgaggacctgcgcggcggttcgccgttggtgggggctcacaccctggggggagacttcgtctggagagactcctggctgcgaggagactggcgaagccgagagcgcaggacctgcggcgccgtagggtgaggccggaccgggagccgaggcggaggcgcccggaggcgcctgggtcgcctgcgcagcgccgcgcatgctcggcgggatgtactttcccccggagttcattttgcagagaaagaaggcaggtagttttgcctgtggtttagagaacaggagaacggctgtgaggccggaaaaggggagaggcgaaagcgagtgtaaaccgtgaggagacagcacaaggaggagggtgcagagaaagcgcgcgcgagagctggagacggaggaggggaggggaaacgcgggagagagaaggactggagagacaccggaggcgcgagacagaacggaccgaaagagagaaaaccgacgagaaaaagaaaaagagaagcaccccgcagagcacacgcagctgctggacgagtagcaggcggcaagagacccggttttgacacgggagagagcgagaaggaggaggcgcgaagcagcgagaacaaggagagagaagacagccagacgagaaagagaaagaagacctatgtgagccaaaaccgacgaaaaacatttgggcgctccccgtgtctcttcgtcgctctcgaccatcacgcaaagaagagtgggggtcttctcgagcctcggcgcctttgcgcctttctctctggacttctctccactttcaccctctctcttcgcggcttatattccgttccacccgccccgactgcatgcggcgggcgagctggcggccgcgcgggtgccacagcactcgtcgagactcggcacaatccttgaacttctctcggagaagagtcgcagaggcgagaggaaaaacagcaaagcgccaaatgaacagacagagctttgactgtacacaaaacgcgagggatgtatggataaccgacccagtcgctggtctggacagctctgccgtgtctagccgttgcgcgaccgagtgtgtagactcgttcttgtccagcgaacgaagtcagcggcgagctttgcatcttcctcctcttgttctctctggttcattttttattgtgtagaaacgcgctctttcctccttcctcgttgttccgctccggtggctctttcgagagcgactctttcaaaccgcttcacgacaccccgttgagactctgcgcctcaacgctgttcttttgagtcgcttttccgcctctttatttctcccaaactcttccttgctttgtgaaagcgcggcgcccaagttgtctctcttttcgtcctgtcggtcagaaggcgtcctcccggtcttgcttcttccgccctcaggtctgtcgagttgagcttgagggcgtctgagctggcagccacggctaaagggagtctcttctctcgttcctttcctgtctcctccctctcctccctctgctcctctgctctccgtcgttgctcggctgtctgcccgccatacatgcgagttcgcaggtttgctggcatttgcaactctgggagctctgccggagcttgcatgcgatgcgcgtctccgcaaggcttcgctgctcgccgaga

SEQ ID NO: 1625 - DNA, 3899 bp, Toxoplasma gondii
  source 1..3899: mol_type = genomic DNA
gtcgtctcacgatcgctgcgctctcttgaccaaattcaatcaaaactaactcgtcctgctctccatggcaatgcaacacaggtgtcggcccctccactctcttctccttttcttctttcttctcctctttcttctcttcttccttctcctcctcggtcttctcttcctctctcgtctgcagcgcctctttgcggctctgcgtgtctcgcttcccgaggcagcctgcgctgactctgagttcctgcgcgagaggcgtccaggtggagagtgcgacgatgccgcctaggcggaccgaggcttgcaagccggtgaagtaggcgagggcgccgccttgactgaatcctgcgaggataattcgctcgggagcgacgccggctgcgagctcgccggcgagaatggcgtcgatgcgctgcttggaggcgaggaagcctggcttgtcttcgggagcgtctttcgacagcgagaagatgtctgtccacgcgggcgccggaaagccgccgttcagtgtgacagggcgcacaggcgccgtcgggaggatcacccgaagcgcaggaaaacatgagagcgaagaaagcagcgaaacgaggtcggcccaccccgcggccgtatcgcccagaccgtgcatgaagacgagagacgccgtctgcggtgtacagacacccgggaagcggtggaagccttcgccgccgtagccgtcgcctggctggagagacgccattttgcgcagcgccggagggagagaagcacaggacgtcgagctggagtgtcgactggagccagcttccgagggaagcaggggacgagagacgaaggaaaccgcagaaggcggaagagaagaagagagggaagaacgagcgagaggagaagagagagaagaagagataggagaagagagagaagaagggagagagagacgagtagatgagggggggtaggcgttggagagaggagggaaggtaggaagagaacggggagaggtaggagtttgcgagagaaaggcgcgaagttgagaacgagaaactttcaaggacaagggcggcatgtgtgaatttccctccaggacggggcggcagcgagaagacacacccgagacgggcaagggcaggagaagacagagaagcagcagcaagcgcgagaggctgagccgcgtcttgtgcggtgcacagcagccagcgcaaatctctctgcgtttttcagaggaaagcctttctagggaaagagtggagccattctctcgacgccttgcacaggaagaagagatgaaattcgtcgaacgcccgagagaagacgcgagacaccgcggaggtcgaggcagcatgggtgcacacacctcactcggaagaggactcctgcgccaacgaggtaaaagtgcagcgagaaaagaaaagcgggagacgaaaagaaggaaaagaaaaggtgccggaaagcggcagcgcagagcagcaggagacgcaaaggggaatagcggcgccccactgctctcggagactcaaaccgtgacgcgttcactctcgggggggaggaggatttccacagcaactgcatgcgagcgcaaaaaagacttgtaaaaagaggaaaaacaaataaaaaggcacagacgatagagaaagccgggagaaataaaagagaaagctgacgaaggcgaaaaagggataaaagaaggacaaaaagaaggactcaagcagctgtgttttcgagtcgcgccagcaggagagaccaagaaggacaagaaaggtgtgtggctgtaaacgcttctcgatgtcgctgcagactgcctctgtggactcttagggaagaaaggaatttctttaatccggcaaaacgagaaaactgcggtcacggcttcgacagcagtcacacttccccgtccacccagtggagggaggtgaagagatgttctcccgaaaactccacagtttgaaaacgctctgaagcgtctctccagtatacagtcttcagcacttcgacactcatcacttatgtatatgtatacatgtgatatatatatatatatatttatatatatttatatatatatatatatttatatgcatatatgcatatttatgcatttatatgaatgaatataatgcatctcagtcgttttacatgcgcagatgcagagagcctctctgtaagcgagatcatgtattaaatctgcttctatctgcgataaaaatctactgtgtttgcatcttcacacatacacgttggtattctatccaaatattcatgtatccatactcctataaatatttaggtctactatatgtctgtgtgtgtgtgtcgtttccaacgggtgtttcgtcgttccaccggataaacgggggccaacatccgttcttgataaatacgttttctctgggtgtgcaaacgtgacagacacacacacacagagttcaatctatctccctagccagaacgttttcgtaaaattctttttcgctgagtcctatcagcctatctgctctaccagtccacttcttcttctgtggaaactcgtctcttgcgggatccacgattttctattcgggcttctctctcagtccctcactgcacacacatttatgcttgtatttacccaacgagtaaggaagatggctattcatactgacgccgtgtttaccagattcccatctagacataatatggacctctatatggagagagagcgagaaggactgatagatacacagtatatctatacatatacacatacaaatatatatatatatatatatatttacacgcatatatatatatatatgcatatatatatgtaaatggatagaggaaaaaagagagacgtcggatatgcatcgagagatctttgtaaattcatatttcgcgacgacggagtacgtatgtaggtaaccagcagtaaaggaagacttgttctttcctaaaagctgtatcagaaatgtgtaaaagtggagtttggaggtatctttcaagactttgaagatgtgtgggtctcgtaacaaaagcactgcggctgggccctgagcaaacagaacgtctgaaagcgcacactgttttcacagaagaatggcattggtgtctggactctcaaacggagaaaattctctgatgtagatacttgcatgcgtctgttttttccgggatcgtctttttctgcgcaactgtcaaagttaaggaaaacatcgacaaacaaaagcaggtagacccatgttgagttcgaaggatctctcttctctgctctgtgtctccgcctcccgtctgcctctctcttattcgccttctttgtcgctcttccacccgctttctgtctctctctttctctctcgagtccccgttgccctctcgcttctctttttccgaatgtccactctctgtgtttatgtgtgtgtgaaaactcgcgagtctcctcgaaatgccgactcacctgggaaggcgagaaaaatgtgtacgcataaagcgcagcatgcaccaaaaaaagacggcgccgccgttgagtcctgcagacaaatctttgcgttttctgccaaggcgtggaaacgcctttcgtcttcctttctttttgctcttctttttcctggaagccttcccctgctttctcttccctctcgaccgccttcgggcggctgaccagacggacctcgggccgcttcgatattggtcctcgtttgtcttctttttccctcgcttctttgctcagtttttggtccacgttttcgcttgctttgcggtctcttttcttgcattctccgctccttctctctcgtctttcaaggggaaacaaggtcggcaggaagacgcgtcttgggcgtaggtgcctgcctgtctatacagcgcagccgagcacccttttctttccgctcttttcttccaacctttttgtgtcagctggtctccctcgtcccctgaatttcgagaca

SEQ ID NO: 1626 - DNA, 4719 bp, Toxoplasma gondii
  source 1..4719: mol_type = genomic DNA
tttgacgtggtttcctacccaacctctgcctcttatcagacacaacggtttaggaaaccaagcggactgtgggccactgctgtctctgtgacgccgtcttagcaaggtccgtgaactgcccagtgaacagggacgtccctttagagcgtagacatgcgtctcctggtgcgacaggaaaacagtccagttccccagacgattttgtttcattcgtggattggcccatctgaactcaggtttcccagaacgtactcaaacgtcaagagactcgcgtgctcggggcgcccgtcgtcctgcctcagctggaggaaggaaattgctctgaccgggacgttgaaaatcttggccagcagctcgcgtgtatcttcgaaaagttgctcggtgtagtggaaatgctgcagtggaaccgcaccacacctgacacaccgatctgcatgcaactgcgccgtggggacggtccgttcgtcgacgctgtaggattcacgctgtacaagcaagcagatacgaagccagacttggctgtttcgagcacttaccattaccatctctctcagaggcaagtccccgaatcggagggagagggccttctgagaagggaacgaggtgaatcggacggaagcttcgacagctgggagaagaaacccgctcaactgtccatctccgtttcctatcaagtgtgatgtggagtgaaggcccaccaacatcacgcatgcaaccaaggcgcatgcatacaggggtaaattccttctgtgtacccgccggcgcagagaagtcgaggcggggactgcgaactgaggtgtcgccttcgccataggcgacatccgcgaacagtggacagcggaagacccgcatgtgcggtgcgagaaactcgaaggaagggaagaatcagataagacagagacgcaggaagacgcggacacggcgccagcgcttggcttcgacacggcggtggaactgcctcgttgtgctgtcaagcgcaaagccggggagaagcggcaccgacaacttcgtcctcccgtggtgccggagccggaagagccggtgtatgcacaagtagacttcattgtggtagctgtcgtgacgcgggaaagcagtggtgcgtgactcgagacagcgcgcgagtcctttattgaaatcaacccaggggactgccctgaaagcaactgaaacatggtgcgcttaccgacgaggcgcacaaccttcgcaaaggccgggtcacgctgaaaaggaatgcatccagagaatcactgtagatctgacggttttctaatctaactgccgggtaaaccaacttgcactgccccggaaacaaaaacgtcggagggaaaaaacgctggggaacaaatcggacatagaagttgccggacgaatgacaggccgaaccgtttaaatcgggcagctatccttggacgtttccgaacgaaaacggaaatcgcgcgcaagtcgtagcaggagcgtggtcggctactgctcattcgatgaaaacaaatggatcgaacgaaaaaggatgccctgtcgtaggttcaaattccaactaaatggccttgtctgtcgggaagccgccaggctcgccagtatgtcacagtttcgaaacaagggcgaggtgtggcgaatggcaagggctctgacgaacgcggacatccacccgaaaggaaacgcttcgtaaggcgtacgggaaaaggatgaaaccgtagatgaacgtgactgggccgtatctacggttctgcctgaccatgggtcgtccgggttcgtaccaagtcgcgtattctacagaataccccgcctttcttcactgttccaaacacttaacacactgagatgaagtcgatgaatccagccacctagaaactggggattcgccgtgatgtttggcatttaggcactccgacgtcagtttgcagggcgtcctcgttcccctttgtagagttgtcgcttccttccgttcgcactcgctggcgacgcagtttcgcggaacgggtgcgctgctggcagccgagctgagaaacgggccgagaatgagtgaacgatacggaccagtgaggacaaagaaatacagcgagaggaatgccttaaacgcgggaaaagcgattaactagggaactcgcgacatggttcttcccgtccgcgtatatttgtgtatcgagcaggaggaccgctccattttcccgactctattcctcaactcgattctttggtggagcctgctggcacaaaaaagcagcggtttccagtgaggaatgtcttttcaagagtcgctttgtgccacgtattcactgatggcctcggcattacaggaaagtttgcttggcgagggcaagctgccggagacgcccttctggcaagaggcggaccggtgccgaggagacgtgcaggcgcaaatccgtccttcgctgtccgcagattcatcgcgtagactggcgatcttcacgagccctgtcttttttacgcattcgcactgttcctgagcatcggttcacgcgcgtcgaacctctacgtcccttgatgaacgtgcatgtggcccagagtttctagcaacccccccctccgacgcactctcttctctgctgccctccctctctttcgtcatttgcgcactctgcctgcccgctgctcgaaggtgagccgtcgggttccgggttctttcgagtggccgagaaagcggagaaaatccggcggttaaaggttgccttcctctaagtggtgtttctactattgccggcgttgcgatcaaatgctcctctttccctgagctctagcgcaagcagattcccttctctcttttttccacgcaggggggttctcgctactagagacccgtggccggaggggctcgagagcactggccactcagaacgcccgcgcaccggggagagacccgaagggaggccggcttttctcccctcgttgtccgacatggtgcaggagcaaaaagacagcgggagatcctccggggtggggctgctcttcgtccgggcacccggcgtctcttggcacacagcgctcttttgctacagaaaaagagaaccgagggtaaagagccgcgcctagggaaagcacagaccagcgtgtgcgcggcgttacaagaagctaatccctctgtgacctgagttttcgaggtccagctgggtttcttaagaaagctaaagccagtaatttttttgccgtggacgaactccaggtaggcgacgcgcaggcgcgagcgcccaacacccgctcgcgccccggagcgatgacccatcacttggccgcgacgaaaagggttgacccttaggaccgtctctctctttttccggttcctgtgcatacgtcggtcttcgttcacgtcatctgtggccgccagtcgcgtgtgcgacgtcttgggggcgaccaggagaaagccaagtaatccgtccagtgtcctgccctgtggtatctctgggtgcaactgtcgaacgtattccctgtgcatgagctatttttttctcgcaagctgtacgcctgtattcggacctgtccacgatcgtcttgcgcagcgtttaaacaaatatctcttcttttccggattcagccgcccgcgagcccgaagcgaaagatcccggacgcatttgcgcctggcggcgaagcttctcgggcgatttcccccttgtcctgctctttcgccacggtattctccactgttgtctgcactgccttcccaatcgttttctccacgcgttcggcagggggcaagctgagacttccagcttcattgaaagtctgcacccgtaccgagccagtcgccgacgacacagagcgccgacgcctgctcctgcacttgcattgccccgcagttctcgaaagagaagcgcagcttcgtcgttcaggcacgctccggttaccgtttcctgcgaacttccagaagaggggaaagcagattctgcttctcgcagccgaagggtgttcatacggtgggtgtgcagttccacaagccgacaagtgctacgctcttcgcttcgatccttcccctacgtgcctggcagttttttcttcttcatcgctcttcatgtttgttttccacgtccagtccctgctttcgcataacgttttcttgctgcctgtctcagccagccggcgtgttgcccccgttttcaacttgtgccagcggtgcaccaccatcggcgcgttttcttcgttctcttccgcgccttcaccgtcacgcgtttcatttcacaaccacagcaacgcccgcttgctatgtcacctgcgctggaaacgagaatgttccggacacggttcgttcttccgtgtgtcaggcaagcatttacagcccttcaggaggagttccggtacacaccacggctcgctaagaagaaagccgtggcaacggagcgaccgacccgtcttctcgaaaacctgagcgctattctttcgttaaccccttccagtctgtcgaccaacgcccagaatacacatctgtaggagtctgcaaactgacttgcctttacctatcccgtcggctcccctagttcgaagagggtgagaaaggtacatggttaccccgtggtgccggtcgaactgttgtctgcacacatgctgcgttcctaagtcctcgtggaggttcttcgtcttcagcgggctgctcccaagaccttcacgctcacattttatccttcctttcttgtcccgctcccgaatttgcccaccctctttttctgttcctgcccgccccccccccctcccccgccagtggagaccgcaaaa

SEQ ID NO: 1627 - DNA, 4939 bp, Toxoplasma gondii
  source 1..4939: mol_type = genomic DNA
agcttcgtcgttgtcttttgtcgcggaaggccactctgactctgcgtaactgcgcagccgtcggctccgcggctgttcaagcagcaggcgcagtgacacgcgcacggcttctcactctgcgtcgctcccagcgaactcgtcggagtgccgtccggcgaagacccggacggagaggcgacggacgcggtgtctgcgtcgatctccgcatggcgcgccttgccgtctttcgcgtcttccgcgtccttcggccccgaagccggcgcggccacggacgccttcaccgagtagtagatgttgacaaaatctgagggacgcacacacacgcggcacgctcccccaggtgtacatacactcgagcggcaggtatatggttatatggtcaggtgcccggcgccagtcaagaggtccggaggagcggtgccgcaaaacacaagggggcaggaagcgcgacagagttctcctggaagaaagacacacagaggtttttccgcgagtgcactgctgcgttcaggctaacgtggacggacgaggaggagcggtcgccatgtgacgcgacccgtgcatcgccaagggaaggagctatgcgggctacaggcgaacaagggtgactctgcggtcacgcaccgacgattcgctgaaccgtaaggcggtaaatggtggcctctgtgcaaagtttttccacgggaggtgtgccggtgactccaggcggcgcagaaggggcaggttctccgttgtccgccgcgtgagcagggccgggactgctggatttcagcgcttctccgtcgaactgctccatctctgtgggggcagctgcagtaactctgggcggtggaggcgagttttccgcggcctctttcgcgtgggcaacgtcccccggcgccaggctacgggaaaacgcgtctcgcgcagtggctgggtactgacatccaccaggaaggcgtctgcgaagattccgtcgagcgcggcgaactgccctcagatgcctcgcaaagcggttgcacccggtggcattgcagcacacgaatggcgaaatgtcttcgacggttctgggtggcactctcgcggcatggcacgcgaaaaaggtgctttctgccttgtcgggaatcagggaaagagcggacgggtggactgcagacgtcaacagtcggagagcaagggaggaagacacgcgtgcgaggctcggcaggcgaagaagcgaaaagtgacttgcagggagcagacaggaggcgaatctgcgaagaggggaaaaacgcgaactgtgacttgagaggaacggacgcgaactgcgaaagcaaacgccgcgcgcgatctgcgcaaaccgttcgaggaccggagacctcgaagaaaggcggtagaaacgggcgtgcgttcgaaagcgcttcacatgcgggagcgtcgtttccggaaggcgaagttccaggaaacatgcacggccgaaaagcacgaaccccggcgtggacgcttttaaaaacccactgtatttcagaagtgtacagagaggcgtcgagtgtcacattgtgaaggccgaggagcggagtggacgcgctttttttcgcgcttcgtttcggaaatgcgcaaaaagaagggagcagagaagccagcgcagacacaaaagagaaacgtaaaacacctttcttccgttccatttcgctgcatgcatccattcaatcgccaacggaaaaacacaccgcccggacaccgcgaaaattcccagcgcccttgcatgattcggcacactcacaagcggtgacttcgcggtctcttcagatacatgcacgtcgttctcacgctcgaatggacgcatgtgtgcgagtcccctaatgtgtaaaagacgtgcgcgtttctgaaaggcgactgcctctaaaaaacttgtggtttgtgtttctgacacgaacacgcgacactaacgagaggctctgccggggccaccaagtagagaggaagatacgcagcgaggcgcttgttagcgcaactcagtgaactttagtccgtgctgccagcatgtaacgtgctcgtttgcgttgcgcctccacaggagcatttcaggaagggaaacgcctctagcagcgactgaaagacccagagaaaatgcttttcgcgtgtcttgcaacaaccacaacgctcttgtgagcaagagtcaagaggtcgtaaggacgcttcatctgttttcctcgcaactgaagagtgtgaacactcgtcgtgatcatccggatgagaaaccgtgacccgacgcacagccctctccatatatccacgctgaagcacaacggcaaatctcgttgtttctgaggaagcgagtggaaactgttcactagccgtttgcgtcgtgacgttggcaaatccgagtgccgaatatggcggcagagctgtcctagactcgtgaggcctcatgcggcgatccggtgtccgtgtcgtcttcctttgtgcacagtccaagaggtaaaaaaatctgggaagcccccgaccgtatatcatccgtgaatgggagcatgctgatgtgcacatacatatgctgatcttgaaacacacgcaaaacaacagagatggaatgctcgatgtcgaggcaagttggtgaacactggggctcagcgcagacgcaaaagcaacacagcagattattatctccaccgtctccccgtagtatatgcacctcgaattagcgcttatccagtaccctggggattcgtgacatgtgggatgccatgttgttctgttttcgctgacaggtgaaacaaaaaacccacccgcggatggaaaagaactggtttgctcgagagctgtatgcgttcctcgagactctgcagccaggtcgggcaaatgaaacacattttttgccctcgctctaaatagcgtctctgtagcttaaaaatgccttatctacagcgctgtgagactttttccaaccaaaccaccgggtgtgaggcccccaaccacgctgccacaccttgcttctccgtgtttaagttaactacgccagtttagttgcttaaacgaaaaaagaggtacggtattacggcaaagccaaaacttggaggtcgtacactagtccattaacccgattcaaaaaagcagcactcttcctgcatagagtgccgtgaaaaaccaccgcctactccctggaacgaggccacgcgatggctgtctttctgagtgtggcttttctcccttgccaccaatacgaaggattgacaggcctcagcagacagtcgtatcatgccgttctttcaggctgtcggctgtggttgcataaaccaggtttcctgatataatttatacgcgtatggaagcccaactatgaattgggaacaggacaggggtctactcgactctatttgatggcagatgttatcgaataacgaggatacctgcaggtccttccggcttaggcaatgtggatgtagggcttagagaacctgaatgaagcgatgaccaattcgcagaaaatccatcggattggaggcttgcaaggcaccagaaatctgtccagcacgcctggaccatagagcaaggaacttgatattctgttctggttccccgggagcgaagataatacgtaactccacttggggacggaagtaggacatggattactgctaggaaacacgataggcagcagacctccttctgacgtagctgtgtgcctggcattggagtgtctgcaacaccctctgtggttcgtatggtttttctgcacccttccacgaggagaactgagatacatagggacctagcagggtggcgcaaaccgttggtggtcgatcccgcgatgtttctggacagcgctaaaacaagctacgcgtgttgtcattcagggaggcaacaccgttctacctcggtgtcgagtttcggcgttccatgaaagtttttgtgaccgcctagcgttgaccacctgtttttgtgtgttcctcttgcggctctacttcggtcggccttgcgatcacggacagagctgaggacgggcgttgcaccggcaaagcggctcctcgcacagacaggcgcacttcctgtgacgggaccctgttgcacgtcgaggcaatgcgcgaaaaaaacagtgaggccgtcgggtgtctgcctttcccgcttgtcaaagaaggttcgagaccgtcggagctttgagtgtgggtgtatggggacacgccgaaaaacggaaggcggcgtagatgagcactcggcagaaatcagcgtccggtttttgcatgcgacccgcccccaccgacacaccacgtttagacggcgcatatcgcttacatcgttcgacatccggtaagcaggcgatggcgagagagaagcgggccacgagcagccttttgcccagtcacattctcaacgaatgcgttcagacaagaacaaaaacaactcccatccgtcttgcgcggtagacaaacagtggtcggctcgacataacatcggtgcactcggccgaaatttttctcgcgggcaacagacgaaacgcccacaggtgcgtgtttttttcggagagaaatagcgcgcgattcgggcagatgcctctgtcttctctcgtcaaaaccgtggcctttgcaggtgcgactgccgttctggtctgaaggcgggctacctagagtgtctgctgcctcgctggtgggaaacggactctattcacaccaagtgaccgtaggatgccatttgtgctggagggttccagggtaggacgtcccgacagatctgcgttgcctggtgcaggtgtttcctggtttgaggtcgtccgtactttttctcttgacgtttgcagtgtctctttgtcgtctggtggtgtctcacatccgtgcggcactctcgaggccgttgtgtgcgcatcccgtcagtctgtaattccatgtattgcctcaatctacggtacgtctttcgattcttctgtgtttgctcagcggtgaatcgtagatcctccttctcaagttcaaccccttccttgtcaacaaaa

SEQ ID NO: 1628 - DNA, 4485 bp, Toxoplasma gondii
  source 1..4485: mol_type = genomic DNA
atgccggatttgatcttgccagcctctcctagttggagttatttgtatttaccaagtgggaggggagcccctgttgctagcgatatcattctgtactttactcgaaatctcttctgcaggttgacgagccaaggtggttttccgcttatgtgctgtggttgtagatatcagtggtttctcagagcatctgcttttgtaggcgattactaccatggtcgatgcatccgttgtgggatataactgtagaatttctacatcttccatgatatgcagtaaaccttgtcctgattctggtgactcagttttttacattgggaagaaaaagctagaggctgtactcgcaagccaatttgattagccagtcctgctgtacctccggacttgagccaggcgactccacatggtgggtaaaaagcaacagacaagtttgaagggaagacatccgcggtgggctcattgcttctcagagtcacgtcgtcgcatctgattcgcccagtagtcactccatgaacaagaagccgtcacaacaacgcacattcactctacttgtcgatttgtaacgccgtgtctgtcatggttcgcaccccgggcctcacttggcggcacacgagggacggcgaggttgtcactttctgctgaaaagaagcagttctactcggtcgatccacgtttatcagaacacgttgtcagcggatagtcgggaggcgaaataatcttcggatttctacagggttaccaacgctgttgcggcatgtgtctactgtatccctgtgtaaaggactattattattcagttgagaaggcacgttggtgtctcattacttttgttcctggatcttttgaggctccgcacaacaaagcaacagatctaccgtactaaagcgcgagcccttattgaatacaactgcggtactaggacactttggacaggaacgtcatgagaggctgcgtcaagggcaatgcattcttcgtgtgtgtagtttttggacagttgttacatcgttgcagaaccgcaggggagtttagggaaactgtgcgaatgtacaggcacgccgtgtatgactggataaccagtgttcccgtacgccacagacaaaagcagagacacagtgtagtgacacccgaaatattgagcgcgcaccgctccaataacggaggcaagcaccgggcgcaaggggaaatgcactggtctcgcgccgttgacaagccacaccggtcaacggtggtcgtctgtgttctacgtcatattcatatcggcattactgtagtggcatgatgcggctctccacagttttatcagttactttgtttcctcttctttgggcggtattgacttacgaatcatcttggtctgtagcttctcccacagcgccgggcgaactcgcaggttagcccccgagagactcggttgttcacgtcagttgcccgagatcacgtagcaactgaatatagaagccaaactcctccctcttattaagcggcacgacgtaccacacacccgcgtacttctggtgtctttgcaaaatcaccggaacacgcagtaagtgactgaaatctgctcagcgaccgtacatccgagcagcagtgccatctatctgagcatcagttccataataaatgctttttcaggtatttcggaaaaatctcagtcggcaacccgcctcaatcgttcaacgttgtgtttgatacgggtaaggctttctgtttttgccttcttgactggtgacaagatctatttgcaacgctcaggcagtcaccacttttggatcccttcaaacgagtgccaggcttcttcatgcagagctcattctcgctttgatggcagtcgctcgtcaagctttcgccaccacagcaacaatgggtggaacgaatgtgtcaccgtcaccttcggaaccgggcgcgtcgtttaccggaaggcgctagaggcaatcagaatcggagatgctgcgtatgtccgttcaattttggctcgttcattggtatctggcgatccgcgaattttcaggatccccagccaagcagttggtcttgtggttgatcagacagacgagccgtttgtagatttacgtaagagcgctaaatgtgtggtggatagtcgagctgacgctgtttactgatttattcagcgtttgatgggatcgttgggctcggtgagtactttgtcgtgtacactggcatgtgcttgtcacgtagttcctgcttagccggatcgtacgaacgcagcggacaaaaggatttgctcgataatctcaaaaccgagcgcgttatagcagacaagatcttcgccgtttacttgtccagacgccgcgttatgggtggtgtaattagttttggaggatttgatccaaggttggcacattcttctcgagtatcattcggtttatcaatccattcgtcacaaaacggcgttgtctcagatttgttcagcaagggaaaaacatccagtggtttgccacgcttcctcaagaaggctgggcaattccgctcatcgattttaaggtcgatggcgtcagactccacctttgtttcgattccgccgagagcagatgcgtagctgttttagatactggaacctctagcattggcggccccaaggccgacatccatcaggtgctcaccgcgctcggggcagccccaagctgcgaacgaagagtcgacatgaggcatttgacggttatactcgagcaaggaacacctgggcaggagatcgagttcgaactgacgcccgccgactatctagtcgaaaacctaaaaccatcagatgactacacttcatgccccgcggcgttcatgcctctagagttgaagcaacatcctgtccgcatcttcgtaagcagattaaacatttgaacactgccaatctcaaccggacgtaggactgggagtacagattcttggtgaggtattcatcagacggttttacacaatcttcgaccgcgagaatcagagaattggtgagcacaggagacgccataagcaggtgcttgtctggaggttatcattactactacttcacaggcattgttgaagccgctagtgacgcaaagcctagcaacttgaggagaaaccctcgagaacgctgggatggagttgtcaatgcagaccgcagcagttggttgtctccggattaaaagtacctggagctgacgacctgctttttaattggttgggaaacgggctttgttgtgttgtcaagcagagacttgctttttttactaaccctctgggtgtttggatagatcgtgctgttgacattatgatttcgtgcagtacatggacttatggtttatccttcggcaacacagtgtccgtgaaggcatgaaccccatgtgcaaagaactatgcatgggtttcagaagtgatattgactcctcccaattcctccgtggacgccagcgatacgctaccgtaggatttgtagctggatgtcgatgtttgccactgttttaacatttcgaaagtttttggaaagctgatagcattccagatgcgggcgacattctgaaccttctcggcgacggaagccaataacatctccagcgacaacgcaccatccgtgtgttcggttttgcaagctttggagcaggacaagttgaaagatatgctgttgctgagtgtgttgctcttgtctgagtggcattagcatagtcgaacgattccggcgttaatattctgataatagtgtgtatggcagatcggccttctactgcgatgagcaacgataggacaaccgctgtgatggattcgcttgcatggcattttgtccaactgttcaaactacccgtgtttaaaattaacgtacttctgatcacccttctgaaacaagcctctaacggaggcatactcattactgcctaacttgggagaaacattcctcgatcactgtgtgggcaccacgcggcgtacgccgtgagaagcaagaaatctggagtctggatttaccttcatctcttacggcatgaaatattgactggatacatacacttgcagaacctcgacgaggaaatgatgagtattttgaggcaccactgaagaaaaagtacagtcaggcagccatacgatgcgtttcaataagagaactactgtttcgacgattgtcaccagaaaattccgaaatttgctcgcgggtcaggcaaaggagacgggtatcccataggtatgagggcagcctctcggtagtggcgctggtgtcgtgtacctgctgaggaatgtatttcggcaacatgctcacacattcaagcgatggtactgcgcggctctcactcaccagttgacaacggcgacacacccgaatcataagcgcttcaacgatggttggcgtgtgcggcaaggttcactgtacagacactggtgtcgcccggcaatgccgcgccgcttgaagccactgctgtttcccatgggtagatgctcaccacaccttaacattctagaatctgaatttgtttgtcacaacatcgctactttagtaatcgcacatcgtaacga

SEQ ID NO: 1629 - DNA, 1881 bp, Toxoplasma gondii
  source 1..1881: mol_type = genomic DNA
tccaatgaacttctcgaatacctcctcgctgagggaagtgtacactgtcgcttggccctctccgtcctgcttgcccgacggcgaagagggagaacgagcaggagacacagcaggcgaggcacgagaaggagagacaggagagacaggcgagacaggagaaggagagacaggagagacagaaggcgcggaccgcccaggacctgtgggggctgcagtcgcggccgacggagaggcgccacccttgcgccagcgacgaaacatcgcgggaacgtcggacaagaagaaaaaagagaagaggaagaaagaagaggaaaagtgcaggtaagaggaagaggaggggggagagcggaaagagaagccctggaagagacagaagagccaaaggagagaagaggaaaagacgagaaaagaaagagcgttttgagggaagcaagcgaagggagagagagtaagaggaagccgagaaggagcagaagacagagactaggtagagatgaactcggggacgaagacactaaaatggtgaacagatgaggaaaagatgagatgcaccctgtcgcttccaaacgacagggaacgacagccagaagtccaccttctgctccttctttcgctcttatctgcgtcggcttatcttcggagcgtccctctcaaccagacacctggcgacctgagaagtgagtttcttggattcgtcctcggcatgtgcaggagggagagagaggcgcttctgtcgccagagccgactacctccagagacggccagtgttcttctctctccctccctctctgctcttcttctctgttctttgctctcctctcctctccctctgcccctctgtcattttctggccgcctcttcggtctgctcctctgcccaggttcgctgcttcgtaaggtagttcatgcgtgtgcctctgacgccttcgcggagaaggacggatgaagcagcgaggaagcaggagaaagaaagcaggctccgccttccttgctctcgcgttcgcagcggtgtacagactgcgcagaagacacgacagagtagacgagaacgaggagaggagacgtccgaaaccgtcagagggcagaagaagatgcatgcggcagaaagagacggagaacgaagaagggagaacgaggcaggagaagcgagacggagggtgacaacaagacaccggagaccgaacagcccgggagaccagcaaaagatgcatcgaaggacgaagactccacgcaaggtgaggaaaaatccctcacgcagaagaaggggggaagacgaaaagctcaagaaagtgtgtagagagacaaagaacgagaggaaagagaagagcctttgagacatatcggctgtacatacacccggctcctcgcgtttggagctcacgcggacgaggcaagggagagaacaggtacagaacttggggaagcagaatcctctcttccgcgtagaaaagaaaaggaaagcacaaggagaaaaagaggacatccccagttccccagagaatgtaaaaacgtaacgaccaccgcgccagctagctcaccgtcgtctccttgcttctttctcctcgagcgtctttgcgcagactacactgtgggtctctgcaaaggggaatgcaccgtttctcccgagattgcaagaaccgtttttacctgcatctgtctcggtttgctcgttttctcggcctcctttatcgaggatcgacaactgagatgaaacacgcgacgagaactcaaaagccgcgtctcttgatcgtgtgctgtcgcggatctccctccttctcgctctctttcctctttttcgtctgtccaccgcggctctcagaaagggacgagaaacaacgaaaggcgaggcactcttctttatgagaaactctttaaaacgaa

SEQ ID NO: 1630 - DNA, 1748 bp, Toxoplasma gondii
  source 1..1748: mol_type = genomic DNA
gtgaaactggcaacctggttgtcatgcttcctcacctccagcagttcagccagcgtaggcggagcgggggtgacggcgtaagaatcgtcatgctcctcgttcttctccaaagattcatcctctgtagaaagcagcaccgtggtgccaacgcatccgccaaccttatcttcgtgactgaatgtatggtgcgaatggaggcgcaccaggatgggcggagagattcgctggctgctctgtcagccaccaccgtatgaatcccggaaacactctccggaacacacctgcgaagtgtgtcttgtccaagaaagcagatgaattctacgcgtttaacaaatcgaaaaattagggttcacttcctacaactgccccgaggtgatgaatggcggcttaactacgtagcacttgctacaaggcacgtcagaaaagtcgtgctgcgcctactatgtcatcggatgaagctaacagtacctgttgtgcttggtctgtgtgtgacctccaaggctgctttggtcgtcagaccaagcgcagagtcctctgctgtcgtttgctcatccgtccgaacttggtccatgctgatgtcgtattgacaatcgttgatcggcacttcgtagccttcaatctacacacagacgcaggaatcacagttggggagcaatgatgcctacatcaacgctggatatagagtcttcctagaataatcgtacgtaatgccacgctgacctgaagtactgaaagcacgtcatgaaacatatgagcctttcgaattgcggaattcgacacaacacctcaccgacctcatttgatctgacatcgagcatggtctcggccgacgcctcttgctgcgccatcatctcttcactgccttcaaaatggtcggagatcgcgtcggaggaaaattcgcgttgcacgtccatgctgttagcacggaagggaagaagtcaccagtggtcgaaagggatgagtacgcaaaacgctatacaacgtcaccgacacgctccgaggattgtgaccaaggggacaaaaccgcgaaagttcgaaaacagaacaacgcaaggggaacacggagaagaaagtatccgtgaaagcagataatagggggtgatattcccgtcaacggttgctatacaggagtgagaataacatatttgtggcgcacccgaccctgggacgttgctaagctagcggaagacgaatgaagcgggataaaagacaataaccgcacagtcgtccgacagcccgttttcaactcgaccggcacgcggggtcccccggggggcgtggcagacgaggcagcagcggcagcgagtgactgttgtagttttcgaaagagacaccgtccgcacgaaaaacggtcgctctgcccttccgctattttgttgctcagctgttcgatgactgctgaagtcacgaagggtagtgttaaaggtgtggtgtttcgactgtcatgaatggccgtggcctggccgtggttgcgagctgaaaccggtggtgcatgcatcgagtaaaacgtcttttggcgtaggctgggcgcactcacatgcaaccagtagggggaggcagtgttgtaggcagatccgcaaacatcgtttttttttaaacgcccgcgcgaactgcgatacctgtgcgaagcgtgcagcttcagacacttatggacgttctgcaagttaccacctccaatttaatttctgttgtggaacactagtccgttgtggccgtggatgaaacagaacggaccgattcaggcaaca

SEQ ID NO: 1631 - DNA, 3157 bp, Toxoplasma gondii
  source 1..3157: mol_type = genomic DNA
caatttgccctgtctccctgttcgcgtcgctccacctgtccctgctccttgtcactttgcggtccacctcgggtcagttttggtggtagtgtttgctttccagatttttttcaggacccgtccctctgtcgacttcgttcgttcgtttctgtgtaaaatacatttttcatgtcgctgtgtcaatggagacatgcattccttgcgttcgctacaggaaaaagccttgtccggagagttgttatggaacttccagagtagacacgaaggcgacttccctgagtagtctggataggttgccgaacatgaaagacttcggaatgaatgcttttacggggattttgtgtgtcgcatcggagtttcggaaaccgcagccgtggagaccataaatgctcactgtggccacactcttgaaggtgcaccttcgttttttgggtgctgtcgtttggcaagcgcgacacgcaagcccgttgatatgttgagcgatcgtgtgctgactacggagaaacagagttttgagcagcattgccatgtctgctaaacttgtacgtctttgttgtaaaaaatcaatttttctcgtttcctgtgttcaatgtgttcacagcaaagtcagcgattccacaaagaatcgtacctgacgccattacaagactttttccctaccatctcaagctctcgggacgctgcatcccatcgagcaggaccgcatatttctccgtcttgcgcatacttttttcctacgccagaattcacagtgacacccaggacgttcttcccgttatctgctcacccccttatcaggcgaattcaccccgatttcgacgaagagacaggaaatgaccataatccatatgccatgcacaagctgcaaatgcaatggaatcactcgttgtttatccaggagcgcatgcaggcgctcaggcacttcagaaatgttgcaaacgtgtaggtgccttcgcagcgtttgtcagtgtcctaacatcgaagccagcaaatcgtgtccttggtttgaaatgccatcctctacacagtattactggagctgggcgtatgaaacgagggcgccagtgccccgcctatccatgaaaaaattttaacgagtccgacagtttagtgcatgtagtggcacacagaatctgtggcatgttctgtctcctgaaaaggagcatttctcgggaagaggggtcggaacgccagacaggcaggcgcagtgtctcttgagtgaagcgtcttgtaacaacgccgtgaatgggaattatcaaagagcatgccagtgttcttgaaacaagtgtccagcaccaaccgtttcggaatgatgggtttgaggagctaagcatattctttcgtggaccggtaggaaatcgagttcacacttcatcgtcttgtcggtcggtttcatttcgtgtgcgacgagtgcacttaacgaatcaagaacaactctgaaagcaactggtctgtctctcccaccaacccccccgcggccgtttcagcaacgtccggagtagagccttaacttcataggcgtgcgtacacgatcgtattgcagaatggtaaaggcagaaggccctgcgtttccaggttcagcggtgggcccttcctcgccaagcgacaatgcttggttttctgtcgcaaatcgcgggctcctcaaagaaattgactccagacccctctttttctgctgcttacacggttcgcggactcgtccaaggacctccgaaaaaatgtcactcttcgtaccacacatgtgtggcaataaacaaactatccggactagccggtcgcttgctctgtgagtagcacatcaccggatccaacataactacggctgcgaaggctgagatgcgaagcgcaacagtcatcgcagggtgaggtcacatgtgaaacgaggcgaacggacgacggccagcgtccagcgagtgttgtgcccgttctactagtttcccgggcgggctgtccagctggggtgtgtattcgaacgaacaccagaaaagacgggcaagacctgtgcaagtttcatttaggtgtcgccgacttacagaaaccattgacgactgcgaagtctatcttcggggatccgatcttcttctgtcgatgcgtctacgcgattgtcttgctcttcaaccctccactaggtcgatacttgtcacctagatctgtgtagaaacaactggtgaatagctgcgcgccccacatgtgtcgcgtcgctgttgcttgacagtctacagctatatgctaatatgtccctgagagtcgcgacgccgaccgtgccagagggcgtcagagtgtcgcaacgcgacacgtagatgtatgggcagtttaacacccatcatgtctttgctatatccgggttttcgttttcggggctccagtgaagcgagattatatcttcagcaagtcactaagcctagtagatgtatgtgctcgtactgcaacccccctcctggcatcttgcgtcgcatagcagacatacatcgtggggttttggcccgctaggttaccatcacgctcaacggcttccagttgaggaaccgtgttttccccacattttcatgattttgtccaaaagttgcagagtcgacttccatctctggataaggtaaacagcagcactgtgggcagcgcctgtctccaagtcttgtgcgacgaggaacgcacgtcgtctgtccgctggcgagtcgggacacagtgccattttctttctagcagtggttgcatccccctaacaggccctaagaagacaaaacactcaatttactgaaacttcgttccgcctgtagatgtttatttgacaatgcagcgatgcatgtcgtataaggtctcacctggattttggaaagtgtaggatgggctgctttcaactaacgagttttacgtcagctcgttgtgaaatcttctacagatgtgttattgtgagttttaagattttcgtttcctgtttcccttcgatgaccgctttgcatcgttccaacaaatgttagcagttcgcaccagtggctgcttcctgccatcagttgatctgttctcccgctccgttccagggcttgagcagttgcctcgttcatcgtgtgtccgatttaaacagaacattttgacgccgtcgattcgacagagaccgagcatgcctcgttttgatgttctgagggcttgtattcaggcaaca

SEQ ID NO: 1632 - DNA, 1688 bp, Toxoplasma gondii
  source 1..1688: mol_type = genomic DNA
atcgtaatcacgttgacagctgataacgatagtgaaaacatacgatagatgcatactcactaccacgcgcgtatttactggagttcaggaggcacacttggtgggaagaggcgaaaaatgaaatcgctgactacggtgaactcgctggagaagggtattttaatcattttcagacaggtagcggcaaaatgttgctggcataggtaagtgaggagttcccggtcctgaggcatataaagtccttgaatgagtgaaccttccagtcgcgtatcaacttcgcaaagccaacaaaggtgaggacagagtaaagcaactcaaaatttcacttcttctgtgaccgacgtggcgaactggttgaattgacaactgaacagatgcgggtaaaggtgaggtccaaccactgggaacacgactggtaaaaacaatttactcgcctgttgtctgcgatggtacatttattaactgcttaagatactgccaccgtactgaatgatgtcgttgtgatacgcgctgctgaagcctcctgttgaagcagtgaaggctgcataggaaagaagccccgcgcgaacactgctcacacggcaaaaagtcgccttctttgcgacatccctccgaaagagccttacttcacccagcagaacacacaatgtgtcagctgagtagcaattttcacgtgtgtcgaatcgagccctgctcagcctccattgcgtagctcttacactttgacaagctcggcaaattagttgtagccggcttctcgagcagtccatctctgttttctgccgacgatgggcagtgtgaaacaatcccaaatcttaattgacgcggaaagggaccaggcacgtcttctcagacagcagacggcacgccgttgtcgcagcagcatcacagaatacacttccttcgtcatcccctatattcgtttcgctgttggcttctcatgtcggcatataactcccaagcaaataacagtggagaaatctatagcaagagaccgatctttatgcgagccactaaaggacacctgtttcgaggctttccctgatctacatcaaaacaggtgaatcgactctgctagcgtatcatcctttataaaaaagcaccccataaaaaattcaccatcagcagaagtataatacatgcctatgaattgtgtgtgaaaactttggctggtttcgatcaacccgtcgagcaaattcttcctgccatgcaatcgcgtgacgtctctcctgtctgcatgtggcggcatgcggcccgcggtcaaaataatacaactatgagcacgatgacacatacacacacaaacggggatgtcgaagaaaatcttccaagcaccggtgtcaggttttttatgagccagtcttgaatgaaaggaatatccctgcaccgtttgcacagccgatatcgccctctgtggagggagacgccctgtgaaaaatctcaaccgcgtcgcgtctagaggtatcacgatgagtcgggtttctcacataccgttgtgttggactgtgcgcaagctcacatgcgacggctgagactttcggtcgacttttgtgccacagatgatggaagagaaatattttgttccgtcaagtcttcagtagacaccgcgtttccaaggagaggcttttcggttccttttttttgttttatttgctctttctaaattccacttaacacctgcgaaaaga

SEQ ID NO: 1633 - DNA, 1174 bp, Toxoplasma gondii
  source 1..1174: mol_type = genomic DNA
gtgtgtcttctgagctgagaagaggccagattcgactcggcgtcgttttccgaggagcgagagagacaggaaggatgtgcagacgttgagggaaggccgcgaatgacgccgttcgcctcagagcctggctgctgggggggccggtcgctcttgtcttcgccgagagaggagacagcctcggtgtctcggctctcgaagaaagaagaagcgaacgcctctccagcagatccagaaggcggcgccagaggttcagagaaacagcgaaccggagacgaggttgacatggtacagcacagggagagaaggaggagaaggagagcgcaaggaagaaagaagtcggggaagcgaggaagagagagcgcgcaaggaagaactggaagaacaagcgagagaagtagggaaagcgagagaggcaaaagatagacagagacggagaaaggaaaggaaggaacgacgaagaaggaaaaagaaaggacaaaaagaaaggacgaaaaagaaaggacggagggggggctcttcgaggcgagacgaagacaggagggaagatgacacgagagaagctcggagaacagaggagagagaggagatcgctgcacaggagtgaagcaagaacagaaagcgatggaaaaaacaagagagagagctttgaacttggacgaaccttcagaaaaagagatgaatatcgaagtgcaacccaatcgagaaacaggcgagaccttcgcaccacagggagagcaaggagactgccgcagccttcagaaaagagagaggaggctttccgcggaagagagcaaggaggcgaagccgcgcgttttccagagaaaacaaagacaagaagagaggtttccgtacagcaggccgaacgaagaagtatgcctgtgtgcgtcgagagcgtctcggacggctgggagtcgccagggaagagcggcgcgtctgcttctcgattgtccggattctttgcttgagaaggttccctctaaagagacaagaggtcgcagagaagagagcgaaactggagagagaatgcgcggcgagtcagtcctgtctttcagtgtcttctgcagcgactccggagcaggaagtgcttagaacctcgcgcgggaccgcagcttccagccaagttccattttcgtcgagaaccgcgccaaacgagcgtctctctgcatcctttaaa

SEQ ID NO: 1634 - DNA, 1919 bp, Toxoplasma gondii
  source 1..1919: mol_type = genomic DNA
ttcatcgtacgcgtttggaccgtctctgcatccggagggtacggcgcgctctcgtcacttgacttcgcgagggaaacagagccgttcttctgccgcttcctcgatacgccgggtcccggtgcctccccagagtcaaccgctcggtctctcgaaattccatcttgaacgggtatgctgttgctgtgtcctagagctccgacccgccgaagggtgccctttaagttgcctactcgaagctgttctgacacctcttggagaagagcgcgaacaaggggaagaagagcggctgcgatgtccgcagcaacactggaactctcagaggccatgggtccttctcaagctcccagggtacccgagagcattcgttgcagaacgaaaactgagaggcagaagctcgaatttcaagaccagacgagaaagtgggtgaccaaaactaaggaccggttcaacaagatagtcgcagagggaaagcacagcggacgagtaagaggtgataggcagggttattccggaaatcggctggttcactcgcagtgatggctgctgtgccaaaatgagcgaaaggaacacatgcagtaaagcagaagggaagagctgaactctccgttcagactaagcgtgtctacgcaaggagtatcaggggtatggaccgcaaaagtctcagtcgataaaacccccacatcttcggcaggtaaaaagacgagaggacgggggcagcagggggaaagatttggaacctcacgtaggcgagagaggaacagtagtgtattccaaagtttcagacacaacgcagacacgcatgacgagggagcctcactggtcgctctggctgcgtggcgccacggagcagtcgcctactgccaaagcgaaagaatggtacactgatatcgccggtactgcagccaagtgaaaatagacggaattgcggtaccggatgacctgaaaaacacttaagaggagccacagctccggtagctgagatgcgggagcctctggtcagcactacaatgtgagcgatgcaggaacaaaattagtgaaacagtggatacaaataggcgtgatggacggacaaaagacaagagagctattgtaacgtctgtgaggctttatgtataaaattcttcaggtcttctcttattcacaataacaatcatcccgcactgtggggcggccgagcttgaaagagcggcctctgtttgtatttcatccatgcacaatttgccagagttaaacttgccaacagcatatgagtgccgaaaaagggtaccagtgattgagtataaaatggtatttcatgtggcttattcccgctcccctgacgtacccgtggccgttagaagatagacttgagtgtcgatgctagcgtgaatgcatgccagcatgcaatttggaaaattcacgcggcccatccgcgagatattttcgcatcttttggagttccttcagtaacttcgtcaatgtggactatgttttcaaccacttgagagtaagatgtaacggcgggtcgccgctactcgagttctttcctgctctgcccgtaccacttcgtgccgcatgttgtattttacgtagccagcacgcgtaccgcttgtcttaaagaggtttcaatgtgtggaaagacacaggcttgtgccgggactgtatcattcactttaacgtgctaagaggacgtaatccttcgtgctatttcgccatcaacgagcactgctaagggttctttccgacataaaaatcgaaaccactggcgccggtcgttcggccaggtcgcaccttgggttggacagtcgctctgtcggcgcgcctctggaggtttcttacttcgtgaggcaggcgtatgggccaagcaaccttcccgaggctgtgaaacccgtcattttgtattcttttatctacctttgtgttttttctgggcgagaaaa

SEQ ID NO: 1635 - DNA, 1794 bp, Toxoplasma gondii
  source 1..1794: mol_type = genomic DNA
caagagtttgggagagattaaatacgccatacgcccagggagaatacatccacctaaggctctgattggcccggagactgctctgtgttagcaggctgtaccagcgaatttgggaattgatagtcccggattcgttttcatccggtttcccttctctcattccaacatgctgctgtgttgggacgtgttttttcgccctatggccgtaggatttattacgctgcgttggcacgggcaccgccgtccgcaaacaggaggaaggagctggatgactacgtgcatagaaaaaaggcaaagaagaagacgcggaatatacggaagaaaggagacaagtagatcgacaaatagagcggagatcctaggtttcgaacaaggacgaaggggacgctgaagtttggcaaatcaaaaactatgttttagctaagtccctcgaaatgtggaacctggactacatttaggctgaatccttcgaatgtttggaggttttttctcactgccgttttatcttacactggaaggttgcccggttccttgttggcgtaacaagcacttcatatcagcttggtgatgacgaaaagctcggacagaatacacggggacaatccacgggcatatcgaaaagacatcgagcgaaaaaaaagtcgccagcgttttgcagtgtccactcagctacttcggaaggcgcagagcgaggatggattgctgaataaaaaatgtaccgcgatgagcaaaacaatcgcctatcgttaatgacacaacctttaatcaccaccaaatctggaggagatccctaaaaaaattgaactgattctggaaaacctgatagggacctgagcctgcaacggcacctcggcgtcgccgtatgattcttcggaaacgggtgattgatagggtggtatgccgcaggtgagcttgttaagcttccttcttgtatatacaaataaacacacctcttttcggcgggatgcgttaggaatttgggactaagctctgcatattttaaatacagggcattacagcagcagtgccactcggcctggaagtgcttggaagctgtttctagcctgcagctcctcctgtcatgatcactgctgttccaccgtaagtgaacaggagagtcaaccggaccagtggtgagaaacgaccgaatgttgtgtttcctcttcgcaagaattctaaacgcagagacaactctcatctgcctaaacttgggaggcaaacacagccgaacatttttcagtcgtctgtatgagtgttatcacatgggattcccgatagcacgggaggaaaattgaaatggtggagaaacgacagcgttgttttgggttggccagttccgcaagcaacacgagtagtgacaacgcaaaagtgttgaactggcggcgtcagcggattcagtacgtttcccttggctgagcgtcgagctgcagcgcggaatgcatgcaacagcagtgtgctccagagctcacatccactataaggcgcatgccgcgaagttccttcgacagtcatccggacccggtcgccttgagtggggagacagctgtaagttcggctggttctcaacgtttcgaagtttctctagaaaactatttatctgtcaaatttgtgtcgaacttcttccctcagctttctcggttcgtctgacattatactaacctcattgtgtgttccgctccagttctgtccgtgaagggcagacgtttgcagtgcgtccggttttcgcatattgcatccttttgactctgtgctttatcattgatcgcccattcgtttttcgttcatcgcacaaca

SEQ ID NO: 1636 - DNA, 2986 bp, Toxoplasma gondii
  source 1..2986: mol_type = genomic DNA
aattcacttgagttttcatgacaggtacacacaggcctgggctctgctgttctttttgtcccatgcaggcgctgccgctggcactgtcgcggctcgaggtccctacgctggctgcagcggtgttggacagtctgctcagtgaccaggcgccagcagctgtcagtcagttgtcgattcacgaactgtcaaaccttgcttatgcaatcgcatgcgtctccaccaattcccaagttactgtagacacgcatccgtcctctgcggactcaggctcttgtcatgagcagaggccggagcgtttcgaggttggttcatcggaaaaggagtgtcagtctgggatgaagatgcaactgcatccggagcatagaagcgtacgcgagcaatataatgcatctgaagttgatccgggagaaaacagcgccacgggtggaggagttggagacccttttctcggaaacaagagggagaataatacttcatttaaggttcttgaatcccggtctgtatgcacacccgaggaattgaggcgtcggtcgactctgttaacgaccatcttacgcactctgtctcgcagttccctgaggcgccatccacttaactcgccgttcgaacgcgcgtggagacagctgaaaattatcgacctgtatcttcagttcaatgtaggacctctgcgtgtagatgatgaggaagcgcttcagtttctgtctcttgctcggacgaagaagctattgaacctggttcatgtgtcccaggtacagaagcgtgttgggcgcttgcttttcgatgaaggactgatgtctgaaatagacgttgagtacccactggggccttacgtcttagactttgcaataccgtctcgcaagcttgttgtagaagttgatggggaagcccatttcttctttggtacaacggtgccaactgctcagacgcgaatgaagcgcgaactgcttgccgctatggggtggcgcgtggtcgtcgttccgcaggaactttggagaaataaaaggaaagggaaaattaaagaattcgtggcgagaaaggtgcgagagggactcgagatcgacaacagtgacagatagaagccatgggagaaagacggtttgaagcagaaggaaaacgcggggtgtcatgcatttccagaagaccacaatgaagttttaggggaaacaaagtttcttgcacatgtacattttgtattgtctggtggagcgggtaggctcagtcggggaagggagaataaaacagattgtgtttccactctaaggtgcttgtattctttttcctggagagacccgtacagttgtgaaaactcgacaaaccaccgtcccttgcgcttcaccggcaccgatacatttatcaggccctgcagagctgcttttctaagttgttcatggaagctcttcaaagaaaaagatagaccatatgacagtttgctgcagcaagttccagccacagaattttgctttaccgtgagtagaagtgcatcaaacagaactgctgaatgagactcgcagtacatccttggtcatgtcaattagcaggttggacttcaatcaggagcaagcgaccttgttaaacgctggaattcagtaaggtcaatcctttgaagaccgattttaggtgcagtcctcgttcctccttcccatttgaggacgttctggctttatacgcctggggactctttaatgaatatcagttcgggtttcgtgactcgccagaatcccgccagaagtctggatgtacagatagatcgaggcattcaggtggtggacaagtattttcgaaggttttcctcggtgaacgcttcaacaacaaaccgactatcgaaggcagaacatcggacctgctgcggagcaacatgcgtcgttgcaacaggggggaaagccataagtaaagcaactcctgccgtaaactccaaaggaaacacacaccatttgagcgattcatttatcccatctacgagaatcctgtagaacatttcggatggtctcgtactacaagcaccgtagctcagtgggagagtggggggctcataacccccaggtccatggatcgaaaccatgcggtgctactcttcttttccatccgcttttgagcattattcgctttcagtggaccgttcatcaaatcggattgattgacaatatttgcggattttacatatctgtgtcagtttcgtttttaccacctttttggcgctttggggtttatcacaaagtcacagtcactagtgcaccctcctggcgggtacattcgtagtcggtgctgcacggcttttatggcatgccactgtgtgaaaagttgcctatcaagatgaattcataattcttcaggtataaagtccaattcctcacgaaggcaattcatcctcatttcctggaaccctgccttcgcccatggcgtaaggtcgccagccgcagcccctcttcaattttcagtgcttactgagatgctgtgacacatggcagttccctgttattagtttcccgtgtaagccggacgacagcacaacacaccttctaatctatgacagtggacaactcctgaggctgggaatttctggcaggcagggtctagtacagcgtgcaatcagcgtgcaatggtactccgtcctgaggttgcttcagacaccagaagtagcagcccttattgcgtcgctcatgaactcccacgatccaatcacattccccttaggttttacattaccaaaacaaaatagagtgctgctgttcgctggcaagcaaaaatgaggccttgtttctccaaccactctcattgacaccggtgccggttcctgtaggcacctagccctcttcagcagttgtccggttggaatttctgggataaaacgcacagatttgtcacgtggacagtaaacattctctcaaatgagaaaagaacgcattagaagagaaaaagggactggggaatttttttatcccatacggcgttattgccactggttatatgaaagagttgaccatgcaac

SEQ ID NO: 1637 - DNA, 2745 bp, Toxoplasma gondii
  source 1..2745: mol_type = genomic DNA
acatgggcaacgagaaaacagtggacgattcaaaggagaggaaagagaagagagcgacgaatgggaggaagcagaagaagaggtgcgaagggcagatgaggaagaagacgaagctcgaagacgagcagaggaagaagaagaggaagacgaggaagaagaggaagaagacgacagacgaaaagaagatgaggaagaagaagagggacgaaaagaagatgaggacgaagaaaccgaatgcgcgggagatgaaaaagaccgttttgggatgcacaaaagagcagcgagagagggagaaaaacgatgtggaggagaggacgtttgcagttgtgcggctcccggagccactctttgccggaaaagatcagcctctccaaagagtattttcgctgaacagaaacgtgagaggaagaacgagagaaggatgaaacaggggaggagacccgagagaggcggcatttggagaacagagagagacaggggaaagaagagaagcgtcgttttccatgagcggagacggctttgctcgtccttcttctctcccaccctttcgcctgcgacgacatgccacaggttccatcgagggtggaggctgtcgtcacgacaccagccggacgaaagtccaaagtcgcgaggaaaatggcgaggaagagagaggaaaatggcgaggaagagagaggaaattgggaggaaaaatgcgagaaaaggggagacacttgagaaccagtggagaggcacagagagtgaggactgaggaaaaacgaaacaagcaacctgccgaatggagacatcggcccatggctgaactgccacaaaaaagcaagatatcctgtcgtgtcggaagaatacgtgatggtcttttactggattcttcctcgaggtgagagagcgggaaaggaggagcgcatgcacacccttccgtccatgttagcgaacgcgagaaacgtagacacaaactaaagagtacttttctttccagaaaacggacaataaacacaccgcagaacggcgaccgcgcagcggcacacacacttttgcgccagcggagggaccacccgctggctctgccggcgttttcggaggtgtacatacacccatacagctgtgatgagctggaagacagggatagaaagccgagaaagaagagaacagggtatggtcagttgtgggcagcaggcagaggaaatctctgggtcccattctcctctcagcgtattgttatcggaggcggaaaccttttttcaggagcgaagagaagaaactcgaggggtggagcgggcctcgaggacggcattctcgacagaaaacatggaaccagtcccctgataaagacaggagcacgaaggaacgaaagctttcgcttctctggttcgaaagagagaaaagacgcatctgaaaaagcgcgccacgaaaacgtgtctccttccgcgcgctgtccggagacacgaggagcgggcgcggtgtacatacaccgcacgtggctgggatcgcggaggcgccttttttgagagttttcgttatttcacatgtggtttctcgttcaagcacgtggacgcgcatgtgtttcctctctcctcaggtctgccgcgaaaaccggagaaaacgcgcgcagctgccggatctgttcagcgcgcccacccccctctctgtgtcgagtcgagactcggttgccgggctgtggtgtacagacactccaaagacatccgggaagaggccgaagccttttctgtttcttggcgtcggaaattcgcctcttcataggagaaacatcgcctttcctctcgacaaaaaactcgccggcctcggtcctcgtactgctctcttttctgtcttgcacaccgcaggggtgtgcatggccccgcagtccctcctcagacggaggcgtatctctcgcgttcccgtgactggacgggcagagccgtcgagagttgactaggatccgaaactcttcagaagcgagggtgctcctgtcttttctagaagtccgtttgttcgtcgcttctttctcctctcgtctccttcactggcggtctgcgcgggcgcgatgaaccgcgtcggatgaaagacgagacagaacacggcacacacgcgagtgtctacggaatcgtcctcgccgacgcatgcctcacagtcagtctcgatgttcttcccatgttttaatctcttttcttccgcgctgcaatctctctgccctctgctccggcatcttctcgctctttcctacgccgtacagtggcagctcgtcgtccaccaggtgcgctttctcctcgccgcgaatcctctctagccttcttcgttgagtgtttccgtcttcgtcgcttcaaaagatctcgaaaaagagtcgccaaggtacaccaaacgtaatggctccactcctgtgagctggacaccgagccgtgctctccacggagacaaaagccagcttcacttgttttctttcctccgcttttcttcgcttcttacctccataggttgatccaaagagagacaggacgccttgagcgtctgctctcgctcctctgctctccctcaaagcgctccgtctgtctaccatgaacacttgcgatatttacggccctctctacctcctgtagaactctctcttcttctcccctccattctcgttttttctctgttcttctctttctccttctcctccctgctcgctttattcctctctactctttccccctcgtctcctccgtgcgcgcgcgttgccgcgtttggcgtctgctccccgtcgcgcca

SEQ ID NO: 1638 - DNA, 2499 bp, Toxoplasma gondii
  source 1..2499: mol_type = genomic DNA
catgtactgtaatatcacatcataagtagatagtgtctcgctgcagttgttgcctgattggtattgcatgccttgagtgcgtaagggagaggaaaggctacgagttggactactggtgtagaggtcattgtttaccagatccaagttgtattgtgctagcagagcatcgttaaaatgagaattattgtggaaatggaacctattgagcaccatgaactaaaaacatagataatcagggtaatctaggatctttcccggcaaactccaaatgttatctgaacagctgtccgtggatgggctgcccttgcttttgtttttctttctattatagaacgtacaacaggtcttatccactccgactgattgtaattgctctaaatgtcacttcacaagctttgaaagaagaggcgtgcctccagtaagttcccttgggagggacttgtagaacttccaagcacaaacgggaactcagcgactgccgtgttgaaattaacgtgatcgcacccagttgtcagatattaaggcgtgatgattcatggtatcaatcgcctctgaagtctctctgtggcatagagaagttgaggagcaattgcaagaactgtgcagcacatttgtttttctgaaagcgagtgcagtcgaggtgaatgttgtaacttgttgggaatggacgtacaaaaaacactctagcacaccctttgcccttctttgtcagtttcgtacgagctccctaagtgcatctaaaagccatttccattttctggacaagtgctgtcggggcgctactttattatcagaaagagaacatctcgagctcaagttttctactggcccttgacgcagcagatagcgacatatataaaggggtcggaggatgaagaggcgagatcataattgctcccctcgtcccacatgtcgcagcaggatgcgctttgctgctgtacatacgtgcagccactgaatgaaaaaagacaagtgtttttgatgcgtggaagcttcacggtgtctgacatcacaaccagcatacatccagtagattccttccgcgaatcgtagaccagctaggtgtaggacatgtggagctatcgaatggtttttgaatcccactgtattagaaaacgaacccagaaaagcagcgggatggagactctatccccacggacacgctgcctccgattcagattggacagtatattcgcatccttactaaatggcaggtggaacaccaacagagacgacatgtaggatatgagtatttgtctattctgaatagatcgctactttgggcatcgcttgtgattggaattggcgattgattgcttcctccggtataacagtccctgctatattggcaggacggagcagaaggctagcactggagttttccgcccgaattgccagacgggtttactagaatacctcgaaaagccgttatcgaaaacaactgtcggctggacggccgtggaggctgaactaaacagcttgcccccggcattacgcgtgcactggtttgtgaaagcatgaacttatgctggtgggtttgcacaaagtggtgcgtgggtattctatgaacacgccaagcaagcacacattctaattacgatgttgtggtgggaggtatccattcagtaggaattcattggttgggtgcgggtgccccatccactgcggacaacgccgaggacccgactgtgaaaatgccttgggttccactctgtctcgtctccacatgcgaaggcaacctggtgccaagaggcggagaacgacagaagtatctctcctgtttatggtgtgttcacactgaactgtttcagcggcgagaaatgcccgcaggttagtgtaatggaggggaggcagatttgcattttgaagcgtaattggactggggaattcgttttctctctgtacgggcggcagcttgtcacgggattgaaagctgccagtgtaaagtcgagcatgctactttccgcgaccaggcactgagtccctcaacccagccactcgtttgcgaatcctttgtcccaatattgtctctttttcgttttcatcactggcacattcgggatgttacctttagctctgatcggataggcacttaagagaccgagcatgtgttaatccggactctctcactccaaagtgtttagttgacggtgtatccccaaactcaccagcgccttcacactcgcgtctcccttctgtaccacgggaccaaaatcatacgatctctatttcagtctggaaactctttcttccggcttctgactttgccagggctgaacccccctcccctcagttgccgtcggcgatgcatcgaagttctactgtgcaacttcccgtgcagaaaacacaagccgagagcaaacctccatcacccgtctgtgtgaatacctgaaatctagaactccctagggcgacaccccaggcatccatcctgaaaagacgaaatccttcgattcgtcgcggacgcagtgtcagaggggatcgcaaggcgtatcataa

SEQ ID NO: 1639 - DNA, 2418 bp, Toxoplasma gondii
  source 1..2418: mol_type = genomic DNA
cgcaaggttttgtcttgctgctgaagaaactgatgttttgagaaagccattcacaaacggggcacactcaaggggtactacttaaggtggtcctaggttgttttgagatgatcgctaaattcggcattaccagaggaagcactcgcatcagaatctttcctgtaaagaagagcctcatagaaccgtttgccggtatactgatcttaagagaggaacatactcattttgattatgggaagcacgaaattgtcacactgtagtcggtgctgttggagattctcgtacagagttttgagattgtccggttatttaccacaattcctattacgtctccaggatcgcttttcagcgttcagagttcagtatgcctttgcttggtttcgattccctctacagggaaaactcgtatcatacccagagccagttcagacatgtgccctcagcagctatgttgtcttttcaagagatacacacgaatctggagtgacaaaccgttaacgcttccgcagtaagagaatgcaactttattttctggactcgtggactgtatgccattgaatttattgaagacaattcatgcaagtttttctgtatgcgttcctgcttggagcaaacatatactctgttgccaggtaacgtagagattggttgatgtgaatttgctacgtggacgacctgtttcttattttttaccgacctcagcttgcaagaccatcttaccacatttgaacagtctgtaatggcgtctccgtctacaagccaccaaccggttcacaaaaaattcggtgttcaaacatactgctgagccttccttctgacccttttgtacaccttgtttgacagtttgcaaataggaaaatgtcctcgggaaacgtcgaatgaaaatgacagtctcctactcttagctgacaacaacttcggaggtgctgtgcaacggcaatcttggcggatcggctacgtctgcctacgaactctcgcatctgccactgactgccgcggggtagcctttgtccgggttatcccaagctgtcgaagaggcatgaaagattttataaactcgggaaaggtctttcagtgcgtttgtcctaccttttctcgtcacccttcccctgttgattctcgacttcacttcctgttgacgtcgcgtctgtcgacgatataccaacaaaagagcatcgtgttcagagtcaattaacacagacgagctaggacttcccccacggctaaaaaattaccattttcacttccagaaaagaatctgtgtcaccgttcttagctcccggccctcaaggtcgattctcgagtgcgtcacccatcacacactgcactgctttgctttcagcgcatatttaagtccgtgctcaagtgactcagccacttctttgccttgaacctagaactgttcctcaaatcatgcactcgcaggtcttctccggaaggtcgtctgtcaaagtcgcggacaaattccgaagtgaggcaaaattgaatgtgcgctaaagcagcaggggtgctcggaggaactcggggaaagagactcggcacatgcaacgtcggttccgatgcttactctgtcaagccagaagcggtcaccagctattgctcggtctggttcgtgtgtttcatctagtttttcaaaccgaaaagaggtgtgccctgtctcacgtcgaaaggacggcggcaaccagaactcgtagaagcggaattcgcgtgttcgtgcgttactttacgcattgtcttgcgggtggtggttccactccctgactgtgataggtctttttattttctcctttcgtttgttgctttctttaaagggttttttgcttgtctgtctctcctggctttttgcattatttccaaggaaccaaccctgcgttggggactcgttgctgccgcctcccgcggtctttagaacacgtccgttctgtccatgtgcgaagcggccccggcctcgacttcagggaattccctcttttgcatccgtcccgttttccatgttccatttcctcttttcctagcgcgtcgcggaacgcccgctttcacgcggtggctgtgcgacgaatggcgtgtcgtttcttgcgtctgtgaggctcggtgtgtctcgaacgtgtatcaaggtcctctcggtcgaattcgatttctgtgctttttgccgtctttcctctccgatgctggaggatctgtacgtttctatggtttcccgtctagcgggaaatgagtcgttttcctcgcgtgccaagcacggggggtaagccaccgtagaagtctctcacgggccgcgctatcctgtctccgctcctgcgtcatcctttggggctgtttccttccgtctgttattttgctttcgatcttgggaacgcatacagcgaccctgtctcatttctgccggatggggttcctcccgccgctcttgaggcgcga

SEQ ID NO: 1640 - DNA, 2652 bp, Toxoplasma gondii
  source 1..2652: mol_type = genomic DNA
ctccttcaggagttcttggaaggtcggaatcggcatgtcgtagtcattcgaaccgtacttggcctgcactgtgggcacagagacatctgttgcaggatcccaagacggagacagtgctttgccggcaaaaggtagctgcgggtctgaatttgaagcggaggacatcgaagaaatcgacgaactcagggagggggctggacgcgtctggaccgaggagctgggcgcggctgcagcttcaaggcccctccactggaggtactcggacagcgggcggctcttggggaaccggaggggctcgaaggtgccggtttccgagacaaacatgaacttcttcttgcggtaaaaaaagaaaatctgctccggacgacgaatcaacggacagagcgtccgcgactcgaggggcctaccactggggggaatgacgaggacgctcgtcgtgtcgccgacggatgacacagccgtgtaactcaccaagcagtccagggagacgaaccagtgagtgctgaggtgcaagagcccgccgagaaaaacaaacaacaaacagtagaggaaatacacggaggagaacaaccacgccagcgtcgggaagagctcttcgatacgcttcggcgcctccgtggtcgaggatgttgacgtttcaccgaacacttcgggcgcatcggagccgactggaggcagggtttcagcgttttctgaaacctgaccatcaagctgagactccagattccccttgagtaccgcgtggcgatcctctctcctgtcggaggcacctaggtcgcctgtaggtgccccggtgggatccggaagcgacaccggggcttctgaagagtcggggaaaacatccggacgggaggcaaggtcagagaagacaagaaaagcacacgcggcaacgagaatcgcgaagggccagacatcgtagcgaagtggccatggcttttttcgatacagaacgaaacgccgggtccgcatgtccgaagaaggcgaacctgacgagtctcctgtctttccgtcgacaggtgacccgcccatcttgacacagcccggttgcaagccacaggggagaaactcctggacagcgcagatcagcaagacagtaccgaaaaaacaaacacacacgtgcacagtctcagcttcaggaggaaggcaaagtgtacagacgagaatttcgttcgagggaccaagactcgatccgggccaggtaacagcggccgacggactgaaccagctgcatgcagagtcagctcctcgccagcgtgaaaccgacgtaccaccgcgccccgaatgctacatgactaactcaggacagtgcaaaagaatggaatttcgcggctcttttccatcccttgcgaatctccctatgcttgctatctttttacacatgcgaaagatgtcttggtggacacacgctaccatcaaggggcctgcaggcgggctaccttccgtgtgaaaccgcctatcccccgcttccgagactcttcatgcccttagaaccgcctgaaataaatgcagagaagaccgggactgtttgaagaacagaaattcaggtaaatggttggtggcaccatggctgccgtgcgtgcagaccaccgtgtgcgaccgttttgatgcctcgcatgcagtgactacagcatgctgcggttgaaagacttcgaaaatagcagaggtgccgccgtgcgtcattgcgacgcatagtttgttgacacatgcactgtagttcgacggccattgacactttttctttacggttgtggtgtccaatgatgtcacacgttttagggaagcctgcaacaggccgtggttggacgcatcgcggtgcatcaaaatattcggggcttcctcactcagacacctcaagatagattttgggcggtagaacttgcggctaactaatttggtcatcacagaaagcgtctacaactgtcaactgtgtgggctgttggtgctcttcataagtggagattggtcgccgtcgtgtcattcggggaaacgcttggcaaccactcgcgttcatcgccactttgtgtattagagtctctactaggaggaaattgtgacagcagcgccacctggaaggaaatcgacataaagaaggtgcgaaatgctgaagctactgggtggcgcagccgtcgaggtagcctggtactaccacaggttcattgacgcggcactaccgttttccacattcgacagagaagttgcgagcagcgtacgttattgcttgaacctgataaaagtattagatacaggcggggactgattagagtcagatatgaaatttagcaaatgtggttcaccggaatgaaactaacgtggagcggtctcgaccaggataacaccaaaaacggaaggtcatgcgcgtcagcatggatgaactcaaaaaagtcagcgctcaaaacctcttattcatatgtggggattcgtgattctttcggccttcagtttcctggcatcacaatagtaacgccgtgtttgaagtatgggtgtacgtacactccggaaagttgtttaatgtcgttcgagatcatgtcacttgaattggagctctggttggtgttttgccacaacgttactggagaactgtatgaagtctctgaagagggtgtagcttgttttgttcatctttcacacttttgcagagtaccgacgaagcca

SEQ ID NO: 1641 - DNA, 4286 bp, Toxoplasma gondii
  source 1..4286: mol_type = genomic DNA
aaaacaacggaatcaaggtgtgatcgcatcgttgttgttcgttggtgtgtgtctccaatgaatctgcatgttgatgccgaccaaggcttctcagcctggaggcatactattagtcatcgtttcaggtgaaggattccggagcagtgatattggacttgttagtctgttttctgtattcgggatgtgccgttatttcagacatacggtgtctcctccggtgaaccggggtacatgccatcgcttaacgactaactgataggtgaggagcttgtcacataaatttgagcgaagcatgattcctcgccataaacacaatgagcctgtctcttttgacttatggtcttccatgttttttccggaagaagacgaatggtattctgcaagtgcgttgacagcgtttcatcttctctgtcaaatgttcaaatgaactgtcgattggctgggcacatcgtttggtgtcatttatcaagattagcttgtgatgtgtttccacatgagccggtacagaccgcagcttaatcatggaaactggatgggttgagaagactgccgagcagcggccgaggaggaatgaaagacggaggtgcatctacgtgggtacctgagattgtacagtattcactctagctctcccccgatccgcctcccatacacgccgcagtttcccagtcgtgtctctcgtccagctttcacacactgcgcttcagcggtagactgcgccgtttgacacaagatgtccctttctggcaacccacactggcaaatcactacggcgacgacgctagagtattatctacgcaagcatacaatacaaacatgccgtagagtctgtttcgtttcacacccacaccggcccactaggtgtctaacgtttgctttcgttgcctcggataatatggagctgttgctgcttcgttaccatggaactcgtagctcgtggcaatgtaaacgaaacatggtattgttgtattacaaccttgttactccacccttaagaaacaaatattattagtttcggttgctccgcaatctgtatggccttcctccttgcactatacttgtatgcaggttcggagcccaaaaaaggtagtcagttcgacacagcgctcaccagagaggaatgcctaaaccaggaaggcttccgacgccgactgtttgcaacaggttgttagtgtttctagccagaacgttcccgaggtcgccgaacccccagatatcgttggcagcagcgccatctatttgtcctctgaacagggcttgtggacccgcagctagcgtctgtaccacgctatttgcaatgctggcaagcccttcttgaggcaaagcgggcgtaaacatgcttggcgttcctcgttgcacccagtcggcggctcccggataaactgatctgcccggatatgtcggcatgctcatgctgtttacaatagaggccacggaccctaccggatctgggaaagggaatacggtccctgatgaaggtgtctgtagctgttgcgaatatggtgctgcacttcgcgagtaatcggagtggccattatacgagggaacagttccatagctttgtctggaagagtaccgcggtccttgagttgcctcttgagtgaccggtgtaaaagtggtctggagccgccgcagagggaaaatgttgttcttcgtagcatcttcgtcgccgtccacaacaaccgttgtctggccaacataacgcgggcgttgtttcttctccgactttgttgtgccgtgcgagccttcggtttttgttgtaatcgcgtcttccttgttatgtgcgctaacggaacctgatggacgcagtgtaccgagctctaaccctttcctgtcgaacaaagctggtcgacttttatgttgctgtcggctgtctctgcttaggaactcttccaccgctggaacaactgccggttgttcctcgttagtagaggggtgggaatccgtaggtttgtgtccccctgattcgcgtagtagtcgaaggcctgtctggcggccaatccggcggacagtcttagtcacattgcgtcccaatttggcaaccccccttcgagctgctcgtgccagtggaccgcgaattttcgcagctccaaaaataacgagaggtgtgtccgtcaggccctcttctcctgcgaggctatctatgtcaaaaggtcggaacgaagtgacggcaacactgatgaacacaagcaaggctgcacccgatagccgtacgagacgcgccatcgtgcacagaaaagcaaatcgatgaaatccctaaatccgcagagaaaggcgcatagaggggaagtgcagaatagaactcgcgttgcacttgcgccgcggcagaaacgtggtttcaatctgcagtctccgcgtttgctaggcataaacctgattggaagatgtggcaatacctgaacgaaaaacgaagttcctgccaaaacgtttcacagcatacctgcaaagactagcgaggtggattcgcatttcacaaagaagcggcaggtatagaagcgcgtgctgtgatggaggaaccaaagggagttctcagccgcattacatggcgatgttgccactgcgctattgaatacccccacctgcttaaaaacctgagtaacggaagaacaaaagtaacacgatattcacccccaatgagagttgagtttttggacgcctgacactgtggagcctggggttccttagtcgccagcgcaggtaacagacgattccccttttcgcgcgctctctacggcttccatcttcagcacaaccccagggagggcttgacgggaattacgagagaataggacacctgacttgccgcggtaacgcctgaccaaccttttctccccccattttcggacacacgcgcatccacccaccgggagagcgtgtcacttttatgttgtagaccagaagtagtattcctgccctttggggcttggtattttgagcaattagaacgacagacattggtatctagtgacagatctgaatatctgtcagcgcatgcgctagaaccaatgagaatgcagcaccttgccttccacctctttttgctagaactcagagaacagtcaaacaatattttgcgtcattctttgtccccaataaaggcaggtgacaatcaggagagagctaacccattttaatgagtgcttttcactctgcacaccataccaaacaaaagcacatccgcgcttcccttgcagacctgctctgctgttatggcgatggcttcgcggacatgggcagctcagtatttattcctgttggaacaaagttaactctccgaaacgtgcgagtgaacactgtttatttacagacttcactaactctgtagtgatgtgtgtgatcctagaaaatagatggatcaagagatcacggcacaccctttcaaacaggcatttttcttggcaggtctctacacacacactgacaagcggtaaaacacagattcggtctatgacacagtgcacgacatgtgcgtggcagcatgctggatcaggtataacgctttgtccgtgtcgcttgaggagcaggaagcaacaagagagacgggattcaactgtgcgtggatagaacgatgtacgatcttcaggagacacagcggcaccccaaagagaattacgtcttcccagttcgaaatgaatatccttctctgtggtgacaagctaaaccttcacccgcatcactgcctcagtgtgtagcgtagatccacactgcacacaccacgcatagcagttattatcccaacagtcactccgtgtttgcggttcaaccttcagaagtttaagaggggattctctggactaccaaaaaagatgtatttcttccactttcgttgcgacaacggatattgcgtgaggggatctggattcggctttaaccgcaaggtatgtatcagtgacccgctcgtagtacagttcgacttggcctcccaccttcgaagacgaacatcggcaactcgaagcatgacaaaatcaacgtgagctaatacaaaagtcactctattttccagaagacactagtgtctccatccccagaaagtacaaagttgtagaagaggccctccgggggaccctttgctgcagctccacacacgccggggtctccatggcttgtcgctcgcacctcgtcttggaggcccgagcgcgtcacccccaacggatcagaccttccaaaagtcccagtcttccacagtgtggtcgaagtacgaactgttttactcttgaagtttgtgattcttgattgttcgcagtctacgaagacttaagtctgtgacttgatacgttgtaacaaca

SEQ ID NO: 1642 - DNA, 2271 bp, Toxoplasma gondii
  source 1..2271: mol_type = genomic DNA
atacacgtatgagcatttacccgttgtagctctttacgcactatagatgttccttcatttgctcgttcatacagatgcagatttatatcagcattttcagtctcggggcattgagagatgtgtgttgaacagaaagggaggtggagggaagcgcatgcagatgcatgcgactttgtgaacatattcatgcgttccgccttcctctgcagatcgacgcctcagcgccaagaccggacaaccgccgttcttcactccagagcccctgcgaagtttcctttacggacacggacaggaatgaagaccggcctctccaaacagtctctgattttacctcaatatgtatatatatatatatttatatttatgttcctaacaggaagcatgtgcacgtatgcttatatcaatacccgtaagtctctgtgccgatggttagacacatacatacattatcagcccacaaatatatatatatatatatatatattcgttagctgcttctctgggtgtgcatgctcatgtctttgtcctatagttatacgtttgcatgtacggtttcgtcttcaggtcgacgagctttcatccttcgcccgtgaactttctgttctgtgtctgaatattttagacactgctgcaatcttcctcagagatgacgactctctacctgttatcctcatatatatatatgtatatatgtatatctcctttttcctctataatactgtgtctgttacgcagatatgcatgcacatatgtcctttctaagacgctctcttgttattgctacgcataattgtctgtctctgtgttcctgtacgactctctctgtctcgtcgccttcaacagaactgtctgtctgttggcatatctccatcaacacagactcttcactatttttttagaaggctggttctgcgattccagcaggaatttctctccacctgtcaaacactcccgttcaaagtattgggcaacaagtacttgcctctcctatatggagccgtagtcgctttctcgcgttgttagtgcggccgataaaagtgacgcacacgtactgttattggtcgtgtgaatactgggctggcgaggaagagccacaagttttcaggatatagttagaaagtcacgagttaaacgacaaaacatagcggtttcgcggtgtctccaccgccagacgcgcggttagatgtggacatcgatttgtctctccgaaagaaatccgttttttgtatttagctttccacttccgtcgctcttttctctgtgtaacgccagctgaaaagcctgtatgtggcgctgtccaagaaaaccttcttgtctgcgtttccaactcctctgaagtgagcctaacatttattgcggcttttcgactgaaacgactgggcgcatgcagagcaagagctccccggaaacgggcaaccggaggacggtggcatttctctgctgtcagaatcagacactttggaaaaagtgcaatccgaaagaacgaaaaacacagctctggagagaaaccgaggaaagacttgccttctggggcgcgggagaccatcgaggtggatgtacacccgagcaccgacacacacacacacacagatacagctgggagtggattgtctagcagcgacttccgtcgcttttgtcgcctgcttttatcgtttctgtcctttagcaaagaggctccgagttgtgcatccgaatgggatttctttgcgttccggctttgcaccttccctgacttctctgcttcctttccgcccttcgtcctcgagtctgaaaagcagcgagtcatctgtcggaagggctggagttttttgcggtgggtttctggttgtttggaaacatccgtccacttgaaaactcccgaaagatttccacttctgtgcgcgtgcgtacatctctgccactaggagttgcaagtgccttcttcgttagaacgttcgcatctgcttgtttcacagttgagtatccctcgcgcgtctcctggcgcgactgcctctgttccttttctttcctgtctcgctttgctccgcaaaagtcacctgtttattcacacaggcggaacgcgcataagcgcgccgttcggctgttcgtcctcgctctgttctctcggtcgggctccgtctcgctctcctccctgcgtctgcctgtttctcccttctttatgcgatcctctctttcctcgctctcctctcgcgcttctgtccgttcccctctccgatcggttgcttcctgcccttctctgaccagaactcctcgctgtcgcccgcagaaaga

SEQ ID NO: 1643 - DNA, 2703 bp, Toxoplasma gondii
  source 1..2703: mol_type = genomic DNA
agctcgttgagcgtggtctgcagggtgacggcctttgtgagagacagctccccgtgtttctcccaacggttctaccgaattgctattaggacagggaatgttcactttcctcttgacaactgaaactcccgtcacgccacgattggtacagcacaccttacctgagtcaggatcatgtcctgccgcagccgcagtgttcgaaagagctcatacgcatgacgagagcggagcttgccgctaagttggggggaagatagctctgaacgaatcatgcgctgaatgtgagacacgtccagctcgtttacctgagggcacaaaagagaaatgcccagaggagtgagtcacgcaaattcgacgactgtctctcggtgtatgagtggcacagtgtctcgcatatcgcgggacgctccgagtcggttatttagatcctccgccgaggtctggtgcagtgggtttgagtgatttcggtcttacaagtagtgtctgactctggcgatctgcatgtagtttggcttaccgcgagcgcctccgtcagcttctccaagaattgctgccagatcaaatcgactctgtagtcagttatcagctttctcagcaacaaggaaactagcactgcgcacaggatagtcaccagcacctgagggaacacagcacccacgcaaatggccatgcccgttaaattacacggaagatccaacgcagtgggcatgtgaaaagcgagaatcgagcctcatgagtcaaagacgaatggtgtagtttatacctcttccaaaaccactctcaggcgaatgcgtcactccgtgaacggaaaagcaactgagtagcgcatgctgcaagctgtcagtctgccctcacgcgtcccgccggcaacttcacacgtgaagaagctcacctgttcgatcaagctgtttccttttctcgaccgtagcgccagcggcaaaccatatccactaagaacagcatcgagaagacggaggggccgttgccaccaagtcaaggagccgctttggtgcgtcggggggggtaactggttctggattctcatgttgatagatactaccgacgtcagctttgttgacccttcagtcgcacactgcgtcagcgacgtggtgaagcaaccactgccactgtcaactagggcagagatgaattactatgcatgccataacgaggttccgaaggagcaaacgctccagaatcgggatggtcttgatgaggagataaaatatcctgacagtacgcgtacgataagagacgcgcagagctgcagtaccgcacagaagagaatgagaatgctggctccgcgaaaagtgccggtgaataaacaaagcaggcattcaacgcaggctgagtagccttcagcggctgagtctcgttgacaacctgccgcgaaagctccccgtccgcctcgtccgctcggattgaaccgcaggagggggaaaacacactttccttcgcaaaaatgtagcagtcgggttcggctgaggcacctcagatgaatgctaccatggattttggaaaaatctgagatccacagccaggtaaaattgaatcggcacatccgtgccagctgcatctagcgtcaacggcatgccatggtgagccaccctgtcgatgtttgtctgctacgagagacactgccatagcgggttcagggaacgcacagcgcgaggtagcgggtgagcgcttgtgagaggtgcgtcaacttttctcacctagcaactctacagaatattttttttacccgttgacctccatttctgcaaatattcttccaaacgaactgttaggagtctatggtccatgcgtttatgctcaggaaaagtagggcgttcaaatttaggcgaaatcgacatgcggacggtgcccagagtgctcttgaggttctcagaaacagtttgagaatgagtccactatcgtgtatcctgtaattcgatgcctaatttaccgggaacaaaccgaggagttgtttaccggctgtcgagaagttgacagcagtgcgaagcggatgcgttcagcggtggcacttcgcacaccagtgcgaaggcaggcaaaagtagagctgcgccatgcagaactacaaacaggctcgacgcaagcagaaaaaaaggctgtcgtgggttacggtcccgtgcataagcataggaaaaccattacttttgcggattttctccttcggaaaagggttcagagaaggacatgtccaagttgagttcagttaagcaacgacctgcgagctggtgcacccaactcaaccgttagcggcttgacagcgtctgtctgcaaagagtagggaaacaccgtgtacagaatatcttcagaaatggtgtcgttatattactccgtcaacttgctggttacttctttctaaaggcttattcaacgcgttagacgtcgaatatccactcatttccgggaacgaacttcacctctgcggcacacaaaatgtaatatggggcacgcacaggtgaatgttctggcctcagtcggcaacgagtaagcaggtatccgcatatactcactccttgaacagcaccattcagagatcatttggtgactcagactgttacgcaagtctctgtcagatactcgaaacagcactacagctcttcgcggctatcgagcgtcccgcacacatagctccttacgactggcgctaacttgtggaacgatgcgtcagtgattcgcctgtgaccggccgta

SEQ ID NO: 1644 - DNA, 2656 bp, Toxoplasma gondii
  source 1..2656: mol_type = genomic DNA
catttctacagtcccactgactgtctaggaagaggagtcgcgagttgaggaaggtggagagcaggtggcagcagcagacgctgtctacttcaggcgtgcagaagacgaggaaggcggcaggacgacggggagacgggtcattagcgaagtcgggggcatgagagagagtgttgaactggaagaaagagcgggaaaactcgtcaagaggaagcagcaccattgtggcgaagaaacgtcaaaccgcaacccagtctcagggcgcccgcctcaaggctctgacacatgctcgacaggcgacagtagcgatgcaggtggagagaaatctggacaagattcaaggagcaggaaggcgcgagttgttgagaggcactcgcgaggcccactccgcaactctggagtcccgccggtctgcgagagacccggagaccttcaagatcggaacgaacaggccctcttgcagaacgcactgcccagaagaagcgcgtacagcatcctgcctcagaaaagacgtgtcatcccacgacgagggggctgcctggagcggcagacctgcgagcgaagaaaaacgtctgcgccggaagtcggaaagactgtcgagaacgaggtgtcgaagacaaaggattgagagggacagagaagacaagacggggaaggaagcgagaaacttagaggagacaagagatgaaaagggtacaaacggcgaagaagacacgaaaggtggagaagataccggaagagggggaaacgagttatgaagaggaaacgagagctacggcagacacaagaaatgcggaaggtacaggagacaagaaacgagagctctgaaggaatacggaagatgaggcagaagcgagagatgaagatgcgaggaagaacaaagatacagcggatgaggaaggcacgggaggaaagaaagaaacagcgacggaggcgcttgacagcgcctcactgggtgttcatgcggtgttggccttgattttttagggaaatccgaggaaaaaaatcaagacgattcctgtaactcttcattaggagtgtgcgctgctgatgacgggcggcacaaaacacagagacgcttggagagccgttccagaagaaggtgcggaagaaaaggcaaaaacccgtgacatcccggcaagtgctgaacacttgctgctgaaggatacaagccgaaaaagggaaactcgtagggcacactctgctcacgcgctcttccgccaccaagtccggcaccgccggcccactagaaacttggagggtcgccaggggcgacaagaaacgcgtgaatttgctaaggggttccggagaaaaacgcggaacgggaactacctgtgcacggaaagtggtttgagaccggctgtacatacacccggctttgctgcgcggaagacaaggcggtgagctggttgcagctgcacacgaagtggcggttgcgttttccggctttctttccggaagaaacttcgggacggaagtgagtgtcgctatatggagtctcttctgttccgctccgaaacacaggccgacggaaacccggcgggtcacctcggcaaagtctccaacaagcaaggccgatgcgggataatggacgcacactcggtggtaaacacaatcgtgggggtcgacactcttctcgtgcagatgagcggaaaagcacgctgcatctggtacgggcaacgcatgcagcacgcgatgctcgggaccgactgccgaccagaatccgcctctttgtctcgttgactcggagcactttttcgccgccacgaaacgcgggagagaccgcctgacgaagaatcgacggcagaatgagacaaggggaaaatgacctgggtccagggagggcttagccagagaggagaacccgactgaaggtgattctgcacacaagtcgccgcccctctcctcttgcccttggcttttttgcgcgagactcagcttacaaatcacccttcctcggagcgctccgtcttgctgaaacctccaagaccaaacgagctgttcacttctttttcgggagtgggaactgaggcaaaataaccgcgacgacgtcgctgtcgtggctaaaacgttggggcctgcaggttttgccgttctttcccgtagatttgcctctcaaaacgggacgtggcgagaaaacgcatacgcgcttggcgtcttgccaagtgggtccgctgctctttttcttgtcttttctcattccgcccgcctttctactggaaacagacgtttcgtggtgttcctcttaaaaatgatccgtctgctgccaagacaattgaaatttccttaaacaaatcaaaggcttctcaggcggccgcctttgtttcgtatcagcttgactccggatttcttgtccaggccactttgccagtccatttatcttcctctccgactcgtttaccgcgccttctttcttccggcttcttctctgacagttttgtttcaaacttttcaacgcatcgcgaaattcttctgtgagtctcccggttgattgcccattccatccaagtcgcctggtctggtcgtccttttcgtgacccccctctgcttcttcgcttcttggtcgcttcttgttcacccttttcgacgcttcttttcccctgccgccttcacgtttacactctgtcggcttcaaggtgcttcctgctctgagactcaa

SEQ ID NO: 1645 - DNA, 1965 bp, Toxoplasma gondii
  source 1..1965: mol_type = genomic DNA
ctggcaaataatcaggcggacaagcagcagtatcggtcggaaggaagtgagcaactcagagtgcagcgaaacggaaccagtagctgaatatcagccccgacttacctaattgaattacctccggaagcggtgtctatggtaccggacagaggtcacggaggccgtcccgcgactctgatctgccttcatacgcacagcgcatcatcagtagtctaccgcatagtaccaaccctcagtttgtgaagtgcaactcaggagcaggtttagcatcccaatggcgcacgcaatgacaaagcagttgtcatttacacttggtattgagcatgaaggacaagatcttgatattcatgcagcgtatccgctgacttcagccaactgtgcgataagttcgcatcacaacaccggagcaaaaagcttctacaagacagctggatcacacagaactggtggtagtgaacacgttttgattgtggatctagaaatccgctaaaggagcaagtggatctgggtgttctacaatcattactatcaaagtgacaggatacttcacctgtgattattcaggagggctctgatgataagtcactgtattgttgttgaagtttgctgtccaagatccctgaaaggactcgactcagcgttacatttagatctgtgtcacctgaacaatactgaaatgtaagtgctgaataaattgtgatccaaactgcctggagcactggcatggagagctgactatatgtccaatcctgctgaaataaaaaacagatttttggacagactctttttctgagtcaaaaagaagacagccagactccagcagttgcatcttactgttgttcccatggtattttcctgctgatttttcccagactgtgtgctctttctatcggattcatccccatggtgttgcatatatggtatggagggcttttacataacaagcgctaaaaaagaagcatggcactgacggagtttcagcgagtgcctcggccgagttcttctacagcatattgtaaaagaaatattaaatgctgccctctgtagccatacggcgagtcattcagggtatgcatgctttctcgagagctgacgcggcaactgcatgctgtcttgagctccgctcgcgcgcgttaactccgtgagtccctcgacgcgctcaaccagcttgcttgtatcagatctgcccggaactccccgtcatgtaaggaaggcggttttctgttgaacagacattggcgccttgaggttgaaatgcacttcggagtaggcatccgtccccctgtttctttgggaaaggagcatcctccctccctattattaccaatcaccataatgactgtcggtgtttgcggtggcgaaagactacgatttctgagattcattcagcacaacctcccccctcaaggttctccgccgatgttcacgtatagttaaatcgtcaagggattcattattcgtgattttcttcttctgtgaggcctacttcatgcggcgattgccttagtgaacgactgatataatcacaccccagacaacgatcgttagtctcgatgctggcccgtcagcacgggaagcactctcaatcagtggcgtttgccatgcgtagcgcttcatgacgtgaaacgcttgtgcgaccaggttccttttaaacaaaaataaaaggttttctctgttacgcatcttattgtctcacgcactttgtagacttcaaacccagtcaatcgggtatgtatcctttctgaccgccggaaaagtcgtcttctatacttttctaacaccccggctcaatcgatttttcacccatccattaacttttttctgtttttccctcattcggattactacatgagataaataacgtgtaaccggacaagtaaccgcgtcgtctctaacccctgtctagcgcttcgaatagtacacgcgttccttcgtttttcaaggaagtgaatcgcccggtcaaaa

SEQ ID NO: 1646 - DNA, 4630 bp, Toxoplasma gondii
  source 1..4630: mol_type = genomic DNA
cggagcttgtacaggccatctggtgggagcactgcgagtttcttttcgatagttttgctgtcgatcaggagcctgaaagagatatattcgagaaaaaaaatcaaagcgcagaaagcaatgggtgagcggaaggggctgtgaccttttggcgctggagcagaaacacatggaaaatcggggggagaaccactccattctcagtatggacgccatgaatgagccccatcatgcgaaacagcagacgcaagaggcgtaacacattcacattcttggatctcgccttctttcttcacctggaaacatgatcggtgtccaggaggtcttcgcctagcgtcgccgcaagagtccccgcgcacaagcgccttaaaaactcgagttggaagggtcgttctgtgagtggttgtgaaacagttcagaccaagagacgtcgaacggctttctggcatctgctgactcctgtagaaccactagcagcccggcgagaccacgcacgcgcgtattaaatatacatacataaattcggatacgcatgcaacgtttaatggagaatgtctgacggtgcattgtagattcgaatgtctgtagaacagcttgtaaagacaagttgtgtctaggcggagacagacatttcagtaagttgatgatacgcttctatcagctgttttcccccgtatttcctcgagagaagagggtgggcagttccgaagttcgtacccattcatgcgaagaaccttgcgctctctaccgctgcttccttctgtgagatacttccataagttggacacgacgcctgttacctgtatattcgataaatgcttgaacgtagccgacatcgtccgctgaaaacgaacacagccacaaaatagaggatgcgtttcgatgacgacatctccagccatacaaacaaaatctgtgaacgaggaacagataaaaacagaatagttgctacacaaaaaaatcggaatggatcgtctgatacgatcgttgccacctggcatatttcaagcaaagggaccgaaggtctcggcgacgaggcgccgctgtcgcttactcgtcgatttattttccacgggaggtcaccgacagagggaatatctgcgaatcaaagagatctgctgtattgaccccatggatacagcatgcatggagcttccttgctcactgcactattcaccggcatgcctgtgcgcgtctccgccggagggcaagaccctgcatgtccttgtttggggtggctgagctactatgcttcgaagcaggggaacggttaccaggcgggcagaggagagaggatcttaccattgtgaccgaagacatacggaataccatggtcatcgcggtagacatccacacccgttttgatcccttgcaactgaaaataacgaagcaccggcgactctgcagaactgcagtactttccttctacaaaggaactgctgcaaagagaaaatacacttttcacttgagaacagagaaaaacggagtacagcacttcgttaatcatcaacaggaggggctccaaccctctggaagaaggcacgtgtgacggcgggcgcaatgggaagatgcgggagctacgaaaaaagaggtggcgaatggaggagagagctgaatcaccgaagaagagagcaaggaacatgggcagaggagaagcaacgaaaggagaaaatcacaacggatttccatagaggcacacgttgaacagaattcaaagcgttacctcgtggtcgctatcccagtacgcttcgttgatggtgaagaactgccggatgacagggagagtgacgaacgagaggagatacgagagaaagtcgatcaccttgcttcctggcctgtgtacagggaactacatgcgaagagagaaaaggacaaagccgacgcgtggaccacacaaattagggataaaaaacgactaaacataacagaagcttaggccttgcttcgcgaccccacgacggggtccttcaaatgaaaagtaatgtctgtcaaaagtaccgtgaaaacttgatcccaaatataagtttttgccagcacgaggggtcgatggctgcggtgcaaactgaacaagacgcttgtcggcattttctgtcgctaacagtgacttccttggcatgcctagcttcattggaagcgggcagagcatcaaaaactgaactgttctttcttcttatcgcgaaaggcgtcgcctcacttgggtgtggacgtaatattgcacgagggcggcgaacaccaagatgctcaaggcgctactcgcgaggatcatgtgcccgccacttcgagccatggcgacggaggttctaagaggttctgaagctgaagcagcaaaaacggcacactctgccaccgtgagcgaatttcctggaaagctcctgtcaatcgagagtcgtgttgtcggactgcctgcaagacggctgccattcgagaatgtgtggagaacacacacacacacacgcataaacacacacacacacacctggtgggtaagggcagcgaaagcgcgaaacgtcctgaatgaaggaatgcgatcgacttcttgttcaagtttaaaaatggggtctcgttaacctctccactcgcacgatccggactgcgataccttccaaccgaagcgaaggacacacatgccagctaggcagcacatgaatatctccgcaattgacaattgcgtgttgttactggacgccgctacatttttcgcgaaggcgtcaacagtccgccccgcgtcttgcctttcctcacctacatcccctctcggttctttctataagccccacacactttcgagcgacccgtcgtaggttcatctacaggaagacacaaacacacagacaagcccgtagagattagagagatgaaagaggcagctcacctgttcgctgcccccaggctacgcgctctttcgccccacccgtggaaagatccactgaactgagccctagacagacttctcaagcggctaggacatgaaaggctcctactttgctgcaacaggaaggtgtgtggaaaatgcccggatgataaaacggttgaaaaaacctggaccccatgagacgagggcgcgtgcggtccggcgttcccgtaccggggttcctgccgacagtgtgtatgcacaagatcttgtccagtctcgcacagaccaaacaaccttaaccagtctcaaaccgagactagcgcgagccggccggaaagcgagaaacggttcttccggtcaatcgaagaagaatgcaagcggttccatccaacgagaacgaacagagagacagcaccattcattgttagcgggtcacgctctcgaattttgacgctgaaaagtccgtgccgatgtggcttccggtgtgagggcgccagtgggggcgagggcgagacatggctccagggctcaggctcaatgagccagaagccaaggaaagatcttgtcgacaaagtgcccagacagctggcctagaactcaaaattgaagggggtgaacgtgggagaaaccactaaaaaccaggtggaaagggagaagagagcgtaccttgacccccgtccctcgttgttgttctcacgccgcgtgtcccagtacgtgcgacagcctatgagcaggttttgtctggtgcctttctgtgaaacctgtagtactctagccgtgtattggaatggttgttgaacagactaaaaggtgccataaacggagagggaacacggtagggaaaggacgtgtcactagatgaaactggtctctgcaacaagacatgaagaaggcagacaacgattgtcgattggagttacaggatcgttcgccagcacattgccatctacgaaacgcctcgagacagacagcgcatgcaaagaagcgaatacaaacgactgtgcagggtcgagacatagagatcagatacaattccaatgtccttcagaaagtaaatcattttttactggagcaagctccccgtgaaagctgcccctccgccacttcttcttccgcagttacctcccttctttttcctgcatctttccggttgcagcccgtaggggagcgcccggccgtcttcctggaggtggagaagaagattttctcaagaaaacaggaaaatctcctatcgttactgcatttgcttcttccaatgaaagccttttgagatagcaagtttttcttccaccataaataatgcgagagcatacctcgcgtcgtccgctctcccttcggtaggttgccccgctcaaacgcggacgcggattgtggacctcgcattactgttttgcctttcgttgtttcccgccttctttatcagattcgtccctctaatttagcgtttgtccgacaaactctcctggggaaggtgtgggttcactgtgcatccaacttgaaaggaccgaccgtgtagagggaggagttgcggtgatggggaagttcgtcttcgaaaccttttggctgtccagccctctgcgacgctgcaccatcgtaaagctttaacgtttgttcacatttgcttccttattcgaaggcaccatccctttttctcttgctgcctctccgccgttggcctctgcttgtccgacctacagtccccagttgtaggacgggtgcgccaccacccgacgtataaacgggtctctttctgtttgctttgtctcgagaaacacacaa

SEQ ID NO: 1647 - DNA, 4212 bp, Toxoplasma gondii
  source 1..4212: mol_type = genomic DNA
tccctctcgcctttgtcgacagacgttcgtcaaccggagatgacgcggatgaagaagaggaagaggaagaagaggaagaagaggaagaggaagaagatgaagaggaagaaggggcagaagcagggagggaggtcggagagggcgaggaagctggaacagagacagggcctttcagacgcgttacagcttctgcaatcaactgagaggaaagaaggcacatcgcatgccgacgagcggctctagcgagaggagcggaagccggaagggaaccggagggcgagagcgacggagaaagagctctcgatgcaccacagagggagaaacagcgagactcacctttcgagtgacccaacagatctggcgaccacgacagaagaaaggaggggaagataacgcatgcacaaatgcgcgtttgccgctcctgatggggaaggattggaggcggcaacggtgagaacaggcacttcgagatgttcctggaacagagaagactcagcgccacgcaccaacgccccatcatcgacgcctacctcttgctgcttcggtctcaacgtttcgataaatttgtttattttcgcttgcgcgtaagcgtgaggaagctgcagcatcaagagtgctgtgatctcgacagcggcgctgcgaatgtcgccagaagcagattggaaaatttcttctagaagagcaaggagaggtgagaggggaatgcctccgggagcccatggctcgaccaagcagaacgccgagagcagcgcgacaaagagctgaagcagctgcgtggtcgatctgcgcgaggcaagccaacacaagaagggaatagagttctattgtactttgtgtttctctctggtggggccgcaagtagcggagacacgactgtgccaaagtggtgtgtgcacagtcagaaaaacgcaaaggaaacagttgagttatctcgaggtcgagctcgtctccactgcggtgcctgtgacagaactccaaacatcgacaaccagtaaaacaaggagacatccagacacagcaactgggggctcgtcagtagagaaacgagtgccgtatctcccaacaagacgacgcaagggaagaagccacacgaaactttctgtccatcaaatctcgtcttcgatattgttccactcgacttttcagacgtgattccgttctcgctctcgggggcgttgccttcctatcctcgctttcccgtggtggccaatcgctagctttctcgtgctttacttttgaggactggatgcgatcgaaacacccccggtttctcctcgcgttctcaacgttgtctccgtgcgagtgaggccgccccgacgtctgcctctgcctctgccctcgttttgcctgcgcttttcttcttctttcctgtcgacggaaggagtgcctcccaggctcttagtggccgcgaagccagacgtctctttgttcaccggggccgcgacgcggtgcgcagctgagagcctgtcaaagatgtccaccgcgaggggtcttgcaacttcaggatgcgatctgcagagcaggagaagcagacgcttcgctcggtccgagaaaacgcccccaatccgaagcagtaactcttgccgcacaccccagaagggagacgaaaggaacagccgagaagggaggctcggcgcgtccagaagcagcgacaggagatgtgctccgccgaggaaaatctatagaaacgaaaaacaggaggactgacagcgtagtgagagagcaggacaggggatacgtgacggcggagacgaggacgggatgaccgacgagcaacgtagaacaagaggtggacatcaggctgacgaaagagacagaacgtggatcaagggcaagggacgactcaatctgaggaagaaggtgatgatgcagtggcatccgaagacatgagaaacgaatgtgcgtggaagacgactctcgcgtggaaggctgcgttcgtgaagaaaaggaaaaagacttgccgtggcacacgatgagagacttcggttctcaccttgagcggtttatccgccaaggcgctttggataaccgggcaaagagcaacaaatacttcttcgctgaccatctctgcagagcaaacgcagactgcgtgtgaggagtctggcttcactttttatcccccgtctcgccccgaaatctcttctgtgggtttgcttatcctttccttcactccccgcgatctctctccttcttcctctctgtccatgttcgctcttgtcctcccgctctggctgcagatccctttccgtgaatcgtctcttcgatccaccaccccctgcagtctttcttgagtcgcgaacgcagagtctcatttagactcctaggccgtagacacgcggccgtcagtggtgcgtcaactaaacggtgccgttgtggcggtccgtttccccactcgctggtggaggctgcggacgcagacgccctgcgcgttttctccgcttccagtgagcgttagactgaacagcggaacgtgtgtctttcgagggtgcgtctcgagtttgacgtgacgcgaacgaccgtcaatgcccgttgaggaagtctccaagcgacaggcacttgtgaaaactgcgcgaacgacgaggaggctttctctgtctctcactgagttccagagcagcgcagtggtcgtacaaccatcgctctgcctcacgggggattcttcaaacgattctgcaaagtgtatccctcaagaaaggaacaacgcgccacagtctgacatgcatggatgcatggagaaacgcgtgagaagaagagcgctctttccgtccccagttttctccgtcctcaccggggtgagcttcgagctctttcgcgaccgcttcatgggctgcaacccgtgttggaatatctgcggcgaagagggcaactacgatgtctctggggaagaagggaagcagcggcgcggcgtcttcttcatcttccagtctcaacgcgccgatggatggcatctgacgcacagagacacgcgctacatccgcgatcctgaaaaaacgtcttccttctcccagcgtggggagacaccccgctcagaacgcgacaggtacaaaagcacaggcgagtctccaagtggaacagatgagagacgctggagatctgcgcaagggactgatcgtgtagtagcgcgtctgtcctggaagccggaagaaaggcttggaagcgctcgagaattcaactgaggatcccttgaaacatgccgcagataccctcagagagaaaggctgctaggaacactgctcggtcgtcggcagagacgcgaaccgagaacgcacagagccggcaaacgcaaggggtgcgaaggaatgcaacgcgcaagaggagaagagagagcgaacgaatacggagagaaagagaaagaggagaaggtgaaagaggtgaaagggacaaagagacatggagagaaggacaggaatggagctgagagatcgatggcacagatcgacttacggggggaactgcagcttcgcggctgctcatgtcactttgctttggagactccaagaggagttgtcgctgttgctcctctcgcataggccgaatcgggaggtcgtcgagggagagaggaggcgaatcgcgtaggcagcctccggtctcagagcggctatccgttcttgcctgagaatcgtgactgcgactttcctcgcaaagacgacgagcatagtcacacgggcagagcggggtcgcagcctcaggaaggatttcggaaggtcgaagcggcgaggcagcagacggaagctgaaccgggagcgaacaaagacgggaaacgacagacttggcctctgaaagtgaagagagaacaaccatgttgttacgacaaacgagcagggtgtgctgttgggtttctggacagagaaggtgtcactctccgcggaaatggagacgcgaaacagcgacgcagaaggaaagaaatcgagtccagaaatgaagcaatagaggcggaagagacggtggtggctgcgctgcatcttccgagactccacagcttgtcgagaacggatgacgttctcgttccctctctcgctcgttctctttctctgtcaccttcccttctctttattccctcctctatctgttctcctctctctgtccgcctcgtcctgtccggcttttttgtcaccaactcgcgtctctctctcttttttccgattctccgtttccttgccgtctgtgttcagttttgccgctggatgcactcctctcaccttctgcgcaaga

SEQ ID NO: 1648 - DNA, 2304 bp, Toxoplasma gondii
  source 1..2304: mol_type = genomic DNA
atacaggtacagtgatctcgattccggtatgcctgcatacgtctttgctggtgctagcggcttggcgctagactccggcacattggttttattttggccctctcgaacgtgaaacgagtagctctgcttcatgcacattccgcccaggagactccatgctttgcaactgcctgcaataaaaagaagtgctctactacagtgaccgacaaattggctagaagcggtgaaacaaacctcatggatgctctcctcgttccacgcacatcgattcgatggggtgtgcctcagagagcgtgatgtcctgactggaacagaggcactttgctgcagcaacgaaaacacagacgctctcgagtccttgaaccgccactgcaggcgaagtacaaaacccaagccaagcagtctattaccactgaccgccttgtaggcagatcccgggtccattttgcgacacatggcacagacagtatttacaccacagaattggccttttgttccccgttgcgaactagaaggcttgcgccactccacgagttcttggaacttcctcgcctccactgtcctctgtcgagaagctacgcaatggttggcgggaaatgccgagctacagcagaggactcgcagaaagacacggatggccgacgaccccgtgtgaggtcagggcggtttttccccgtcagaatcatcaagtgcggtggcagttgagttcgagaggcacatgcgtcggatctctcttcttttagctgtgtggttcggtgcattcaagctatcttgcgagagcgtattacatcgagatctttacgaagatgggtcgcatcctggagcaagtcaacatcagccgtgcgcatgagctgtctgtaacgcgtacttgattggtcttcctttttgcttgaatgtctcttcattgttgtccagtagtctctatatcaatcagtgatagtagctgaaactgaagtcaaaaatgtggattaaatatactgaacaacctccgagcaccgaacctcccgaaagtcgacgtcgaagcttttccatcttcacagagagttacatagcaggatccttggtatttgcacttcgtcgcaaatcgtgcctctcgacattgccgcgcttcacgaagcctcatcaaacatgtgcagtcgtggaaagaaccgtagacgctgaaaagcgctgcaccctccacttaggcgattctcactgaagaacacgttagagttgcagtccaaatacatatacatatatatatatacatatatatatatgcgaacaaagttatgtccttatatgcatatgtccttgcgtagacaaggcccaacacgataagcgactagattcaagaggcagtgtaagcgagagactccagggcgtcggccatgattcctggcactgcgacaatcggactttctgtaccttctctggtatcccagcagacaaccctttgcatgcttgttttcgtggacgacccagccgacttgtgagtgtcttttttctcgttcaaagtttttcttttaaactgaactttcaggtgaaatatccgatgcattcacctgccttcttcgtctgttattcgttttgtggagcttgcacacggttgagtctcgcctgcatgcagtgtggaccttttcttgtctttgctacttttcgcgtcttcgacgaaaagcgattgcttctcgcttctttaatcgtggtttttccttgacactctttcatggacgaaggaaacgagcaggttttctccttcagtgtgcagattccaggcgaatacccgaagtccaattccagcctttccgacccgcctacgtcgtgtcttcaactggcacacaacgcgcagaaaaacagagagactcgccagtgactcgcgtcgaccggtgcgaaggcttctccatgccttcttctgtgggcgtcaaaatccgtttgtctacttcatctcagttttcctgacggccctctcgtacccttccttccctggcgactctccgttaacacccgctgggattccgctgtctcgcggctgcttcggttccccagcttcctcaacgccttgactctgtccttcgcaccacgtgatttctacctttctaccgcacttgcagttccttgctgtcctcctctgtccgcctccccccctttttcgcgtccgcttgctgtctgcgacaaaaacgccgaacgcgccctctctgttcgctcggtacgagacacaaagcgttcataaaatgtgagtcttccagtgtcgtctcggtcgacaaggtcgccaggaacggcgcgcttcttctgagcgcagcgattcaacctgcaaaccaactgaaa

SEQ ID NO: 1649 - DNA, 1861 bp, Toxoplasma gondii
  source 1..1861: mol_type = genomic DNA
atgcatgtatatccacgtcgatcagtggatatcggcaactctacatttgtgtctatattcataggtgtgtacatgcatcaggtagatttgcatgtctccacaacgatgtgtgacaacaccgtgcagatttgtttgtatttatttgtagttgtttctgtctccctgtagcccgtgtgctggcagatttcacacttgagaccggttttttaagaggaacgcatctctggcaatggcttttttcctgtggcatcgcttgactcgagaaacgagaggtttctgagcaagccgtgaattccgtcgctgttcggatttctagcgagttccctcaaacttttccaggagtgctctttatctggagcgcgttccctgcacatgttggtggaaaaagtcgcgaacggtaatcccctctccagccttctcttactcatgcgctgcctgtacattcgaggcttctcacagaagttttcagattagcagaagacctcgacaccgtcgtctgagtcttcggcctcgcctcccttccttttcttcctcctttccttttcttccttctttccttttcttcctcccttccttttcttcctcctttccttttctttctcccttccttttcttcctcctttccttttcttccttcgttccttttcttcctcccttccttttcttcctcctttccttttcttcctcccttccttttcttcctcctttccttttcttccttctttccttttcttctttcttcctcctttcttcttcttcctacctgcgttgcggctgcggctgttcctgactgcccagaggcagaggcgagcgtcttcgcttcttgacgactcggcgttcaggccttgtggcgttcggaagtttccgccgaagctcgaggccgcgcagaagaagcagttcggccgacaagataaatggaaagcaggaaaaagacgaagacggagacgcagagaaaggcaattcgaagtgtgaacgcgcgagttcttccactcgcagcaaagaggccggaggaaaaatcaaagagactgcgaagatcgcgacctcaaagtgcatgcgcatgcgctcgacgactttcttcctcgccccacattctgctctgccggttttctcgagttttttaccagttacaacctattcttccctggagaaagtctctcgccgtcgtacgcttctttccggctcggtctcgtcgcagaagcgtttctcctctctgcgatttcctcctcgttcaggctgtgcgactcactggagaagaagtcgttctttgtttgaggagaccgcgagcgaccgactcgtcgtgttgacttttcgcgttacgtcaacagttgctcaatatctttttctcttctctctctgcgcgtaggaagacaacagagtctcccctctctttcctccttgtggggattgcaaaagatgcttcagcgccagagagacacgcagcgcaggacggccggagttttttcgagagagtttttccacgttcctgaattcacggatgaggcaaaaggagtcggaaaacgaaacaacacaatggaggcccctggtgtacgtacagtctggtgaagagacgcccatgcgttttcaaggtgctctgcctgtcgccttcagcattcgttctgaattcctcgtctccttcgtctcgctgcttgccttcctcgtctgttcttctctctcctctccctttcctccctcctatcgtaatctctttaacgaatcgctgtccttcctgtgcacctcctgcttctcttcttctcgtcttctctcttcttcttccccttttctctttttcgcttctctttttcgcttctctttttctcttctctttttctcttctctttttctcttctgtgtgttgtcctga

SEQ ID NO: 1650 - DNA, 3488 bp, Toxoplasma gondii
  source 1..3488: mol_type = genomic DNA
gcgttattgtctcgatgtggaccatgcggcgcacactgtttgattgctccagtcagggtggtgcatttgatatcgcacaaggagatcttcccgcttattccagtgacagtccgaccggacggtcagctgagacaacagtggtcaattctgttttggcgcaactcggaggccgtcgctatgctgacgagttatctgcactgcaggagagtgtgcaggacctccggaacgagctcgcggcagtcacgacactcgtgcagcaacatgcggcgttcatttctcaattcgtagaaaagcctacaacggtggggcgccgccaaggaggaggggctatcaagcatgccatatctgcgtcagtagaaggtccaccactgccggacgttccgcagctgcggttcgccttagccgatgcagaggtcgcatcccgaagtgcacagagcgcgaattcaggaattgagagggagactgccagagcaggcgacggcaacaccatgggggatggcttacgtggcactaatcataacggtggtgtgctctcacagaagtcttttggggcgagtgttgcgttagaaagtacagtgcggggttctggagataatatgctggacggtgagacacgcggtaaaactgcagatgctccagaaggtgttgagagagttccctcttcagctgcagaacgtagtggaggcgcaggcaccccagatgccgacacagcatttgtcacagaccgaggtgtagacactcttcgagacggtatcccaagcgacgatgacaagaagaaaaactccggtgaggcggaaaaggagccactgcgagcggatgcaggtggccgacctgcggacaatggaaaagccgcagatttagcaagtagcccgggcatcaaaggagaagttgaaatactttcggcaagcggagaagttgtggcacaagattccagagaagctcgtgtcaaagggctggaagaagagactggggccggccggcggggttttctgggcgttggaggaaagggccatggcctgactggaggaagacttgacagattgtgatttgcatgcaaactgcacggtagcaatctagaaggttagtgtgttttatcgttcgaagttagtttaatcccgggtgcacccccctgcccacctctcccgggtacctcgcgtttctgaaatacttcttttttacagtcgcgcaccctggaatgtacgcctgtgctgtcgcaccttcaaggaaaggagagtgctgtaatctgacataaaacgctgtgtagtatgttggaacgcgcaacgacccacgtcgaagaccacattttagttgaatctgaaatgaggacattccatattagagccgttgttcagtgaaaaattcgtacgtgctataccccttgtgcctgtctccagcatcagctgatgtgacagataagaacgttctttgaagtaggtcgtattgccagatcgttctctgtgtacttgcccatgctcatcaattttcctttgttgtggctggaaacactatcgcggttcgacaaccaggactaattagtggtcgtaatgagcgactgtgaaatcacagcgctgttttttctgcgacgccgccgcgtgtaccaccatcgaatacatgagctttgattttatgcgattcggtgctctttacatgattcagctgtgactgcttaccggaatacgcgccagttggcgcgggggagagtaaataactagagcctgtccagtgtaccaaggcacatgcttgcctcagaacaaaacggacattctaaccgccttcacgctcggcgaaacaagtgtcgcaccgtggcagggtgtattttatgcgtatagatagctagaagggaactccgggcaatttcctacgtccatagaattcctagaagcacgaacttcgctttccttctactagaactctcctagggttaccagtggtgtttcacggcgctcgtgcatcagatttactgtattgacaagaagggtgcgatagtttgctcagtgttttggtaagtgcttaggaatgattcactacgtgtcattctcgtgtgacgtcttggcactgtttgcctgtggacgtagtagtccccgaacagcagctccaaattcacctggtttcgcaggacaagcggtatttcgctttagcagtactgccactacccggacaactaacagaaaagccgacatcccttgttcaacgaaccatgttctgaaattgaatttgctctttctacgttaggcaagacacatggtgatgggttatctaactaacatgatgatgtcaggtcgctaaatcgaagcggtgtaacttcaggggagctggtcacccctgtcgacgacttgtatagaagacaaaagtaacgatggtgaggaacctccacaatcgtcatgattatacgcgtgctacagggctccgtggagggaacggcaggagaaccaagactggctgctcagaagaccccagtggtttccagataagaagaaaggtttcttgaacatgcactttgttttcaatgttttgaatatacacaactaggtaaagtcgtctaaaaaacaggtggtgctcgcgacagcctgtcaacctctttcaataggatcactgtctctaccagccactgatgatgactgcatatatgctccttcgatacgctccctggtagttcacattcgcacaacgaggggatctgaatggaactcaaactgcaacgaaatttgtgtcccgcgtgtttttgtttttgatccccaaggatcagttatacagtttatttcataagatgtgtttcattgaaaaataacatctggtgagctaaaaccatactttgatggtgtgctgtgtcaaccgcaacaacttgcgcgctggtttgacgcagccccaagttctctctcctggaggctacgattgaatttatgatcccacagcaatgcatgaggaaaaaataggaagtttgctgggagcaagccaattccagacccttaccacagtccctctaggtagacgatgattgactctggaatcactttgtgatagtgtctctctcggatagacgtaattcggaagagggcgtattcggctttccggatgctacctgtgtagacatgctttttcgcctcgagcgcaaagccgtcgttgtatccttttgttctgctgctttctgtatgtctacttggcacgtcgtcactttcgcaagcttattcttctggtaacgccggccgggtttgccgatgccgatcaatctctctttccctgttttcctccgcacacacataggtacacactagctgtgacgactcatcaaaaacgtttgatcgcctggaattagtaccagtctcagcagattcttttataaagggatcatagtcgggctgagaaccgtccattttggccatgaaagacctcgatatcgataatgtagagctttctgtgtcgactttcgcacaccgatgtggcttttcgttccaggtaatcgctgacactttcgttttttcctctcgcta

SEQ ID NO: 1651 - DNA, 2715 bp, Toxoplasma gondii
  source 1..2715: mol_type = genomic DNA
tggtgggttgtaagatgccacaggcgacggaaagaggaaatgaacgagacaggagctaggcggcgctgcacaatgcgtctggcgtgcaagggagagcgcttttagaatgcatgtgaacatccagccgaagttgacaaaccaaagaattgtgcatttctttttcatgtgcgaagattccaccaattcagaaatccccacagggtagaaaacgggttcaggtgtttttcaagtgcattttaaagcatcactgctgaaacaaagtcgcggcattcattcaggaaactcctttctgagaacctgcatcgtgaccagcatgaactgaggaatcacaacgattgatcactgcaagcccaaagtgcaaacaaagagatgtggatgttttcctcctgcctacaaagagctctctacaaatagagatgccgtctgctctcctcttgtacatatgggaaggacgtggcgcctctctttttcttggtcccaggaggtgctcataaagtcacctggtccagatctacgaattcctctgaaccatttgtctgctgccatttggcagcttcgcgtctcttgttcttctctgtcgctcttatttctctcatattgtgaagaggagttcgttgcactccctactgtgtaagaccttcgcatttctcgttcacttagatgtgcagcggcctttagagactttgggtaccgcgagtacgaaacagtcaagatgaaagacgtcgcctttgtgcacagctctgaacggccgcacagacatgaaagcttctgaggagtcctgattgaaaaaggacccaaagctgagaggtgctacgcgatttgagacctctcccgcaaaaaagtggattttcagtgacagcctgatgttgtggttttgtgtactagcggcgcaatcacacgcgaaattcttcacaactcgaagactttcctcatcaagcgcctcctagagttctcttcagagtgccgttcaagacacgcattatgccacgaccacttcaccatggctgtatatgcctatacatgcgtatacgttcatttttggatacaaacgcggatatgtcttatacttacgtacaagagcagaagagagaagtgtgatgactgaaagaggaaacaaactgtgctttctagaagagaagcacacactgcgcggtgtgaggcatgtactgtgaatcggggatggggattttcgcgtgttcaagaagtgaacaagaaagccgatcgcacatgcgctggttcccgcatgaaacgtctcgcgtcactctctgtttattccgctgtctgttttccgtgagtcttctgtttctctctttttccgcgttcttccaaaaagaaagtccaagcggcaatcgcggatccgccaacacgcgagactgagagggggttgggagaaagtgaccccagcgatcaacaggggtgggatcctgggtgttcgacggtggaaaaaactctcgttacacagtgttcccctatttttctcgctcttgcccgcctttccatttttgccaaagacattcgagttccttaaaaagtggtggaacggaactgcgtctgtccgggcgcttcctccgctaaaactgtcgcgaatctggaacacacgcgttccgccctcacctacacgcagctgacctcggttctctggacggagtgcagaaggaggccggggactgtggcgcgacgagttttttttcgttttttttgactttctcgagagtgacggcttctctgatcgcaggcgggggtgcgtaagcggcgttctgtgcagagaaatccacttttcgcgtgtctgccacgccctcctccccccacctccctgcagctggtgggtggttggtgctaaacgggcagttttcacagcttaacaagcttgtcttctgtgcttatccacaggtttcaagttcgctgcagaaccggatgtgtctttcggcgtgaacgagaaccgcgaacagacgtcttttccgcggaagaaggcggcatcggctcggcgagtcgttcagccgcaacacctcgcgtctgctgaggtcccgcgagacagcaaacagcgagggcgcgacagaccgacgaagaaagagatgatgcagaagagagcgaaggcgaggaaagaagcaggcagccagaactggagagcggaggacggacccaaggcgaaaaagccggagacgaccgaatcaaatccgcacgggagttcgagaagacaacacagtgtgttgaggccccgagagaggagagaggggagaggggagaggagagcgcagccggtgtgagaagaaacgggcaaaggacgaaaagtacgacggcgagtccgaggactcacgagctggaaaaaagagaactcgagagtgtatgcgcagcgaggaagagaaggtgaaaacacgcgacagtcgacacacacaagagaggaagaggcagccaacaggtgacccccgagggaaaggcgaaaacgaatgtttctttcttcgttgtcggaactttgccgacgacgcgggagagcgactgtggcccaggtgtcttgcgaccagcctgctttttcacttcctggaccgtccttttcttctgctgttccccaggacgcgttctcgtcttttcgtctgcacctctttctctcttctgtcgagagcttttcttccttctgaaaccttctcatttcttctcttcgttcggtttttttcgccttcttccacgagccttttcctcgaccacactgttcgtcgacaa

SEQ ID NO: 1652 - DNA, 1479 bp, Toxoplasma gondii
  source 1..1479: mol_type = genomic DNA
tgcaaacctgaagagaaagcgggacagccgacacaccgctacgatctccttgctgttggcgtaggctccgcaaggccgacgtggcttgagctagaaatctcttacctcctctgcaacgtttaccgcacgctgaatcgtgtccacctgcggctcaaattcgtactccggtctgccgtaggtggtgtccagaaacaccgtgtcaatgtggcagttggccagtgcagggtggtcgaccatatgacgatcgtagcgaaaatctcccgtatgtaagtacgtttttcctcctttcgtcttgcagaggaacattacagctcctaaaaatgcacattcgtctcgaaaacgactcacccattcaaccaggaggaatctttccagtccgtctagcaatcaaatgcacaccgcatgagcggccgtttacgatatccagccattaaggacagggtagaaggcacacgaaactatgcggtgagcaatatcctccagttaactaccaggatggaatgaccataggacgacctacctgggcagtggtttgcatccagaagcgtgactcgtgcgtcagcaatttcgtattcggtgtcgagatctaaaccgcggacaagcgctttgtttacgcgaagaaatgtgatgattagccttgctgcaaaaacacacggctgcacatacatgagagccatgagctgtgtctccaaaggtgtatcaggcacaatttatgaaaaactcgtactcacagccgaaaaccaactgcggtctgtttcatgctacgttgcttgcgagtctgcaagtcttaccggtcagcacagagcaatacacaacgcctctggaccaagaactagacagcccgctgtaatgatcagcgtgaaagtgagagagaaagaaaacgaaagatccttttggcaccttcctgaacgtgtcaactaaaaccaagggctctgtttcaggaacaatatgggaaacgtgccgtgatgcggcaatagacacactagccatgttacgccccaaacacctgcgttcgaaggagacgacgggaaattaactacacataaaaggtgaacaacgtctatttaaagagaatgcaatggctaatgcagccatgctataaagaaaacgctgaaaatgaaaagccagcgattgttcaaaaaaaagggtatctgcatgcctccactgctttgtcggttttccgtttgagtcccgccatttattttcactgaaattgaaagtctctacaacacacttgatctgatcaaaaagtcaaacagatacacaacgattaatactttgactgctgcctgttcgtccgcaactccttctagcaaccgcatgcccgagaacatcggagggctggttgcatgcttcaacgttgctgcgctgtctgtacagcacgacattgtatatcagaaagccgtggttctcgtcttacttcagtcaaaactgatgtgacgaaacgatcggtgcagtagaacggctcccgagtcaaaa

SEQ ID NO: 1653 - DNA, 2133 bp, Toxoplasma gondii
  source 1..2133: mol_type = genomic DNA
actcaagaggagcctgccttcgactcaggctctttgttctattttagatatacgcatgcccccgcttgtctcttagtcgccgacacagtgtctgcaagacctaacgagcgcatgtcggcgccacacgtttctagaggttgcgaagagacaactaacggctgcacaaagcgagagatcactcttttcgtgactcacgcatcgagcgctgtggtctaccgaactcacatgttcacgactgtcgccgtcaattcgcagaaatgtctctggcatccagactgccaagccggctgatatggaggtgtctctagtcactcaaatgtgctaatccttccgacgtgctactttggtcaggaagtcgacggtcagaggagtggtacgtactatgaagccaggagcgatggtctggagagagccacgactgggcgttaaacgcttccactcagaatgcacgtgcagatcggagtgaaatcgaaaagacataagccaggcagcagtgtcgtggatcgaacaaaatttaatacgtgatcccgcttacggacatcgaaaaagcgttcactgattttagttatggaacgcgcgtactcttcattctcagaacaaggaaatgcatgctctcagtgactattattccctctacgatggtacggatcatactaacaaccgagtggtagctgtctctcgtttgcggcttttgctttgttgggagtatgacacccatacaacacaataccggtcgagtggctcgtcgatgcgagtgacaaatggtcgttccttgtcacagcggcgataaatctgtgtccctgctttacatctctgaagatagctgttaaatcggaataggcggacgacttcgtggtaccagtgtgaaaggtttccaaagcgaactctcacgcctggtcttgcaggcctttattaaaaagcggggaaattcgtcctgtcgcggcagagctcccaaaaagaatagagagcctccggcatgttacagtccgttctgtttttcgagtcgttgtttctcagccgccttccactgctacaggctggccgacgctagtagcgttggcctgggggtccgcgccacaccccttgcgggatggatgctctggggacccaaaaagatggagaaagtgtagaacaggagagaaatcaacctcttctcggcgaacagctacagttccgtgtgttaacactgctttctttccgtatcactgtttgaagcttgtttcggcccgcgttcgtcaccgtcgtgccgcgttgttctaggcgcgacagcctcaaaggtcgtcaacgcgattcggcgaaaaaggttgtgtatagtggtttccttacgttgcacgcactcgagttttttgtcagttgggttctgcgcccaaaaatagccacatatttgcctgagaatgtttgtggaacatcaggacaccgtgcgcggtacaccggaacatgtctgtgttctgacgtcactctcgacttaaaaggtaatggattagccctactgagcagcaatagggttttcgccacgttttgggtttacagagattctgatttctattttggtcacgaataactcagactcccagtttctttcaaggcttttcttctttgtgtaaacacaggtcgagaggtacgaagggcagacatcctgtttatcgccttctcgttccgaacttgggtcgagggaagaagcctctggtcaacgctggaaaacagtttgtgactccagcgctacggtgtgtttcccgtggtctcatctgttgccgtggcaaacggatcccaacttttttgtcacgcttagcccgtcttttgcgagtacgggcaaacgcccgttgttttcatgttaactcttcctctacaaggtgtgtcagtctcgtgcttttattcgttctctcatacacagacgctcccgctgaatctacatgtttgcctcctctttctctcgatagcagcagggacctgggcacatgaaggtcgcgaagagtcattgtgttgagtgcagaaaacgttcacgggacagaaacgttcacgatctagcagacacaaggtagtgtcggtggtgcgccgcttacttcgactttccacatatatgattcaactgcccgtcaccgtcgcctttcaggcattttgcccccactgacataa

SEQ ID NO: 1654 - DNA, 3304 bp, Toxoplasma gondii
  source 1..3304: mol_type = genomic DNA
agccagacagtgactgctcgaaaacagagtcaggtcgacaaaacgaggaggacagaaaagaaccggagagaggttgccaagggcggcatcgtagagactcgcgaggagctgacagctgagcagcagaggcagacgcagaaggcaaatgcggacagtgaagaaagacaggagagaaggcgctctgttttcttcttgcgcgagatggaaaaggaagaaaagaacgcgcgtgaggcgacgccggacgaggtgaggtcgacagtgcaaggcgaaacgtgaggggcgcaagaggcaccggcatagcggcctgttcagagggcaccggggaggagactctcgacaacagcgtgcgttgctcgaaacgttttctcacgaagcgaagaggccgtccttttgccttcttcttcaactgtctcgcgtccggtctcctgtgggtcgagagtggcttgtcttttcttgcgacataagcatcttttcttgttctctccccacttggtccttctcccgactctcccttctgcctgcgcctcggtcgtgtacagtgagtgcatgcagaccttatgtcgcttgctgaggatgtctcctctcggtgtgtctccgtcagagggatgaaggcctaggtccgcatcaacctcaaagaaaggacagttctgcagacgctacgcgcctcgcagagttgctgtgagcgtgacgacgaggaccgagaagaagcagaagaaaaggagaagcagagaagaagggcagaagaaggggagggaagaacgggagaagaaggggagaagaagaggagaagaaaaaaaaggaggaagacaaaaagagaggaaacgaaagaaaagagagaggagaccacagagttgccgggcgaaatctagctgcagcattgagcgacaagggatgaagaaaattggagtcaagtgtaggcaaaagaaagtacgacttctggatacgctttaggagggagaagaaaaaaatctcagatatatttaaagaaagaaaagccgttattctgtctttcttttctccctgttttacttcttcggaagacaagcacacagcgtgcatgacctgaacaacttgcgcaacagctgtgtcgcacagcgcgcctctcgagtttctgtccgttttttccttgtctatgagtaacctttctcgcatttcttttcggtctcatttctccttctcttctgtctgcatctcagctttgcttctcccaacagattctgctttgtcgcctttcaccccgtctatatctcgtccctaatcgtcaattggcctagtgttttccttccctgtgctccagatgtctctgcgctcagagtattctcgatggcgggcgttgtctgagaagtcgttttcgagaaatagaacaagatatcactgatttgaagctaacgtcgttgtgtggcaaaagaagattcaaagagtctcgcgtctcacccagccttttggaggttgaggagcaaacggggatgtttttttcaatctggtcttgttttctacgtgagatgttgactcttctaggagacgttctgttctctcctcttgaacctgctacatctgtttctctctgtggctcacgcgtctctccctcactttcgcactgctgtctctgtctctcgtctcaacgcagtgaatatgcgtacagctcatgtctctcggagagttcggccgagttaattgacagtgctgcttctagttagcgaaaaaatcgctccgccggcgagacgaacactggacaagaagagatcggttgtggttttttacttcagtctctcgttcaccgtttgtctcctgacttcggagcttttcttttcattcgacgatctctcgtgtttttactttgttgggtcgccagtttctctcgaaccgccaactcgcgctgtgagcagacccgtgacgctccccagaaagaaagagctggaaaataggtaatcgcgttcgttagttaccttgcttcaagaagagaatgagcgagagaaacgtcctagaggtcgttcccctgtgcctttcctgtctggcttccggcaataagcaggaacgcccaaagttcaccgtacgcagacacgcagaaaagacaccgccgttggaggtagagaatcgaagagcctagttttcgcttggggcgcatgcttcttctctttcttctgtagccatcggagttgtctacgctccgctgtccgttagatggatctgtgatctattataatacggttctcctccggaagcgtctactgtcctggactacctggaacttaataactttttatgcagagacacaggtccgacaacgcaggcgggaagctcggcactttgagaatcagaagaagcagaaagcgaaagtgtgagggagtggaagtacccgagagaaacgagacgagagcgacggtggcgaaaggtacggtcagagaggtcgcaggtcgagacaaagagagaaaacgaccactgcgagagaccggacgttggcacaagccgatgacggaggtaaaacgcgcgatacgctagagaaagaagtccaccatgaaggaacaaaacaggcaagtagggatcacggagcactgtggcaaagaggtcgaattggtgacgcggatagagagagagagagagttgccctcgagtaacacaaccccgtgatacgcagagagggtgaggcactcgagttcgacgcatgcagaggaattcttgaatgtgacagagagtcagaggaactcgcggtatttacaagggtgtctgaaaaaggcggtgtgaaaaaggcgcagtcccgcgcttcttcaggatgtttccgtggcagaccagacgcgagagctcgccgcagagaggaggttccggcatttcttcgcattttttttctggcggcatgccccagaaaagcacatggcattttttccttgtccaccgcatcactccttttccccgcgttgatggctttgccgtctcccgcgagctggatgagattcacccggttcgctgtagcttttctcccgcgccactcccgtgtgtctgcgaggctgcgtggagctcgacgcgccgacgagttttccatgagcttcttcgcatttccacggtttctttcgcgcgtccacgacactaaagggccgttatttttgtgcgcaaacacccggtctgaggaagaagccttcgtctcgagtttcttcggccagactcctcgagcgccttgaacaggtcgtgagagaccgcgcgtggaagaagagtagcgatttcgcagtgtgccgcgagtgtgttgcactgcgtggcgcagcgcgtcggagtcgaggaaacggccattttccccgtggaaaaaacgggaaga

SEQ ID NO: 1655 - DNA, 4881 bp, Toxoplasma gondii
  source 1..4881: mol_type = genomic DNA
ttcgatcaaagccctcacgactctcgctcgacacctccagcaaaaagcagcgaaacagcgtcgtggaaagcgcccgcgagagacgtgagggcacggtacacttgtccaccagacgagcgccgagaccgcgtcaatgctgggaaaaagggaaacgttgatgtaaaactttgaaacccaaccactctcctcgtgctcagaaactggagagaatatccacagaggtgagagaaacaggggaacaaaaaaatggaaacgtattttcttcgtgcgattgaagaagaggcgcagcaattctcgtcgcgcccgtgttcccatcaacgagaagaaacagagaccgcagtggcagactcgctccttggtcgcatgtactgcgtaggcaaaaaaaatctacgaagagagactgcatgtacatgaagtcaagatgacgaactggggtaaacagccgtggagttgtcctgcggaggcagccggagcaacgaaaatcaagacgtgaacacgttgtctcgcaatttgttgacgagagcaaaccgcctcgcatatgttcgttgtatccggcggtcgcaggggattccatgaatgggtcgaactcggtctcaccgacttcctctccgcttcaagaatatgactgggaaggtcttggaaccgttggagctgctcttgcgaacggtcaatgcctgatacgcacgggaggagcagctttactccttggaagtgacgtcacacgcaaaagaaaacttctccaaggaacgtggacggactgcaaagttgcgctgaaaccaggacccggcaggctgtcgatctccggggtcggaatacgggaaaggttacacacctccactggcgaagcgaaacggcgattcgatgtcactccgcggcatacgcagcacccagatacgagcaggagttcttctggactgaaactttccggtgaaacagaggaacagcgacaaatatggtatagctctgacaagacaaagtaacgagtcaaacacagcgatgtgacatcgacggcacgcctttgccacgcgctccctgagtttctttgactggaaacggccgaaaaggtgtgtttcgaaaaagtgaccggaaaacttgagactccgcgtctgcttcttcaattttcgctttgaggaaagacgaagaagtcttcagaagcgagggtcactcaaaagcgtgaggcaatttgtgagccggccaagttctcgtgccactatcaccagagagcagcgcccgtcgaatacaaacgccacacagttccgccacctttggagaagcgaatttccacgagacaagcggaaaagtgtgatccaagattggctggcgcgcagtctctaggaaacgaaacgaatcgacgcagctcggaaacaattgctaactagtgccgcggaaccatggcggccagcccgacttttcgtcggctggcatgaccgcaaagctcgatgttcctgcggcgctcgtggtgtctgcagagaacttcacggagtaaatgtgtttgtgtgagttttagagactatgcattttaaggaaaggaatgaaagtcaggcggggggagagaactttataggtttctcctcagcaactccagcgagcttgaaccgctcgcagccgcgagtcacgcgcaccagcgctgccaactggacaaaccactgacgagaaaaacgccgatttgtcgttggtttcacttaccaaggaaaaagccaaatacattcttccacttgagtctcgaaaaggacgaatcgcgagcagtcgcggcgctaccaccgctgtctaaggccgacactcttcgagttgaggcttgtctcaccgggtgcgactgctggctcacacacggcgaatccggacggtgaaaatactgtgcgtgatttgagttttcgaagccttcggttcctccaggcttcttcaatcagtttcgaatggaggttactactttgggaagctgcaagtggaaaggacatgtctcgcttcccaggaagagttttctgattcgtgaagaacacggcatacggcagttacgtagtcgcgcgagaaggaaaagttgccaccaattgaccgacagaacggaccgaactcgaaagactggctctaaaagattcgtgaaaaattgcttttggtggatctgaaccacggccgcagtcgatggacctagatgtcccgtctagagtactggtgtaatcttgacggccgtggtttacgggatagccgcacacaccgacaccagcgcgacgacaacgaagtttatcttttgaaaatctaggcaggggaagttccagacgtctcatctgtgacgcccagcgtcatagaagagctgagaatcgtcagacgagcagatacccgatgcacagacatcgttccatcactcgaccttcagaaaccgtagctgaaagcaattgtacttgctcgattgccaatatactcagatccgttgtttcctcacgaatcacatgggcaaaagacccttcgacagccacgtcagctgggcgattctcttggtttctttactggctggatggtcagggacgtacacgatatcgtcgtttgcgagtccatggacctgtggcataagcacagggatatctggtggtaggcagtttgcaaggaaagaatgaaatttctggtacgaagctgctttagcttcgaggctcttttattggatctcagggaaaaggtcgtgttgttctggaccaagttgcttccaacgttgtgtggaacgcgggcagttttccactcctgaccacctatacaaattcgatgaagacacgcgccggagctgcgtgcgttgacaataatgaaaaagcgcgccatctaccctgctggcgtttgttgcactgaggttcagaaattcataatcggacgaaaattgccaagtgatttgagctagcgaaagaaaaagtcggcgaaacgttcactctgtcagctgtgctgatgtaggatagatttccgcgcgcattttgcggtgccttccttccgcttgtttgaataatgtaccggtatggcgaatatccaacacactcgaactggttctgggcttcagatgtgtgtttctcctgacttctctgttcgtgcttcacgttaaggcgacacgtgcgtctcgcccgcaggtgataccttctgggcgtttcgtttttaatcccagtcaacaactggtgggtgttcttgccttgtcgagaatttactcgggacaaattcgctgcggagggacatttagcttattgttacggagtgcccttctaactcgtgtcacgagaaaagccacgccgcgtttgcgtccttatcttccccatctctatgtggttgagttacacagttctggatcgcggatcatttgtgcgaagtacttgcaatgtgacggttacagcatatgctttatccactgtgcattttcctttcgttcctcccttgtatttcaactggatgccgttgccctgttttttacgttcaacaaagacccaacatccgcatcgattgtcgactcgctgagacacgcataaagtatcaagcgtgctgttacgggtattaatcccgtgagaaagcgtccggattcgcgcttgtcgcatatcggtccgtcatgaggagaagcgttggtgcttcttacttcctgttcgttttcccagggcattcaatcgagatggaggacgccagccgcattcccgttgtgttttagtccatgggcacaagattccatacacaccggcgccgatgaagttagtcgaactaaggatatccttattgccaagaaccgcagattcaaagcacgccgacgaaatacaagatgagcccggaataaactcacagtgaagcaagtcttctggaaaccaatccaaagtgtgctaggtttttgtcacgcaaagctgctgtggagacagcagcagcggcgtctcgttactgccagcatgcgtccggtttttcccgtcagaaagaaatgttcgcggtaagcgtctatttctaaagagtttctcgtgattctcctttcaggtaactgtgattgatttctgcgccatgcgtatgttttgtttcctcggtgacggctgaaatatcttcgctgtgcttccccggctttccacgctgttcgctggtgcgtcctgtctcagtttaacgtcactccccgtgaagaatggctttttgaaactagctgcgggctttctgttcgtgcagaccatttctcttccggtgtatcccagccaaaggatgcacttcgcctgaggaagttgcgccttttctatgccgtggtgaactacgcacgtactaaaacaactatttacttttcaagagcagcctgcaattcggcttgttcccatcgttcgagagagtcttaaaattcacaacggtaaaagagacttttgcttgacaaaaggccgctgttttgtctaacacagagcgccggcgcgatggcagcgccatcttcggccgtagctatccgtgcgtgttccagtttttcgctgcctcggttttagttcgtcgtgttttctgagacattgtctgtcttcttttctcagtctgtcataatattcagccgccatctgataagagtcactccttctgaattcggaatccctgtcgtctgcgggttgtctccaccagtgaaacacgcagaagattttcgattaaaaggcagggcaccaagcttttcgtctgcctatggaagaccggcgcaggagtctatacaacgaggtggagtaccgattcagatcttgaaggtccgtgttagctgaagccaaggtctgttgcgagagcaatcgacgttcttcttgagcggcgtaccttttttctgttatccacagccttaagagagctcagtagttccgtgggcggcgcaagtgcgtttcgggcagtttctgaggaggacggacaggcacaactccgattttttttcgctgctcttca

SEQ ID NO: 1656 - DNA, 3726 bp, Toxoplasma gondii
  source 1..3726: mol_type = genomic DNA
agaacgaggtattccgccgtagtcgggccgtgaagaactttcgcttgcaggaggcggcggctgaatggcgctaggaagtcgcaaaactcggcaggcgaaatgtagctgggaactctgggggcgacgagcacgcactcttcctgcagccactgccagacgtcgcagccgcacgcgttgcacttttgtttctgcgagaaaggcgcgggcccggcgcttcccgacccgtcgggtggagaaggctgaatgagacgaccggcctgtccgatttctccacctgacgggaaaaaaaccgacgaggccgcagtctggagtccgctggcgggggacgcagcagcgggcggcgggagattgcgcagcagacgctccgcagttgcctgggaaggagtcaagaaataccgcaatgttccgctcagacgctcaatggcaggattgccgcaccagaaggaaacgtcgcgtgtgagaagagatgctgtcaaggatgacgcaaccagtgcaggagtgggactcggcggcgctgtacacacacccggcgagttgggaaccagcgacgagacggcgggagagagcgcgggggattgaccagaagaagtcttcaattgggcgctcgtaagctgttggagtggaagggaggacacacctggacccccaatgaaaggcgtccctgctggcgtcgaaaaaaacgcggaaaaaaacgccgcgtcacaacatcctcgactgtgcaatggcggcactggggaacgaagcggggaggaaggaacagacgcgtctggagtagaatttgattccatagcttcacaactgaggtaacgaaggagaaagaccacggacttatcccgtttcggaaagctcacgggcaaaattggcttgcgtcaccactcggccactgccgtagatcgttgacgcttaacagttttcgccctttgacagtcggctgtccgcctttcatgggtgaggaaagacgtattccgtatcagcattttggatgccagttcgaattctctccaatgccgtctccagtgcgtgcgttgaaacagcttttcggtcaccaaacggactcggcatgcaacacccttcgcggtgtgtttcatgccccgtctcacccgccgcgctccagcgtacgcgttgtgatacgcggaaactttgaacagtcgatcgacaagaaagtgcttccggtgaagagacaaggctgattattaacgtgacagtgaactttgcatcgctggaattgaaccgttacctcgtgtgaggacaccgccgaagccggctagccaaaacaaccaaaagaaagatgcaaactgagcgtagtcgggacacttggacactgtgcaaagcgatgaagttggcaaagaaatataaaggaggaaaatgatgtcttaccggaaaagaaacagttcgtttgtttactcaagatcgtggccgcccgctttgcgtgcatgcgcaggcagcatacgccgagactcatctggccacaggaggtttttaacttgccctgtgcctttccagtttcctttctttctagtgtttttttcagtttctcacagcttccacgcgatccgtagtgtgtgtgactctggttccgtgtcaagcatagagaccaccagcgagtacgtgagaaccaagagcgtgtttagttgcgtatcgagacaagcgcgggcggtggtttatcatcagtgaagtactgtggtcagcagacaggaaagtggaatacagtgcatacgggactaaacggggttttaaagctgcctgaagtacgccaactcggagacagcaactaaaatgagaagctgccccgtagagtacgctaacatgcctgctgcgagtcagcgcaccgcaaagaattcgcgtccgcgatgaccaaccgccaactcccgcacgtcctgaaaaacctagcgaggagtcgaggggaactgctcgtaaaagagaaggccttggactctgaaaagcatgcgaatatgtggcaagacaacaccgatgtttttcaacaacgtggttgctaaagtgtgtaacattcccttgtagaaatgcgccttccacatggtgttcggtattgctgcctctgcaagctcttctctcaagtgccactccaacacggctgtggaagtgaaacttggttcctgaaaactgcaccagctgaaatgttgaagcagctaaccagcccagggagaggcgatcttttctaggcgccccatcaggttgcctctcgaaacgagggcgatgtgttatagacggaagcagcttctcttacagaaataaacgtagttttcttgtgccgatagaccgggacacacacaacacacaaacgatacgtactgcgagcgacaaaaaacgacagaaacgtgtgctgactactgaaaagttgccgatactacaggtgccatatgggtttaggactccgtacgcgggcatcacgaatgttcttcatcaatgaaacgctgcatattcatgtaaatgcgcagatagactggatggtgtggccagttccgacaatagcgatatagtaagcatcccggaacgggaggtcctgcccctgcacagtaacgcgtcggtcattttccttgtcgcacgcaatgccggccagtgctcgcagaaaaaaaacgcataaaaccgtctttgtggccgacgcactagtctgtttccttttgtgaccgcgaatagaaggattgcgatcacgagaggttttgcgagggctgcatcgtgccgtgcaatccggaacgagagctcgtttcgacagttctctagaggggaggatgcccttccttcagcgaagggtatgtaaccggcgacatagaagggaaatctgtttctctgattcctcttttgtttaacccgtttaccaaggtaatggggacgcgtgcaggtaccacgttcctttgtgcacacgcctgtcgctaaggctggtacggccgcgcggcctgttttctgagccagaggaccacccacgtagaaggcaatcgaaaaaaaagtgtcgtctcttgtgaacccttttcaacgcgtatttgtttcagtgaaggaaacaaattagtcttactgtccgggggagaattcggaagcttggaaagtgcagatgaagttgcatttgcaaggcaaagcgtggcggcagagcgattggcgaccatgttggtgtctagatcgatgtcttgaagttggcgggcggccgcgtgcggaaccctgtcaccctcctagtactttaccacagagcggctggttccgctcaaccacactttgtgttttcccctccgattttttgcccctttctttgattcgaacgaccttcgtggacttgcgggaactttaatttgttcgcaccggagaactctaggctgccacattgcagtgttccaaccggagtggagtgcagcgttctggaacctaccaccacggtttttcgcgcagtgggggacgtcttcctcgcttcgttcttgctacctctctgtgtttaaagcacaagtgaatcgttgtctccgacatcttctcttcgatttcctttggaaggtttgtgactcacacaagccggctctggcggtcatctggggcacacaacgccgcgtgcgtgtgcgccaccccctccaaccgggttatgaaaagctagtcagtcgcatgcggagaacgaaacaaatgattttttccatgaaaaacgaaactgtgtagcgacttttttctcacgtgccctcgcctcctgcttacacacctgtcaggacttctccgcagctgtctgatctgcgaaga

SEQ ID NO: 1657 - DNA, 2171 bp, Toxoplasma gondii
  source 1..2171: mol_type = genomic DNA
gaagatgaacagggtgatgtagagttcttggaacgaagtgttccattttccccaatgtgttttacgtgttcaagggagttgtgcggtgtgagtaatcgtcttgtgcagcaagctgtgcagcttttgctcaatttgccttgcctattgggaggttctgcacaattagcgaaactcttgtgcaacttttgaacatgcatccggtgatattcagcgtttcccgctcattttcaaaactgtttttttgtcccggttattgcgtggtgcgtgtcgtcttggaaaggttcgcaccatgcgggcgcgactgactaaatttgtgggtgcggtaccggcgcttcttatgtttcgaaaacacatgtcgcttctctgaggaaagtagcggagacttcctatagcggaccatgaccaggaggtttttgcgacaactcattctattcaaagggatgccgcgtggcgaagccggggctgacagtcacgatgatgcggagcccactggaacgtctgtgtggcaaacatcaggtgctagaactgttcccactctgctatcatccattgcaactcaaagacttctccttcctcgatcgagctgaatcaccagtctgcaagcgaaggccacgagttccatcgcccccgacagctgtttggccacagtgaatcgctctcgagcgtgcaagaagatagggatgttttcatcagtgagtgcttttacatgtaaatagggtttagacctaggtacgcttgggctttttgacgtagagggatcacccatgtgctgacatgtattgtggcaccgctggcatcgtaattttgcatgtcctcctagttcagcaccgtctgatgttctcgaattcgaccgagtaacgcagatattgatcatgtagggccatccacagtaggagaagttttagcaagtggcacgcactgtccatcagcagacacctctcaaggacgttactgacgtttacgtcacccactgagcagcttctgcatgttctgcgcgaccactgacatagcgaaaggattgtgaagctatggtgaactattgagttcacatttagtcgctgattcagggattcagcttgaggacgctgaaaaacgccgagattttacaaagaagcctgtcgtgcaagtgaaagttcgttgcttcacacatgacgagtctccgtggaggtggaacggcacgcttatttccccgcacgcgctggagcctacagtaaggcccactacatctttttcgccagataaatcggcgagtctgaaatagttgtgcttttgggcagtttggctctgtctcgttattgtcgagcagcggtaggcgtgcatgcaggccctttatctgtagaccgtttcgctatttaagcttccaagcgtgcaccaatgattgaacgaatccagaacattattcgaaatgcagttcccagttttcacatttaccgctgttcaggagatgagaacgtttcttgtttttcttcgcagcactgcgattgccggaagtagagaaatgcatgcacacatggagtttgccgacgattcgtcgtgaaactgataccgcttgatggctccgccaacaaattgccagttctcggagacgaattaatatgatttacctggaaccgtcagctttgaagacttgtaggggggggaaaccaggtacacatgggcgggcaaatgctgtcgttaccccattttttctctgcatgctgcttcggtcttgtgcattgcattcgccaggaccaaaggacagggtcgatgcagagttgatgtcgttcaatgcgcatactcttggtgcgtgatagaatgcctcaaaaacgagcgtggctgcatttgtccgaaaaggttgtcatctcctatcgacgtgtaacaaaacccctctggtcttaatgagtagcctggtgcccgggcgaacaaggctctctagtcggttctcccggaagtaccgtatcgtcggggccgagctttatcaaatagtctttgaacgcgtttctccttttctctttttgcaacgtagttgaacgcatgtcgcaagttggcggcggggtcattcaaattggagccaatgcccggaacgagaaatactcgagtgaccatgtcacctctctgcatctacactggtagtttcacggtctgagatttctctagtgtatctgtgactttcattgccactttgtgcggta

SEQ ID NO: 1658 - DNA, 3333 bp, Toxoplasma gondii
  source 1..3333: mol_type = genomic DNA
tgatgccaatcggcaagtcttgagtgcgtggattcgcgtcgagcgcagcgagaacaccgacatttgccgcagtgtctccaaagcggctgagaggggactgcatcagcgcgggaaggagcccacagtagaaacgcctcacgccccctgcaagcacggacgaggatcccctgataaaaacaatgatccattctccgctttcacaagaggcatcaaacgttgtcaaagcagcactaccagcggagtgcaaccgcgtcatagagaaacggcacctgtccctattcaagttctttcccacctgtatcaggaaatgcatccttgcacgccaccttcttcaatacattgacccatctgcgcctacatctccagatgtgcttcaccgtagaaggtaaatgtatacatgtgcattcatatttatgtgtatatatatacatacatatttgcgtatttattaggaccggtattgtgcttggtaacatcaaacacaagtatgcagctttccctgcaaaagtgcagagcaaagggtgaatgcgtatcatacactttgtcttagtagatggtttgtcatcctgcgtaccttcacgatacagctttttgatcgatccgaaagttgttcctccgtaacggtactggtagttcattgtcgttcggagccacatgaaggcgaggacattgacaacctgcgccgaggcgccagcaatgcctccacggaaagcctggtctttggaatacatgatgatttcgagaggtgtttttggttccggattcttcttgttggctgtcgcgggaacagcagcagacgaggacggagccaacgacgttgcagcagacgacgccatgttgcacggttcgttggagagggaggcgaagaagagggagtaggagaggaaaacggagggaaaggtttcacctgaaagaatgtaagatttgcctgggaggcagaccgaacgatagtagagaggaaggtcggcaggtcggggagtgcgcgcaagagccgccaacaacgaaatgaggggtaactgcggaaacacacactcctcctaatgagacacagacgacaaaagaaagtgaacggaagatgacggagcgaacgaacaagaatatttgctggtgcaaagaattgccttactgtctgaactggggcagacggtttcgccctccacatctattttcactcgttgcgtgcaaatgctcaaaagagagggagggcacacgcgccggcagaatcgagaacgccgttcactagtgggaagagtggcagaaggatttttggtgaaagagtgaacgcaaattgcagaattgctgtaaaggctgtcttgccatctgttgtctgtctgccgttggaggccaactgtctcgctttgcgcagagcgaagggtgctgactagcaagcacgacgagatacgaacacgggccttcctcctccacagtaacacaaggggagaaacgcgctcgtttccaaaacaggcagacggcgacaatgagaaagctcacttttgctggtgtgcacagaggatgattcgttgactatgagaatatgcaaaacggaacggctgcaggtacgcatacagccagcaaaaagtgagtgtgcgcctttccgagctgccaccctcggacgactcctgaaacatcgagacacattatagacggcactttggcggggtatttcctggcaaagctatctctttctcttgtgccgtgtcccttgtacatctttctactccagggtttgagatattcgctccaatatcacggtgtattttctagctaaaagcgcagaatatggagcggagcacacagctttgaattacagctatgacttcctgttcttctgcaccgtcagacgttttcaactgtaaggagttccctacgcaaatgaagatgcacacgacaaataaaggcaatccagaaagagcctcattcctacagataaaaatatggcacttcttacgcgctgctggtatggccgcccaaacgcctgcccgacctcacttgttcagttcccgtgcagcaacgcgctgctgccccttcccgccgaacgcagagccacgttacggcggctttttagacaggaatgccggcaactaaagacactctcctccgcaaaggaaacacttgcctttacagctgagttctgtcactgtcatccagacattatcacaatgagcgatcttgttgcataaagaggacccagaaccggtctcaacttgcgttgtgcgttgacgcaggtctcgctcgacagcaacgcccatggagttgttcttcctcgctcagcacttgcaagtggcaccgagggtgttcagcagagtccagttgccacaagagtttcctttcgtaaaaaagaatgcttggccttggtgacttatgccttctgggcacgatgcgtttgcgaggcggcgaaatacaatgaacatccggctcgtgaaaggagctcgcgtcacttgctggggacgctgcgcgcagaggcccgactcggcatgatgtcgtaagtgtacagagatcctctccagcaaataatacgagagaaacttaagaattctcgcgatgaagagaacagagaggagatacacgtcgacaaggtcgaagcgggctgtagaaacgtgctggttcctcgcaagttaccacacacaatggtgtgcagagagtcgcaaggttgagcgtctgctgatttctcgagcattccgcatgcagaaatacagaaggagacgtgccgcccagaggcgcgtccattctgtatatttgtctcccttagatgatggccgtttaaggctacttttatgcaagcgccactgtgtcaacctccgaaggggccagaagacgtgagaggcgaccacggccacggcaacaactccgaagcgcttcggcgcccacccagatatgtgggaattggagcgagtaaaagacaaggaggaaatatagcgaacccaagggattgtctcagagtgaaaatgggtgaaaggaacggttaatcgctcttgttttctgcaacaatttcgagaggggaaacagcgagaaccgcgaacccgagctgcaatgaggaaacggccctgtgaaggtaaattcctgcgctgagggccggggcccctagtttcactttttcagtcccattcgcgtttgcctcctgtccttctgtctccgttttttgccgctcgactgccgcgcctctccatcaattcgcgcaaccgaagtggttgtgcctgtcttggcttcggcttgcctcgtttttttccctggattgttcactgtcggcctccactctacgtctgcttgctggcgtcgttgctggcttgcccttttatgcttcttcagactcttagtgctcttgtggtagcccca

SEQ ID NO: 1659 - DNA, 2271 bp, Toxoplasma gondii
  source 1..2271: mol_type = genomic DNA
cgtacggctagacctacttttagagtcacaaactgaaacgcatgcagcaacgcggaaacaagatccatccaaaacgcatgcatgcttgtgtggcactgtgttacaagtcacctcaccagcacactttgacgcatccacgcggcgaaatcgactacgaggttgcgtccgtgtttctacactctgtaaccaacgaagcagagcctcacctctcgcactgcagtccagactgctcgttcctgaaacctctctcatccaaaaaaaactctgcccccgtatcctcatcccctcttcttacgtcttgcatgcttgtccgactcctccgaccctctattgctctcacctttgctgggatccctgactgcgagttcaacagcctggcccttggcaggactcttgacgatgtctccggtgaatctgaaggagcatccggcgccgcacttgagcagttgaggaaactcgccaccaatacctgcctcgacgacgacttggaggttggaggaagtgcttccatcgctgagaacgacgaagcaaagactgccaccgccttgtttgcggaccgagcgactccagccgcaaacggttacgggtgtttctcggttcacgaacttttccacggacgcctcgccaccgtcgaggagcgccgcgagccgaacgcgcgtcgatccacagccaaagacaggaatcgcctgcttgcagcttgttggaacctggtcctcgagatgtcctggagtgaaggacttgctttcaccttgcggctgcgccatggtaccaacggaggcgaagtggcgagagagaggcggcagagtgcgtgcgcacagtggaacggaggttgggagggcgagacccgagggaacaggaaactgtcggatcgaacgaggcgaggtacccgaggcagagtttcgagaaagataagcttggtcgggcggagtaagtctgacgggaaaccagggcctgtggagaggaccgcgaaatcgacaccctgcagacgagaaggcgagaggtgcggcagacgagcgaagcgtcagagccgaggaataaagaagcgcggagttgcgcgcggacgccaggacgaagaggagaggaaggagcagccgcgaggcgacagacaccggaaattcacggacagaacagcagacgaaaagttgccagcaccgacgaggcattgagtgacccgtcacaaaaaaagcggcgccaatggaccgtgcttcgtacaaatgattcgatgccgagaaacgttggactgcacgatcctgtgggtccaaacgatgagagagaatcgcgttcttcagaaaataccgaattaccggacaaagtccgcaggcagacccacgacgaccccagcgcaggagacagaaccgaaccccctgtcgccccccacagttgttcggttgtgaaaacgcaagcggacgcaggcccagtcgcttgctaactccctcgtgtgccgccgcctctgtctggtcatttgtccagctctgctctcaccggcggctttttaagtccctcacgagtctatagatacagcagaaagttcgatgaatcaccgtacgtacttgcagtcctgaaaaatcgccttgcctaaaataatgaatcgaccatctgcgtgagttcttaaacccgcacacgttgagacttcgctggtgaagaagcaacggaagcgtggctcaagggcctgaatcgcgaggacgcgcgagacgcggcacccttttttcgcagcgattttgcgccgcagaaaatatgtcgactgtgctgagtcccggcttgtcctcggaaaagctccggcagtggagtggagagcaagtccgacggcacatgaacaccttagcaccgctgcaaaagaatgaatgcctcgactgactctggtgcgatatttttgaatcgcgccgcgaaccagctgtacgtacactagatgtctaacggaaaaccacggctcttctgctcggatttgaacaagaaaaaatcagaggcatgcccacacatcgtgcacactcgactggagcatgcactgcccttttattgcgtctcgagtgtgcgctgacttctcgtatacagcgacagagccacagtcgaccctccacacacccacacagagttccagccccgaaaacccgcagccataccccactccggcgctgacaaacggcgcgccgtttctccattctctgttcactcgtgaacagataaaaggggagcttgtcccgccgttatttcggaaaatctcacctcggactgagttgtaattccttccactttccggttgtgtccgctacaaaa

SEQ ID NO: 1660 - DNA, 2892 bp, Toxoplasma gondii
  source 1..2892: mol_type = genomic DNA
tctggcagcacatcagcagctggccatccagacacattggcggtagcgccccagcaaatatccagatgcggcaggtgcgttggcacaacactgttgggggtgtttccctctcgactcacatccattcgttccacacacgaatttcctgacagaatatctgtttctgggaatgccaaaaatcgtggtagtccacattccggggaaccattttggttcggagagacaggatgaccgggctgtgactgaaccgcgacggtatctgcgtgcccattttgtgttggagataagtccgatgtgaatgtctgttcgctactgaaaagttcagaatgttggtcaatgctgtttcttagccgttgtccagcttctgtattgtcgaatactgatgaggtagagacaagatcggatgttgaagggggtatttgacgtctttgcaagtcagcgggcgcctgaaacgaaagcaggtcatccaaccggttttgcgcaggtggaagaaaatgccgaaggagaccgccatttactggcgtcgagattagccagtgagttccagtagcatttagagtgacgtagctaatcggccgatcttgcttgatggtgaggtcgacagacggagctccgcatgtcgccgaggcacttggcacagccgacaccgcttcagatgatccttcttccagggacaactcatttgctgaagaggggcagaccacagatggagaatcaacttcgccaacacgtggtcgttttcgagtgggggaaacaggatctgttctgtccccagagcactcttccggcacctttgcgggagagactccccgcccaagcaagtcgactaatgcagggatattgacaggtaagcaagggacagcgaactgtgatgcatattgctgaccaagcaaatttgcccaagcaagcaagaatgctgtgtcgggattgacaggatcagcgcatggtgtagccgagtcgggtacggctgtttccgcgccggcacagagttgtgacgccatggttgaagaatctgaagcctagacaaggcaatgtatccacgcgagtctcagagtggctagacggtcaccggcgatgggtctacaagacgatctgggaaagaagccgaaataagagtgaaccctgcctttgaaaactgcacattcgacggaagaaaactggcagtaaacgctgatcgaaatggatttttttccaggcttcgcagccagaccggcttgcgaagaggacaaccggtaaacggagaaaaaccgcacctggtccacagtagggtgacgcgactgcaacccgttagcaggcgcttctccaaatttcaagcgacccgcctgcctacgagtattgttgtgccttctagatataatcaaacactgtctaggacgaaaagacacgaagcctcagaaaacggcagcgttctgcaactcatgaagccgcgggcactgcgaagagtgactcaaatcagccccgtcccccccgccgggagtgacaccactgctgccaatcaaagccgggtcacactaccgtccaacagaggatcgttccttggaaaacaatgcactcgctgcaaaataagattttagaccaaccgtgacggtgattcgaaatgaaagctagcacctgcagtgaaggccaagaggcagtcgtcccggctcaacatgagaatgaaggcgtgcttcgctcctcttatcccagcagcggcaagacacagtgagtggcgagcgaacagacgcgcggctgcaaaagcatgatcgcatgagtttttctcttggcgtgagtagggatcctaacttcggaaaaacaaacagacaaggacgagaacagggcctcaaaagcctcaaacagatagcagaggagaaaaatataaaatattcgctttcttctgacggcattgggtgaccgttgttgtagcagttaattcctccgactcactggcctgggagagcttttttagatcactcgagtcccgccactgagcggcagcgcgcggaagcggacggagtggcggacagtcctccacgcgtaggccgcctcgtttattttgcaacctatcttattcgtgccactatgtctacttaaaatagagggcctagggttctgttttgatcggaaaaattgtcttggcactggagggctaacaaggaagggccttcaaaaggcggggttcaactggaacaccgtcggctgcagaagagggaattgtaggtgctgcagacataaaactgcgtggaacgtgatgtgcgaagagtaccatgcatggtgctccacctctacgctctttagactgcgaaaaagtacatgcctcacttgcactctgcataccgatgaactggatgtttgcgtacaatacgcaatcaccacacaaactcatctgtcaggatttcttgcttcaactgcgctaagcaagaagcggacatacacgacaaacgacatgcttgtggggctggcagaaggcccccgatattgcgctgcaaaaaacgatgacacagttcattctcgccttcggtttacccgcgaacaacttctatggtccgccacgtctacaccatttttcccttctgtgaattctgcccgctgaacattcgtaaacttgctccattcaaatttcttgatctctagttgggacgtgtcaggttgttgccaaaggtcccaattcagtaactgtcttcctcatcgactgcagatatgcttcgttgcactttcgtctgttattgttcagttattgggttccagacgcagcagacaagaagttcgtttcacgaatttgtgtcctgctagcagcgtcgggggacaacttttttttccgcacaacacgaccatcgttactctagcggcagcttcctcctcggctgcggcgttttgctaaagacgatagtattgtatggaggaatttgtaaccaa

SEQ ID NO: 1661 - DNA, 1277 bp, Toxoplasma gondii
  source 1..1277: mol_type = genomic DNA
ttcaaagcgagcgaatcctcgcgagtctctccagagaaaatgttcctcgaacacaagccgaagtgcgaaacacgatgcgttctcgaaagagacatgcgaaactttcccacctacctgtatctaggcctcgtagccttttcattgccctagcaagaaaacacgaacaacagcatcagcgaaaccgagatcaagactatatatatatatatatatatatatatatatatatttattttgatgcatgctggtagatctgcacatacacaagtgcgtatatatatatatacatatatatgagtaggctctagtggtatgcatgtgtatgtatatatatgcaaatatatatgcatatgtgcacatgtttagacgtagggtaatctagaaaagcagactagaaattcgctgtgtgttgtgacagtcgtttcggaggaggtagtcaacgcgagtgcatatggagtgaagtttggtcaccatgtagatgtgaaggtatgtagaaagaaactttgggactcatcgccgcttgtcaagaaagggagcgttacctgctgtccccgctagacggctcacggtttcttctgtcttgagatcgcgtctgaagaggtctggaaaaatcgccttttgtggagatttggagagcagtgaatatgcgaaaacccaagcttcagtgcttcacgttcaggcgctcacgtcgatgtgtaaatcatttgaaagagcactttccgctgttagattcgtaaaagcctgcttcctatgtctgagcatgcaaacaagccgcatgcagttgccgcgggcatttctttcgcgtgtcgctctctgcatgcgcgcgccagttcccgtttttggtcggcaggaatttctagaaagcgtcgattttctctggaaaacggtttcgcttccccgaccttctctccttcgagtcattccgcttctctgcgtttcctgagggacctcgcatctttccccgtcccaatttttcgtttccgcgcgtcgccctatctccgcgttgtcgaccgaagtactttttcctcactttctcggcagctttacccccccgtccatcgctcgcatgtcgcaaagcgacagaaacgggagacaaagaggtccgaggaaagacgcagcgacgcgcagagtcgtagcgcgacaagtagcgagcacctaagcaggggcgcaaaagtagagagagaagcagaggagggaaggacgttttttggatgctcgctgggcgttcgttttgggccttttcacaccctcttccagcatttcgtgcatcgacagaa

SEQ ID NO: 1662 - DNA, 1643 bp, Toxoplasma gondii
  source 1..1643: mol_type = genomic DNA
ccttacaatcagcgtccacgaaggatactcggatttgcgcagtctcccgttctctccaggagtcttctctgcgccaccggagcgcgacatgcggtttcctcgctctcgcgttccttgtgtttcccctcgattctccttgtgtgggccatcccctttcgtcggatttccaccgtctgtagggtgttcctctcgccgttctcggggtgcctggtctctgtctgggcctccttttacatgattttctggctgcctggctgcgttgccttctgggttgtttgtcggagctgaagaggcggttccgcgaggagcggcgtcggccaactctgctctgccccccgccaggcttccgccggcatcgggcgccgcagagagctggtctggagcccaaagacaaatgcgcctgtcggagccgcaagtggcgaggagacccccgtccgggcgccaggccgcgccccaggcgcagcctacgtgcgcccgaaagcgagcaacgcggcggagacgccaagtggtaggcatgtggaggcgaacagcgttttggaagtccagagaagagtcctgtgtctctcacgcggtccgtggaagtctgttcatgcattcacgacttcaacggggaactgggccaggacaggttctcaagccgcagaggtgacgggagatgggagaatcggagacgaagagaaagaacggcggaccctagcgcgatagaaaccacttgaacaagaagagaaggaaagagagacgacgggcaagagatcggtgtgtcgaaaaaaggccgaagtgattcaaagttcttttacactcggtacagaaggaccagatgacagagggagactcgcgggggaagagcagcttcgccaggaggtttgaaaaggagtaagagtggcaaaaaagagcaagaaagagagttaggagttgacgaaggagaaaaaaataaagaaaagagcacactctgaagcgttgccgtgtctcgtctctccatgcgatgtcactcgggcctcgccctctgccgaagaaattggagggacagaaaagacagacggggacggaggaaaaacaggcaagaaaatctgttctgaaggggcagacgaaagggagacaaaggcgtgaaacacttcgaaaaaaacgttttccgtcgatttttgctgcatgcgacttttcccttcctgctttgactccggtttctcgcttgaacgaactctacacggacacaaaagacatctccttccacgcaaatggagaaggagaagccagcaaaaaaacgcgagaaaaagtcgactttcgctcctctcaggggcaaccaagccatccgttttcgcgctcttgctcaagcccgtgccgctgctctggactagcaggttttcctggatttaacggaagggcaaagaaatgaggaggggaattggaaagtttgaggaagagagtatcacctcgaagtcaactcactaaacattctttgtctgttttccatccgcgctttcaactcgaaactcaacttctcggtcgaagggcgcaggggggctgcatgcaaaaaaagtattcgttcggcgcagcacgctgagtcgggaccagtttgcttggagtgactgcactttcgctttttcatagatttgtttccttgcgcaaaagagagcagtcagatctta

SEQ ID NO: 1663 - DNA, 1632 bp, Toxoplasma gondii
  source 1..1632: mol_type = genomic DNA
agctactcatttatacacatgtgcacttacagatacaccaatacttcacaggccaacatgtgcaaaagtatctgcagaaatatataaagcaatatatatatatatatgtaatcatgtatatatgtatatataaatatcgcatactatgcataatcatatatatatatatatatatatatgtctatacagctttctacatcacagtgggaagaatcgggcgagagtcgactgtgctcggtttctcgcttcttccactttttatagggagacggcaacagcgagagatgcagactgttgaaacactttgtggaaggattcctgaagaagccttctctcaggatacttgcaagcactgtaaaagcgcatgcatgggcgtgtagcggcgtttgctacgggcgcccgtgcggtgtctgtacactggggggcccgcgacgcggcttcgctgcacatctcgtcggtcgaaggaatgccaagaggatttcttgttcaagcggaagtttcttctttgcactttccactctaggtttcctttcttggccctttctgtggggaacgacgtcgcaggtctcaacacatgcaaataggcaagtcccgtttcgttttctttcggagactggagatgcatccaagctgcgatccccagagctgtgaagaacgcactgcagatgtttcagcgccattcttagagtagtcaccgattctgtgtgaacgccttcacgccgcgtggaaaccctcccaaattatgcacattttcttgcgtaacagacaagactacggcgtctataaacagtagaactgcagaaaacgcttgtatccatcgggcactcttgagacgagctcttccatcctgtactggagacagaggacagacagccagactcttaaaaaaatatttcgcagatcttgcctttaaattcgacacctcggatgtccaaatgctttacttgtgacatctaaactgttcaaacgctttactgtgcatcccaggtcctgaattgtgttcagtcccccgctgcacagacgcctggcatttttgcagtggcatttgccttgccttcctccgggaaattcaggaacgcttgtgctcgttacgtgtgtctcaaaattctttggatccgtagggcgcctcaaagtctttcatttcttttttgttctccacttcttctttctcgtcctccttccacattgtgcatgcaacggcggtcaccctcgcccgcctcatccccgtgtctctctccacagagagcacgcgtctccgtctgttttcgattttttccttggcttgtgcatgcgcatgcgccctgagtctctgaaaagattccttcctcaggttcacctccaacacgcgccaagcacagtgccaaatgtcgatttttgcgcatgcagttttttccctcacactttgcagtgtggacggcgagtgaacgatcgccggcaggagtttctctcttcgttcctcgtcttcgttctgctcgttcgtttctccaggtgccgccaagagtctctcgcgccgcgctctgttggtcgccagggttacgtacagctgcgcgcgagcgcctccaactctcgtctttttttcctcgacgatttctgcagcgcaccgttgtcttgctcggactgctctgcccacca

SEQ ID NO: 1664 - DNA, 3835 bp, Toxoplasma gondii
  source 1..3835: mol_type = genomic DNA
tactggcagcgaaagagacatccaccgcgaaagaaagaaacagaaaggatctgctccagattgtgtggacgcccgcaggctcaaccgagaaggagggccctgccacgaccttttcaaagcatgtgtgtgccgagattgatctccggccaaggaaaacgggacttcggtgccccgtacaaatgcagaacatagttagcgaacaccaggaggagcctgtggaaacacgagaaagctgcgcatctgtcagagctgaaactacagactacggtgacatacacgggtgcatacatacggacagaggaagagtacggctcgagctcgagcacagaaactcatgcacagattgtagcagaacaagacaagctgaaagacgaggagaaacacaggagaagaaacgatggagaagagaggagatcaagacagagagagaggggaaactggagaagtacggcaggccgatggtcatagataacaaaggtacggaaggctgagcagatccgtcttctcatctggagaaaggtcatggagacacgatacagtgacgggaccgaaaagacgccgtggagcaaacagaaagaaaaacgcggggagaacggaagtgaagaagcgtttccttgtgtctctcgcgagaagggattaactgcggcaaacggcaagagtcacgaggagagtgagaagagcagaaggagcaattaaaaaaatgtagagacgacagacaagattattttgagtgggagcccagtgacaagggaaaacgaggtcgcgaaacattaaaaggtgtatgcgcagacgaggcaaggaagggggacccctaagaaggcgagacgggaggcggcggttctcccgcagctgcagatttcaagggaagcggaatcagaggagacggtgaaacggcgagagaaaacccactggtgaaaggcaaagtgcgctgcatggcttttctgccccagaaaattactcgagaaacgcagcctgggtcgtggcttctcggccgttgtctggggatttcacgcccttttctggcgacgcggaaacgccgaaactgtcgcgcctacctttattcttcggcatctgcgagaacgaaacagaaacttgggggttgcagggcagaagaaagagggaagaaaaaaaagtgaagacggcagcggccgcgcgacaaacagtggggggaaacgagagaagtcgccctcactcccgcgctcgatccgtccctgctgcagctgaacacgaacctgcgcgaaggtgctcgtcgaaaaaggccagtcttgcccctctcaaccgaggcgcgaagtagaacggcgtcactctctcgtctcggtagctagagagcccaagagtccgaaaagtgtgtctcttctgaggggaaatgaccccgtactcaaacacccgtatgcacaggcggaacggcgtttctgcccgtctcgtcctgcttcgcaagtgtctcgccgtccgcgatttgagtcttgcgtgtcagtgaagccacactttccacttttcctcaatgaaaacgccaaagaccgagctgcccgtttcgcgtttgaagaaccaccgaagcagcgacagagcgtcagacgacctggttgtatgtgtggtgtatatacacctccagcgtcgtgtgtacggcaagtggggaattcatttctcttggcgtgtagagggaagtggagaaatcgccgaccacagacctggggatgcaacacacgagacaaatgcgagcaaaaacggcaaagacgagcgtcgatgccaccagaactccgcggaaagagcgcagcagttgcggtgtgtgcccaggcctacgctcataattccacttagatgtgttgaatgctgtttcagaccatcaagcgtatgcaggcgagtatctaggcgaagcagctgagtataccgcagaccagcttctcgatagtacaatagtagacgactgtgccgctgtactgacgtttcagtagagaagcggggcaagaaatgcgaggcgtttcgagagttctcacccgcgtcgagatgctcgcagtgaaaagaatgggtggaaactgcagttgagaaactattccgaaaacaaagaacctgttagaaccctagagagggcaagccagttgtaaggcaaactgtgcggactgacgttaggagcaccacatccagaacgtgtgcgaatctgaaaagaaagctctttctgtgttcgaagacggaaacaggacgacgcgatttacacagtatacggttcagggagcagagatttctacatctgatctggctgcacgagcatacttttcacctatgacacgtattggtattactgcgggtactaagaccttcagtccctcctccctctaaagtgattactcgttgtactatggcgatgaacaagaaaaaggagtacgctcaccggtcttgtgggttctacgagccgtgtgagaaggcgtgaaaccgccatttgagtaacgctgaaactcaagatggtctgaagaaatccatttctcgtcaactctcctcttcatctattcgctctgcagtgtcgttttctcccctttgcaactccacccgcaaatctccagagaagaggtacttctgcgacagcctctgccttctagtcaccgacagatccagtcttgagtagtacagagcacaaacctagaacgactggactgaacagcgaagtggaaccctgtgaaggcccgtgtgtttcgcttccaccgcaaaccctcgagaaaactacgtgtcgctgctgcaaggcactccagctcggaacgaacgtcgaaaaaacaagcacggacgaggagagggaagtacgattcctgcaaagtcgagaccggtaaaatgccgcgcgtctgcaaacaccgaacggcaaacccggtgccttgttcgcttccgtgtgagtatttttcaaacaagatctcgaacagagcactgtgtgtgagtgcatatgggaaacaggcttcttgtgggctctcagtggcattttctgccgctaaaactaaaattgtttgcagagtaggtcaggctaggttttttacccgcagctttttcagctgtaacgcgtcagtaaaatgagtcgctacttccccttttttctccgcacatctcgggcaggaaattctctcgaaagacgtgaaagaaagcagtgagttgcgccgacataacccctgcaaagagagaagggtttcttctgtgaaagccacagaaaacacacgtgcttcgctgccaccccagcccgcagccccaccgccttctcacccgtctcgcgagtgagttttctgtgtggtggatcagcaacccttgacagaattgagttggtggttgttttcgatggaaggaagcgagagtttcggaagaattctcggaaaagtggatgtcaacctggcaattctgtcccgttcgcggggggctctccttttccgtgcaagcacgcgtccaccttgatctcgcgttctgcgctgtggattgcaggagacgtgtaaggcaggcgcctctgtttccccgcgggaggcacaggcgatgcaggaagcgtctcctttcacgacaccttggcaattcacgaaggaaattcccgtctgccttgtctgactcaggtggcaaaactcttcctgcgttcttgctgcctctgagtcgagggtttagggacttttagggtttaagccttcaactgccgagggcccccccgcgagtcaaagacacacgccgcgtgtctctcctgtggcgactctccgcgagagaggaaagaaaacttcacaagaatcataggctgaagcgaacctccgattaacaagtgtgtgcgctccgtggggagagagaacgcgttcgagaaagacctacagagggcagaccaagagagtcaaga

SEQ ID NO: 1665 - DNA, 2675 bp, Toxoplasma gondii
  source 1..2675: mol_type = genomic DNA
ccaattggtcccgcacccacgatcaggactggcacgtagaggtattgcccgccgtcgcgctgggaagcaattgcgcaaccatccgatccttgcggagccgcgttggtgcaaagtctccttgcacagccgccgtgtgtggaaaaatctcccgcgtggaacgagatgctttgtgcagatttccaacagtgaggtccaaaagcaccaggagatcgtatcgtaggttctgcgactcgtcgcccgcaggttcgcgtagaagcgggagcccggatacggaaaattggagggggagagggaaggcatgacttcagcgttgtcagcggacgatgtgaccattcatttttctcagtctgtccaaccgctgtggccggaggcgtttctaaaggatggacgcggtcgaactggtgaacccattcgatcgacctcacagatcgcgagcgaaacgctccaagcaaaaacgctgtggcaccgtggcgccttccagctaaaaacggtgccatcctagcaatccagggaaagagtgggtgacgacagagccttaggaatggctttaaatcgaaactgcacgggaagggagtgttaacgcggggaaacacgtggacgttgatacactctcatctttctctattcagatcgtacatacacgagcatagttctcagagatgaccattatgattgctattcctacaggtactaaaatcttggatagatgagtctgctgcgggattggaactcttggccaaacggcagggctccgaaaagctccagaccggtggtgtccacatctgccccgtagtattcttgggggttctcgtggcataagtaagcgagtacggagacagaaaacttcttccactcgacttttctgtatctatttcgtccatgttctccacaaatcgccaaaggagcccgaaagacgcggaagtttctgccaatcccaaatccacatgagacgggtgcagacgatgagagtttgcggtggaaaaaaccgtggaatgtttcaattgcaacagtcagtgtctccgagattgacacatgcgtgaagttcaaacgtacgcagaatttgtaaattgatgtagacgaagtctacgtggcccgagtaatcggggctgcgttagtttagcagagtaccttctgaccatgcagttctgcccaagacttctccctactacattcatacacacatgcacatggaacgcgtggagaaatgtgtctcgggaacagaaggtcagacttgttaaaacttaaaaaacactggaaccaacagtctcattcgacaacgacgtctcccaccaaggctcacgaccgcatgtctttcccctactgcggttcccttgggcgtacgccgagggatttaatgccttagtagccatatgatgctcaggatgcgagaagcgtgacttatccaaagaggagagaggcagtttccgcattttttcatcaaggaccttcacctctttggtgttgctcacacggggggtttcccgtctccagagggggaccagatcagcgtaagcttgtagtgcagcgccaggtcgccaggagtcccatgatgaaaattactgcatttacgtctaatcgaggtctagtaaacttcgtttcggtaccaaagtcccttcctccctcactgattaacctcgtgcaccagtgatttctttctttttctgcctttctggttccattccagtccgcgtgtaatgtaagggtacgacgctaaccacgagttcacagggaagtgcttgagtgtgttcgatcgttgaagtaagctgctcggccggttggatgtctgatttctcgtcagattggcgtatgctcgtttcattcagggatacagcttcacgcgtgtccgttcgttttccttattcttgagcgcatttaagcacacatgtgggtacacgtgtgtacctgcgactatctgtggaatgtcttgcccctctgggctaggaggcctgtccgaggggagtcagagagtctgcgcaaagaccacccgcccgcagcctaagattttgctccgaataaaaaaacacgatcgaggtcacgccggccacaacagaagcagcacccgccgctgcacgacaaacgctgaagaaaggattggaaccagacaaagaaacattcgagagtttactgggttttctacaactttcttctctgcacgatttccaagagtttcactgttaacatcctcgattttttgtctttgcacaggcgcggtgggcggcataaagacagaaccatgaacaaccaccgcgaatttcgttcgggtatcactatcggatgaggacgctggtcgatgaaagcagaacagttcatctgatgaattgtctgttcacctgttccaagaaatatcgtcaggatttggattaaattcctcgttgtcttgaacactttctcgtggctgagtagactgcaacaagaaagtctcacactggaactatttttctcgtgtgatcccttgtcttcaaaccgcccaccaggttgctccgtctctgttgcctttcatttccctgtgcttgttgtgagatgctccacgttgcgggctcccgtctacgctaggagtttcgtagggaagcacacgtcagcgtggcaggaaaacaggcaccccgacacgcgggacgaacggagaggagccccttccagaatctttctctgaatccgtttttccttttccacaaaaa

SEQ ID NO: 1666 - DNA, 2461 bp, Toxoplasma gondii
  source 1..2461: mol_type = genomic DNA
ttgtctcctttcccggtctctgcttttatccaggcggctcaccgtggcccatcgatcctggcggaattccagcgcctgcagatacactgtctccagcacgccccacactgcgagaaaaaacgaaaaaaagagaaaaaaacgaaaaaaaattgaaaatgaagaaacggaagaacgaaaaaaagagaaaaaaacgaaaaaaagagaaaaaaaagaaaaaaagagaaaaaaaagaaaaaaagaggaaaaacgagaagaaaagcgtctttgcacacacacacacacagtgagacaaagaggacgcagtatagacaggcgagagaacgcttctatcaccgtccctctctgcgggggcttggccaagaacgagacacggtaatgatttgccatgttcatcaggatcagtcttcccacaaacggctttcggtttgaagcgtgcgaggcttgtagcgaacagcgaggagagaacaagaaagagagaaacagagagaaagagcaacggagagagagaagggaggagagagagaagacgagagagggcgaacatgaggcagaacggaagagtgagtatgtagagagatgcaatgaggggagaggacgaaacgcgttcgtgaacggtggagagactcacaggcatctccaagtttgtctctgaatttcctgaggagacacgagccgtacgcgagcagaagatctccgcggccttccgtctgagaggaagacgcgctctgttgctgcttaacgaggtcggcgaaggagagagaggcagggtcgtccagggactgaggcggtctcatcttcgtttgatgttctcttcccctcctgccttcgttctgtgcatctgcgtctctctctaggcctgtttcttccctaagagagttgccgcggcgaattgtcaatacgcacagggcgacgagaaaaaacttcttcgttgaacgaagagacctggcgctcggtgacggcgcagaaacaagcagggcaggaagaggggaagacgcggcagagggcaaccaagaaaggcggacaagcgagacagcctcgtctctcgctgttctgcgagatacgaaaaaaaagatggagaaggagacgcgaggaaaaagaggcgaggagagaagaaacgaggcggggagaagagaagagaagtacacgaagaaaggagaaaagaagagggaacgagaggagaagaagagaaaataagaagagaagaaaaacgacgacgacttcagctgtttttctctgggtcttgccggagagaggagagacacgcctaaggtcgtctcccgttttctcgtcgtttttcctcctctctctgttcgattgtggacctagtctctcctcacacactgttcatcttgaaaccggttccagaaattcttctgctgttcttctctcggcgtcggtttcccctttttttctgtcgcctctccgtcgtgcgtttctcctcttttctctccgccgttccactggcagaagggtcggtgcagaaagaagccgccaacgaaaaactttttttctttttccgtttttgtctttttcaccactcacgccgagcctccacactcgcggcggccggtcgcgttgcccagacactgtcgccggggaaaaacttcgcgggaggcgttccttggcgtttggctttacgacgaggaagaaagaggaaaacgaacgtggagagggagaaaacgaggaaaaggcgcgacaaaaaagaagacaagaaaggcggcgcggcctcacgccagttccgagaaaaaacgcgcgtagagcacacagcgaggtcggggatcgaagcgagagaggccgcttttttgcacaccgtgaaggcgcgaagaggctgtcgcaattgagcgccagggaaagtcgacaagaatggacgagcaacgggtgaaagaccgcgaagtgtaagtctttcaaaaccagcgaggaaaacgatgctgttttcgtcgagcgatgagaggcagacgaccccaaaggcagtgagagaagagagaggagagagagaacaagacacgcagaaccaggttgtcgtcttttgagtgcggttgaggcgcaggaagttgcgcatccctctctcttcttttttctttcgcttcttctctcttcgttgctcttctgcttctcttgggtgtcattgaaacgtccttcctcaacgcacacgcaagctcccttgtacttttctacgagttgatcattgtgacggatgcgaaaaccgtcgctggggactcgacggaggactcacgacttccacgcgaagtgcgcatcctttctccctgactacctacgagctccgaagcgaagagcgccttcctggaaacaagactttttttatcctgaggcgaggaggagacagcggagcgttcgccggcgtccaacacccagctagcgatccttttctcgcctccccgagtacgcgaacctggcgcctcgaagcagagactcaaccctgacgttcttcaactcttcaaga

SEQ ID NO: 1667 - DNA, 1403 bp, Toxoplasma gondii
  source 1..1403: mol_type = genomic DNA
gttttcacgctatctcttgtgcctgtccagtcgctcagggaagatttgatcttttttatggtataatggatgtgccaaaattaaaagatgaatttagatttaaagcacaccgataaaagacaaggtgtgcccggaagagactccgtagaagagcttgcgttcgacagcctttgatccattttaggctcaccctacaacggtcacatcgcggcctcttgaggaggcggggccacactggctggcggcaaagaagcggtcactcttaaagtgcagacttcagaaaagggtaaagttggcttctgaacgacggacggttttccgtatccacgctctagccccgaaggaccccgatagcgttgtccttcgcacagccggaaagcgcgaggcgtccaacaacagagctgtatctgattgtcacaaagacttctgaacaacggatcagaggggaaaccgcagccttctatgcggctatcaggtatgctacactgaaaaacctgaacagccttcaagactgccccattggccgtcgtactccgccggcgaaaatgtcacggctgcttgtccgagatcctctctgtgtctcgtctcgcctgtttttcggaattctggtacttgccacgcaccaccatttgttttctcgacctaccatgaactcatcaagtagacgacaaccagtggaaccatgttgacttgtgacttgttccgtgttccttctggtcagccgttaagtcaacgcaatgtcgtcttttcgcggacagcgaagtaggtcagtagacgcctcttgttgaatgcctttcccgtcttttaccctcgtgttccgtagtccgactgaattgacttccttgtttctggaagggtttctgtaatcgcatctgtctacccaaatgaccctctgcttcgcgagcttgcagaatgctctagaaaactgcgtctgagacggctcagaggcggcgctcgatgggggctgttcaccgtctgagtccagcacaacgacaaaagcctttcgtttgtttttaggacagtctcccacgtttttctctgcgtctccaactgcgatttttcgccgacgagtccacggttcccgtgcctcaagtagcgtctcgcaccgagacactgttcgagcgacagcggctcccatccctttccgcgctagcttcccatgcttccgtgccactgtctggcttttcttgttcacacgggaaaataagttcaagagcagtcttcgctgacgcagacatttcctggactccgaaacgaacaccctcgtctgcgaaacaatatctactttcaatggtctggccatgaccttccgtgcttcacgccggcgttgtccggaaaatgtggtaacttcttttggacgttttccccctgcgtctagttgtcccactccaaatcactcaaaa

SEQ ID NO: 1668 - DNA, 4978 bp, Toxoplasma gondii
  source 1..4978: mol_type = genomic DNA
agagaaaacattcacccgttaccaaaaataatcctccgcgttcctgtcacagccggaagaaagcaaacggatgattgcgcgcttccgagccgatgcctcgtgcgagcctgacatgctgggtacatggatcgacagcgcagtcacaacagtgcgtttcatgcgcaagatgctggatgcggtgccgtcgcttgtacgggagcaatgcccaccggcactactcacagtagaagcttgtcaccgtattacctataccatctacggcgaaatgtgcagcgctctcgtgtagaatatgcccccgcaacaacgtcctgttcacgtgtacgaactgctcccatacgcgaccagagagtggcagggtccacaaaaaaggcgtgagccgtctccacctacagtcacgctctaaaaacaatactggggaagtgtgttttggactgcagttctcagtggcgcaaaaatcttaattctagagttcaccgcatgcgcatgtcctacctctccaacagggacagaaacgtcgtcttcttgcgcctcggccttgatcagcggctcgtgtacctgcgactgcagacagaatgtttcgcaaaacaccgcaagagttttcccgctgaatgagtggatcttgtttacgctgtcaggatattgtattcctgccgcatctgtaaaacggcgatattccggcacggagtgagtacacacatctaccaggcagagcataacaagtaagtattgccccaacaattcccacaatgctgaggaattttttcgacacacacattaccgaccgtcgcaatacgtcagcattcggttctgaaacccacccaccttccgcttggagaggccaacttcttcgtggggcatcgcgggagcgctgtctgcagctgtcgccaaatccagggaaactccaccctgattggcgttagatcctacggcagactcaacgggtgttgcacaagcagcacctgcgccgtttgctgtcagagtcgacatcctggaacagccagctttgacgaagggcgaagcacgagggcaacggtctctccagtaaagcagcctggtggtccgaagtggtattttgtttgcctctcgttcctcgcaaagttcacttctgcgaaacagggtttcgttgaagtaggcttgacaacgctacgagggggaaaagaatgccattcaccctcggagagccgaccggattcagagacaaggagctacgcgatcgaggtacccgccttcaaagtcgccggttttcacgtgcacttttgactgtctccctcgtcagaaatactcagaacgccacatccgtggaaacccattgaaattttccgacactggccaacagaccgtctaggtggtcagacaccgtgcgaaaagtgtcgagaaagagcccttccactgcatgcttgcgaaacgtctaatgctggtggcggctgggagtcccgcgcgaatagttctggcacatcacaaaaaattcttacggattcctgatttgcaagtgaacatgggggggcttgtcgacttacgtagtccacgcctacctgtgtggggcgcatctcgaaaatctgaacttcttgttttcatctagcttcgtgggaaggaacagtactcggtgctccgcccgtgccggacacagccttccaactacattcgggcggagcagccgtgtgctaataattccagccgacgggacggagagagtaactatgcggctccatcatctaagcgaaactgcattctcaccaaaaatcaaagggtatggcgaggaactgtcgtggaaacacgactggataatttttcagtgagtacctcttagtgccacagtacccctgtaagtctcttcgcttcaggggggtgacctctaggacgcatcgtggctaccgtcaagaagcatacactttgaataccctccaacccgcagaaatccctcttttgttccaggtttattgggtttatagttgttatttgtagtattaacagtggcagaaagctactacctgacgcggctacgatcacgaatgtaggacaaaaagtcgacgtattgcgacaccagacccagaggagcctacaagctgccacgatggtggtcgcacatcttgacaatcgctatgcttctgcagcccccaaactgcatatttctcagacggaaagaagaaaccgcatgaacttgtgatcgctgacgctgagcacttcatccacttgctgtccacgatataattatctatctcgtgttcggtgtagtgccccgtttccatatatatcacacgtctcttgtagctttgagatcatgctaacggcgataagggaagtgagcaagaggtgacggatccctgttctctggagagttagtgtggtcttaaccctgcaatccagtggatcgtgcatatgagtgttcccgtgattccccaacataccgttatattctttcgtgtgcacctctgtataaggtactttttgcctcttatgctaccagcagcaacaactgggcagacctgcgaagacgctgtccttctgccagaccaagcacttcatacgtaacgtttttcttcaaagccgtgacgccacagcgataggggagagggaagagtatttgatgcatggaacctgcttcacgaagatgacgtgtagcattagagggcaagcgccattttatccattcgtgatccgagttcaactgccaagtagacctgtaacaccagtctccgtgtacgacacggagggcgagctgcaactccctccaggacgactgcatcggcgaaaagcgccagtagagatgtatgaatgtgtgtttcaactgaatacaatctaatacgttgaaatcgacgctgcttcttgaaacttaacgccatgttggggacctcggaggttcttttctgcagcttggctttgctggggaagggtgcggcgcaatagcgtactaccacgttttatcttgcgttgtgtagcagctggaatcctttccagttgcgtagctggttttgactccgagcaaatagcttctaggcacagaaaactcctcggtggtgacaattctggactgggattcacgcagcttcggcgggagcagtatcgaacaaacatccccttttacataccacctctgcagagaagaatctgaaaactccggagtggcgtaccccttcggattcattagtatttctacagtcttggatcatcgaggctgatggcacttggtgagagacgcttcaacaagcgtccctctctgacgacccaactactgtttctcccctcgtgtttcctcataccgaatctgcaaaatgagaactcggcatttggctcaacgctccgtgatatcttgagcatgaactcagcctatctgtcgaatcataacacagctgccaaaagcagcatatgggaacagacagcagcgccaaagcatacctggcgctatcgcctccaaagagcacgaagcccgtcaaacaggtaaagcgcaacaagactccgttcgtttgattctgcgcagtgagctaaatagatacgagaagcttgacaaggacgaacgatcataaaggtacttccacccaaaaccggtgatttgtcagtacacatgtcttcccttaatagtctcggattttcatctgagccaatgaagctaacacaggagcgcttggatccgttgatcacagaccttcaaaatatgaaccagtggtccaactcatgacacttcattcgccacaaaaagcagagtcgtaactctctgtctctgcacggctgaaacgatccaatgtgacctttggaaaaaccgcaatgatttcaggacctccagggcggtagtgtcgcgctgccgcaacatgtgccgcccccgtgtaaatcaagaacaagacactatattgatgatgtaagcaagacttcccgacttctattttatgataatcctcttcacaggacattttcgtgttgccttctgcgctaaactgttctagcagtacgggcggcagtgccacacacaatggtgactgtaggtctgtgaaaaagtattccaaaaaagtacccgtattacaggctgctttttctcaatcaaaggaatatgaacggcaccatatagcatcgtttttttgcgcctggaagacaaaggaacaaaacgctgctttccgtcactgcggcggacctgttgcgacaagcacggcattcagctgcagtggaagttgatcctgaaactaactttttcgcgcaagaaaaatttggagctcacgtgaaacttccaagtttcagtggacacaaatgacgactagcccagacagaaggaccagcaagcatcttctgcatggacttgtctttccttcagtcacaaacgaatatgccagacacagcatggcaacacctccgctgtgcccggttttcccctgcctgcttgcttctgttttaaccgcggactcaatcgaactcgtgcatgttctagtgggacgactgtcgaccttccaatgaataaaggttgaacaactattactttgtgtgaggagagaacctcttctgaagttctggcacctgcttttgtctctgcgatccttattcagcgcaaatgacctacttctgaacacacagttcggggtgggtgtcttcacctcactcgcaagagaatgtcgcgtcggctgcaaaactacgggaatgtggcttacaataaacgtcgcgaatctgtcgccgtttcccccctcgaatcgcccggtttcttttttgcaggctgaaggaggggcaccatttttcaagctgtcaagggatagcccacgttccttcgccctcaagaactcagcttatacaagggattttttttaccagtctcttcgttctcgttagctttctgcttcgacgaaatcgcggactgaggtgtgtgaagggacctacacgtaggccgcctctgtgttcgtaaaagaaaattaaagctcaagatgtctggttcattctccaccttcttccgttgggctccatgacatcaatgtgtcacgtcctgccggcgagaccgctgctacaa

SEQ ID NO: 1669 - DNA, 1780 bp, Toxoplasma gondii
  source 1..1780: mol_type = genomic DNA
acggtagaattaaggtaaccgatcgtagtcactattgtcgctcaattcagtgttgatggctgtgagtttgtttccgcagccgtgaacgtttccttcctgccaactgtctgccatttctcatatgctgctggagcgagttgttccgtggcaggaaggatggtgtactacgctaaacggcgaaaccctgctacatactgtcttgcttggttcactcttcattctttcgtatgcttgcacttttccttctttggagcaaattgtgacggtgattcttgcgatgccacgttgagcaaatgatggtgttaaatcactcagctggttcaaactgcctatactcgtgagactcttcgacgctgatcccgaccagttcttctctggagtagcaacattttaccgtcattcatgcgggggctgtcgatcgccatatgagaaaaaagtgcccgtcttccctaccacgataaaaggaggtacagctacgagagaaaagcgcaacgttgcggagaattgagcccccgtaacgcctgagatgtcggtgctgcgaactcgttatctgctactctggccaatcctggtcttcctttttgcagaagcagattctcttggtgttgcctgttttgcaacgggactgatttagtagtgtttcttctgtggctgcaattcttcacggcataaaggtctttcctgtaagtgcccagagacgaggtacgcagagcggaggtcgggcgcttcccaaagtccaggcgccagccgagaaaaaacatctttgttacgtacagaccgctccatttttgtcacgaagtgactcgttactctcgtcacactggcctaaaaacaatgtagacttggcgagaaatacagctgagtggatcactgctcctcggcaggtagtccgaaaccaactcgaggggattgactgccgaagacccttcgtatataggggagaatgtgcgacgaacaaggggattaagagtttgcattcatctcaggagatcacatggaagcgtcaagtgtgctatggcctacctcagacaacgtctatttaccatgttcctatatttgaactggcggattgcggttcacgggttttatggatagtagctgcggacaagagcgcttgaaatggtgcacggaaacacgcatctggatcgtcttccaccaacaactgtgttacccgcagagttgtaccaaagaaggcagtaagccagacacagccccgcggaaagcatcagcggatcgtgaagaagcgagtcagctggcctcgctgcatgcgcggaagatcgccttcgcaggcaaacttgtggggtcaaaatggtgtgaaagatgctgccctttaccgatgagaaataccgtttgccgaggtgctaaggcgcttcaaggatacatgtaaagtcagactggattcggttttccttctttttccctctgttcgtttatcgtggatcacgcccgctgttccacacgctttaacatgacatgttgctccttcgacgggacgaacagggggaacacgatacagtgcagtgcacggttgtgtcgctgaaagcaaattttcgtgaacgtttcacaactgcagccgtctgttgagcgcaaacgcggtctccaacccggacggcaaaactcaggactctcgaaaacactcatttggatgagagtcaactttgcgactcggctgtcttcaccagctgtcgattgtggccagtctctctttcggtgttggcagctcctctcctgcggagttcttctttcttgagacgggttttctctgataaaaaggctaaaa

SEQ ID NO: 1670 - DNA, 3778 bp, Toxoplasma gondii
  source 1..3778: mol_type = genomic DNA
ccatggcggatctcaagagcagaggcatttctgtcgtatgccatgccggaacccaagtggttcgtcatctgtccagggaaccaccggagtggatgcacgtgcgtcgcctgcaggctctcccgttttcgctggacaggtccctgctcaggtgaaacaggaaggtggggaatgtgggcaaggctatgcaggaatcgccgccacagaagatggtctcgttgatcacgggaattctcagacagaccgcagtgcagggcaacactgcatgctaaacgcttcgggaggttcggagcgagctcacgcagccgcaaacacttcgacatgtccccaaaggaaggaatccgacccgcagccaactgtatcttgggctgccgttccctgccagtgattgaaagcgttttgttcggagtccgaacccacaagtgctcgtaacaccactcgtttctctttgtttacatgcgggaagccatgaacagacggggtcatgacatcaaggtcagcaagaccccaaccattcagtagcttcagaagtcagaactgtcaagccagtacttaatgcacaacactattgatgagttgcccttgcaggtttgtcaatgcaacgggtctttgtctccgcggacgcgttttctggggaacagcgagaaaaaggcaaagtgttttgtatcgttgaagagccgcacatgctatgggacctctgaaggcgactaggttgtttcctagtggtacaagagccgtccgtgctggcatgtgtcggggaaatccgagtctgctcggtgtcgcatttttacggatcatcctcattgtctgatggggtgcagcttgtttgggtgtgtgtctcgtgcgggcgtcgctgaggctagggtaaactctcaacgctttagttctggacgacagttacacaaaacggaagatgctggttttcgtcttttttgccaagcaccgtgccgctcatggaacacccaggcatgttttgcggtgccgttcctcacagatgtgaggagcggctactcgcgagtgttgccgcaccggagattctgtgggaaaacaaactcttgtactatgaatcagatttccgcgcgtcactgatatgtacatggatttacagtattccaaagaacacctgattcgtctctagcccgtccaaggtaattcgggagtttcgtaccgtaagttcatttttggcttctggggtctgtaaggcttatcggacgaggagttgtgcttcactggtcaattctcgagccctccaaaaagtagcaaggctcacattttctccaaacgcacttcttgtccaaagacaacaaagagtgggaagcaaaacagaagatgctggctttcgaaatatcggcgccgaaaatccctcgcactttgacaactccggatcaggacttgtttcctaaagacagcagacgtgctttttgcttccagtttagcgtgcggaacagactacaatagttttggttatgtgagtccacattaaacacgctgtagcaagtgttttcgcgtgggatgcgtcaggcggctgaaattttgtgtctgtagtgtgcactaagaaaacatacgggatgcatgccgtttttagtggcaaattcggtcagtgaaggtaaacactcagaagagtatgtcaatagctacagccgagcgaatgagtcgtgttttttagggtagctgggctgtcacaacgagaatagtcgaaggttcgtatctgaggaggctacaaatcatttactgaacagagcggcagtttgaaatacattagacggtttgcgtcgactgcagggggaaaggccaagcgcttcttttggagcgcggatcatcgttttagtgttgcgatagcgtcgccagtctttccaattttcttttctcagcatcgtacagttactctcacttcgcgttctagctgaagatcttcctgactctactcgacagcagcagttggcgaagcgtatgagagattgttgcatggttcgacacatttactggaaaagtgatgtgtgccaaaccaccatcagtgtcttcatgagatggtggaacatactgtcccctcggctatccctatcgtcctcaaagacacaaaatcaacctaacatcttggtttgcttaaggtagcgtgctgtttttgcaattgagtctagcaagcaccccgtgttgcactaatatctcctcgcgtttttgtcgctctgtacgaatatgcacgcgatcgccttatctgtaaaaacgataacgggacctttcacgatgtaagcttgacgtttttcatccagtgctgtaaggcaaggagcggaactatctgcaaatgatccaaacctttacgtgcagaaaggtcagctgaaattcactatcataacggaattctggacagcatgctgccattcaactgcgtgatgaagtcttacaacacatttatcgtcgcatcttttcagcggaccgacggacgccggcgcatttacactcttctatttctgattcttctcgagacactttgtgaagttttctcgcccaaatgcggagcttacgaacatgcgcgcgcaaaacaaaaaacttctagcaaggacagtccagataaatctggaaggaaagggggccttgtagaaggtttagatagtgaggcgctctgtcaaatcactggcggtaccattaatgttctggtgagcaaacaaccgacaaccgacctaaaggcagcggaacgatgcttttagcgccgacggccccacaggtccatccgccgggaaagtggtgtattttcccttgaggacaaaaacgacgaaagtactttcaacagaagtgctttcttgtgatgcggagtctagtgaaccaaccaagaaactgagaaaggaagaaaagcctgaaggtgaggcatgagttggcgaggatagcctatcgttggggttttgttgcacgtcaacgaactcggtgactgttctgccatgtaaagcggacgggctgatccggatatgtgagacactcgctgttccttccttgagtctttgtgcatgcattgtttccccatttcttccttcacagcagagacacagatccgccgatctgaaacagacggcaaatacgttcgactttcatcccctagtctagagactctatcgactcttgtcacgcttccggctttcttcgttgtcgaccccttcgcattatcagaaaacacatgtttgtctccttggtaaaaacttgatgatgttttcagggggaatgcagtggcacagtgaacggaactgttttgtcttaataatctctaagcaggaggcttccgctctggcggcatgtcaccgcaagtgttatccctgttttgacaaaatattagcacctccattcttctatcgcaaacgtttctgacatatctcagttgttggaagtgcaacctctaagggtcagcgctcacaactggcgtctggtcagaaccctcgagttttccagacgaagcattgcgttgcaagtcctccactcgacactgggatgccgaacacgatagtcgttttccttacctctcctccttaggcttcccgaaagagctgtggacagagaggcagtgcccatcccagtttgttttctgtcggcctgcattcgatgccagtttagtaagagctgggtggtctgacggctttcccgcttccgtgtcgagcaagtcacgtcgtttgcctgaggtaagctgcatctctcgcaaattacctcacgtttctagcggtggcaatgtcgagttcagcccatcacggagtcggtgggttcagtccaccgtccggcctcggtggcagtggcagcaacgcga

SEQ ID NO: 1671 - DNA, 1834 bp, Toxoplasma gondii
  source 1..1834: mol_type = genomic DNA
agtaaaacggagcaccgattttccagaaccgaatatgtccgtttccagcttccagacacctcgttgcgaggaccgcctctccgttctctctgagccgatttgtgtcggtgcctggtgcgtctgtgtctcctgaggcgcagaatccattcgccttcgcaccgacgaagagaggggagagacggtgccgtgtctcctgaccgacgatcgtttcgaggaaacgaggaaaccagacgagaaggggaaagtgcaacatctgtgacggggaacccacctctccccacacagtggctttctccgagggagagacaccgtcgccactcctcgcgtcgccatcggcgcagcggcgaggaggagaaatggtaaatctgccaaggaaaaaactgcagtcacgaggcgaagaaaacatgagacttgaaaagagtgacaaagggacagctctgaggagcagaagcaaacaaaggagttgaggaaaaaaagaaaggcaaagatttgcgaagacgctgtgtggaggaacgagaggcgacagagagaaaccgcctcgtcgttcctcctcagttctcagtctgccagtgcatgtgtcgctccacaccaccgacagaggcagaaaaaaagaagtcaacgaaaagagaggaaagaggacacagagaactcaggaacgaagaagaagagacgaaggaaaagagaagaagtcatttcaggctcggtgagtgtcgcttttcaggacggaggcgcgtccgggcgaagcgaaggaaaggacctgagaagaagacaaccgaatcaaagcgcgaaacgtggagaagaagaccaagaagcgacgatgcgcgtacgaggcggttcgagcgccttcaaggctggcttgtctcggcgtcgagagcaacgagccgcggcgcaacaccctgagcatgcaggccggggagattctgcctctccagctgcgagaagagcttagcgacaggaaggaaccgcgacaagagaaagaagaagccaatcccagctctccctcttcatcgcaccgttcactctgaagacggggctcaaaaacaagccatcgacgagtcgttttgtctcctggggagaatggagcaactcggggagggaacggcagcagaaggtgagatcttcaaaaaggtgagggtaaaagagctcgaaaaagagttcgcagaaacgttccgttgacgaagttcttcacacgtccagccccgctctggtcatcgacgctgaaggctgagcagagaggctgtcacgctcgcgacttttctctgtgcagagatgctgtttgtttgcgcttgttctctagtttttctgtgaaaaactcggcgaaagcagaaagcgtcgccgagcaaccttcaccccagagaaaggcatgtgtctcctgtcgcagggcggcggggcgagagaagaatcagagcgcaagaaaggagaacgcagtttcgtcggaagcgaacggtgcctcccttttccttgcaggctgagaatctccagagagcgattgtgtgcttttgccggcggatgggcctcgggtctccagaggggagacaaagacggagggacgaaaggcaacacgacggggacaatgcatccgtggggagaaagaaagaaaagaaggaaacgagaagataaggagagaccgagacggctaggaaagcgacttcgtttttccccttcgtagatgctcccgttcgccgcgatcttctcgtcctttgtctttcgtcttccccctctttctcggctccgattgtccacagccacgtagtgtcctctctgttttcttgccgcaaaggctgcgtgtgccgatagggcgtcagttttttgtttccttctccctgtcgcaaca

SEQ ID NO: 1672 - DNA, 2011 bp, Toxoplasma gondii
  source 1..2011: mol_type = genomic DNA
catgcagtgcgataaacaggcgaccatatgtagggtaaatgtgtggacacgagacataatcgctcaggggttggtagcttcgtggggtactgtcgtggactcagacagagtctgggagtggtggcaggcaagaagccagtagttccccatgaaaagcgcaggcttgtttctttttccgggtgccagcaccccgctagattgactttatcgcggacacaaatgccgcttgtggtgccgtgtctggttgcgaatgggaattgagagtcaggaaaaatagctttgtaacacattctacgcccacacaaaaagatgtcgagttgtaacgttgtgacagaagagcctgcagtaatctatagagatctcgataaggatctcgcccatatcacccagtagaaaaaaagtgcgtctttcaatggtcctagatatgccattttgtacaaaagcatccaaatgcagagtcaatagatccagatcaacttcgtttcggtgacagaaatcacgcttgacatcagattagatctctccgccattgactttgcagcggctcagtggtaaaaacgtgtagggctggtgtatatttccccataaatcatgggctaggacgttctctccacgtccaaagcacatatctcagaggcagccataccacctgcacggcaatgaggaattcccgctcctacggtgcaggtcagtcgaaggacagaaatcgatctcagtgaattgcgctgcgttccgtaatgttgggagtgactggcgttttgagcccgatctgtccgctggctgcctcaatattttttcgtacggccgtaaatagacctccccgaccggggaagctgccgacatctaaatgtgccggggtgaacaggcagacagaagtgtggtcacgacactacacgtccaccgtcccctaatcttctgctttgtcttctccaatagtgtaaaaccagacgcactgacatgctccacggcatgttgagattccaacgacagtcccccacatttgccgtgggtgatcgggaacgctttgacaagttgtggcgctatcggttgatgcagacgagtcttggacgcaacagcgactctctttggaccggatcagataggtctccggctgtgaaaaggtgtttcaccgttgtcaagaaaggaaacagccttcaagtcctggctctcattctctcacgccatctcacctccgcgtcagcgccacggaaactttcttcctgcatcttagtcattgatagtccccaaaatcgagggagtgtttgtagtatctgtcgcgataatcagaagagacacgttgcctttctttgtgcgacaactggttccttctgtgcgcaaagagcggcatttttgacatgcaacgcatgcatgcagcgaagaatgcgcaaaccggttgacagaatcgattcctgtttgcccacaagtcttccgcctaatcgcgtccacgcttcacagcaactaggagggattttccgatgtggaaaacatgcacggtttccgacttgttagtacatgaggagctccaagtccaacaaaatcccactactcgcgctctgtggctgtcttgctgtgattactggggacggagcacgacacttcgattttccccgctgcaactcgtaactctttcgggctctaccatcttcttcttatgcgtatttacataaaagaggcctggaaactcatatctgagaaacgaaagttcccgttttccttgttttcttgtctgtgactgcttcttgttagcagtgaaggacttggctttgcagcctgcttgagttattcgctgccgcgccacacgcagccttcccaacatttggagagcaggcgctcccgatttggaactgaatcggggtagcgttgctcgataagtctgggccgtccaccttttagtattcctttgcgtttccgtcatcttctgtgtctccctgctgccttttttgacggctcgctgcccgcctgctccgtcagtttctctcgcactccgacgagaaagaaagtcacacggaga

SEQ ID NO: 1673 - DNA, 2211 bp, Toxoplasma gondii
  source 1..2211: mol_type = genomic DNA
cgcatatctccattcgacgatgtgggaaatcgggacgactcaagagagagtggaggtctgtgttttcgagagagcgaatcaggcgaagaggaggcctgctccactctggacttgttcctgacaggggaacgagacagagaacggggagagcgcgaagtggatgactccgaagacgaagaagagcgcctccggtggcgccgcttggtctttttgcgtttctcctcgtgacggcgcctcttgtctttgcggtccctcttcttcgacttcatttccgcaagactcctgcgtacagcctgtcagttgcagcctcacgcgagacgcaaaacagcagaggagggagggaggaagacacaaacagcaaccttcttgactctaaaactcctctccccgcggcggcacggcgctttcaacaccctcggcgcggcgagtgcagcaaacactttggcgaacggacgaaggaaaaatcgcacgatcaagtgtcctccaggaatttcacaagcggaagccggtgagcggtgacgaggcagcgctccacgtccgaacaaaagaaaacgcagatcttcacatttgtgaacaagtgaagagatccctgaaaacgaggtcaaggcgttgtctgctggcgcgtatctgaaaaagactgccggatgtgtcccggaagaagcggggacacaagcaaccgctgtcggtgttcatgtggacgaaattcaaaccaggggaatttcgaaccaggcgtagccaaaggtatttttaagccttcggagcacttccatgctgctcgtgtcaccgtgctgactggagttccgcgacgtcgaggtgagacctcgttttctgtgcgcaactgtctgccgaaacgggatcgaaacacgccgacccttctgctttgttttccgccgccagacacaggctcgcttctcgaacgggagcaaatattcaaaagcgcatgaatgtgccaacttcaggtatatagatgcgcgaagatctaagacagtttaacgttggcaatggaactgcccactcacgaagtcactaaccacggaaatctgccggattttctgccactctaacaaaaaaaatgcacacgcttcggaggagacttggtcgctctggcagaaccgccgcgctttcgctcaccagaccattccctggaggccctcagctgccgtttgtttctgcggtttttgggcgaagccagctacccgttcacacatgggaaacgatgaagctattggagtgtttagacactcggaaagactctttgtttcgcgtctcgctggcgctcgcgagtccttctgtgtaacacatgtgtggcttcggacctggctacgcttgtggctgttattccaaaccctaaagggaagagaacgaaggatacagccttgcttcgccaggattcgaggaaacactgacccatcttcacgtattgtgtgctgacctccttttgtcgtggctagggtggatccgcgggctgagattgccacacgtgtagcggacgaaacgcaaatcgcgttgtcgagagcccaggcagctggttcccgttggctttcgaaacggacgcacacgcagaggctttatagcagaacgcaggaacggagcaatttctcgtggagactcaaaccgttccgatgaactgtcgaggagcgcgtccccgacttttgttgcagccgtcacagcagctgtggtgtcgcatccttttttggcggctctcgagctcgacgctgcttcaggaagacactcgctgagaaaaaaagcatgcgctgcgccagggcgtctcgcggtatagagagaagaagcggggtcgtggggcggaaaaggcgcgtgcgaatggcatgtgagcatgtgcaaccgtcgccaggcgccaggccacacgggattggagagtgcggggggcgacaaagggttcccagcgagaccaaaatttctcggtcgagatccccggcccttcgcgtctttcgctatttttcctgagttttcgtgagggtcgtgactctcggcgtccttcgcgcatctgcaaatcgccagctgcgttccgtgacagttgtggagagcgcctttcgcgccgtcgcgggtgtctcaactttcgccagtcaactctgcagctcgtccccgaaccctcttggtttgttcacctttggcgcggcccttcttctctttcgcggcacggcttcgctctttcttcttgtccgttcggaggacttttcacactcgtcaaaa

SEQ ID NO: 1674 - DNA, 4952 bp, Toxoplasma gondii
  source 1..4952: mol_type = genomic DNA
cacagtggatgctagcgccaacgcgatcaaggaagtaagcaagtaggaagccggccttcggtcagcatgagcgaagatgctgcagagagtcaagaaaagtgccacgaccccggcaggtgcattatcaaagacgaagcttgtcagggcaaagaccgcctgcatgcctatgagtccagcaagcacctctctcacgagccgaactctccagatgcgccgatcgatatcctgaaggcgcaaccactccgcctcatttttcgttttctctccggtgaggtcactaacagggatccacgtgctggcatgcgccagacgatgctcagcacctctgtctgctggagtggcgaatgacggccttaacaaggggctcaactgttgggactcgggatcggccggggcagcttccaggatgccggaagaagccacaggttgctcggagttgtttgaaaggtcttgcatcaagtggtgctgtgatgggaaactgccagagctccggccactctcgtgccggggagctggaaagagcgattgacttacgtgggaggttgaaccagatacacagcgattagcctcaatggcgctgctgcaccggctatctgcttcagagcctcgcgcgctgattccagtttgctgttctgtagtaggctggcgggaatcctcttgtcttacacagctgctcgttgagtagactagggaatcggacgatatcgtacatgagaggaatcctggtcgcgggtggatacctgatgagttgtcgcggatttcgtccccgcctaagaaaacgccagagctttttttgtcgttttctgatgaggtctcgtggatttcgtccgcccctgggaagatggcggcgtcttttctgtcgacatcgtccttcccagcactaaaaatcgcgtcgccacgagattcagaagaggggatctgtgcatcgggaaacggatctggaacagcggatcgatcagatacgattctctccgctgacaatgagccttcagacaggtagacaaggttcccctgaccatcaccggtatccttccgtaccacgttggatccagaggtcggagctagaagcccaggaacattcgtttctgggcggtctgcaggatgaaggaaaatcgattccttctcacgagcagagtactcttcctctcctttgccatccatgacagcaacaacagaagaacgggccagggaccgcgggaaccccgactcagcactcaaatgataaatcagaatgtgggatttaaacttgttccacttggtgacggctgagcaaaaaccatgcacgtacctttctgaaaagatgaatactggccgaaataagaggaaaacaacggcagcgagtaggcaggtctctatgcgggttctgtcaatagtacgtgagtccctctattttctgagtctccatgtctacttttcgccagcagtatttgctagttgcataaacaccgttgccatacagaaaaaagggagatccttccacgaaaacggatctcttccacctgcagcttgagccccgcaatgtgcctgttgcaagacactctcggcccttaaccatcgtcattttccccgcctctcgagtgtcggcagctagccggaagttacctaccgtccaagacgttgccttccgaagggaggaacaatatctgaccagagccgcacaaaattctcatgatgaacggaattgtttttcgctggtatgacatttaaaattgagattgcagtaagacaagtcgtggggcagtttggtaagagacttggtgtactatatcgtgcatacccggtactcgttgacccctagcagcaccgacgtccaccgtgaacaagaagcacgtccacggaaaaaaaggttcagaatcgggcttaccaacacgccatcctttgtctaaaccttacaacatgatatgtcagactcaaccaaggctggaacaacgcagccttgcggcttagctgtcaactacttggtgaagtgttgctacaccaaagtcagggttatgtgcaacaggactgttgaccgttaacgatgaggcctctcctgcgtcgaaacacacgatgaatcattcacgcatccttcaccagttccgtgagacgtatttatgcatgaccaaagcgtcatcctcaaccctcggtcgtccaattttgctccagagcggatgagggagtatgagatacgagctggaggggcgtctgcaaacgctcgcgtctctcgccttgccagggataaagaatatccagggcattctgcgtcactaccgtctacacttcaccgagaaagaagatgtctgttctgtgtttaaagtctagtgtcgtctgtcacctgcgtccacttgctgcctaacaggaagtgaacccccgaaagaccggtgtttgtcattgggggaagacgggggcagatataccagaatggcaattttgatgggaaagaagtccatcctctcactgtcgggcccacatcctggggcacgtggacagccagaaagcaacttcctgacggtcttgcagtggaaagtacgggaaccatcttaaaataaccgggatggtttctcttggcatttccagcagcgatcgcgttcggtccgggtctgccaagatccgcaactgctggtagaatcggctgaatatgtcgattgtgaccgcgcttaaacagcttagaagtgccacagacagtttctgcaacctatatatatgcatgcatatatatatatatatatatatatatacatacacatggaaagaaagaaagaaccagctcttcctcacatgtacgttcatcgggggtcgatgctcgtgaaggcagggggagttggatgcaaagtaaaccgaaagcggagagtatgcttttcatattgatgagattgaaaccctgtttttcgtttgagagcttcatttccgcgaacttggtgtcggaggatcactgaacacctgacttcacctcggcattgttgtgagaagtcaactcctcacaaccgaccttcaatggccgcttactgtcctcctatcacattgttctaaatgaatgcgcccttcaaagtaacaaaaaaggacaacagcaaaaagtttatgagcttttgttgtgtcacctcttcaggcacaccgagagtcatgagccttagccacacgctggtgccttgttcgtagcctggtactgtgattcaagttaacgtgagttgtgtgtaggcatttgcacggccagaaacgcgaaatatctgagattgcccctcgcgcgaaagcaggcagttcattgactcgtgacacaataagggcatgagcctccatttaactcttctcatgggcatccaggtgaaggaatacaaaccaggagagaagataagacccctcatgctgtatctggtaccagtattaatcgaatagcggcagcagcgtcaagcactacttataagcgtcgtatatcgaacacggcagccgcttgcagtgagtcaggtgacgcgcatgggtaacggcgtgcgcgaggtctatcccgcttgtttgaccttttgaaagaccaagaatccacttccgcccttttgcggattacctaacaagctggccgtttcccaggaccgtaccactaggaccttccgagagtggtagaacatccgggctaacaagcctcgctgctactgttacgaaggattcgaattgcaacatgctttccagagacttgcttctaatggcccattcagctcgaccagcgttaagtcaggagctccagaaacgtcttctatatgcccccaattctggatgctgttgatgcggtacagaaacaagcttgccgcgaacagacatacctaaaaaatcccttctcctaaccccagactctggctgatgctgggttacaaagaaattgaaaatataataacttgaaatagtcatgtatcaatgatgcattgacgagcaaggatacaggagtcgttgttcgcagctgccagcggacgacactgggtagcgcatcccctgagttggtttgccccacttaaaagagagcccacgtctgataaagaatgaatacccgtggttcatattatcgaaaatggaagtacgatttttgctaagccaagtagtgtaacccaggcaatgcatctactatttccgcgtcacttgactcgtcgaaatgtttcgacagctcgtaccaccgctgcgtgtatcgctgatttcacggattgtacagtaaccgcatcgtgtttttgtgttccctacttaagtgattatttcataccacaacataaactagcctgtacaactgctgaaacccgattttttcgtggcagagcgcgttatgtgacaccaactgcaactccttcgatatgcgcatgcagatgcgcagctctgggttctgtctccctcttcatcatccttcagttcgcctgaatctcgacgagatgttctgcagtttttggggcgctcagaaagcctcccgaatataccaaacccgcataatcagcatggtggcttgaggcaaaagcagatcaagaaaatcggtccgtggatcgcgcatctgtcctgtggaggccccggcttgagcatgcccagtgcctgcgtcgagcacatttcccagcgacccccaaaaccgtccagttcgttcccagtcaaacgaaggagatcgaactctcagcgggtcctgtgaaatagcttggcaggtttctagtctcttcgttcgcgagccattcgtctgcgtgtctgtcgcctgtgacttctgcggcacaacctacacgtggatttcttggaaaaaagtcacttgagttggtgagtgaagacattctgtatcgaaacgaccaccacccgaagcgtacgatgtaaaggcagcccgaaaatcgagtgtgaaaacattttcttcgtccccgcctgcaacgctgaggtgctcggatacctcgttgcggtttgcgcgtttaccgttcgccgtcaccagcaactagtctcacactacggccgaaatataacagacgccttaccgacaa

SEQ ID NO: 1675 - DNA, 1730 bp, Toxoplasma gondii
  source 1..1730: mol_type = genomic DNA
tctcttgtccaaaagcagcggaacgcgctccgttcgttatctgtagaaaaggtcttttcaacatgctgacggggttcggggatgaaccgtgtctgttcaccggaaaaagaaattcgcatgcggccttcgcctgctctgctggtcttcctgatgtagaaaaagcatgtcacagtatttgggcgtgtgttgtacttcttgcgcggccgtatccgccgcttttttcgttttccctgcagacttcccgttcctcccaagttccttcttgcctgtccgtcctcccagttcttcagatgttgcctgatccgtgtcaccttcagcgctgttttcctgcatctctcgctggacatttgagggaagcgtgtactgcggatttccccatttcgtgacggttgacggacggcgaaacttcgtcgacaaatacgtccgcttcgttaccataaaccgcggcagcgaaaaccggactccaccgctgtaccgcgagtgcctacagagaagtgcacagaacagacaagacgaagacggcagactactgaaccgtaaaccctccaccgtgtctcggctgttcgccgcagtgacaactcgcaaattcggatgccgacgcgaaaagcatcgaccactgtcacttcttcgaggccagactccgagaaatatgccgacgcacgtggagaatgaggtgtgaagtgacttgagcataacgctccgtcgttttcataaccccgccagggtgccggtacaaatggatcaacaagtcttcacagatatggatcctgcgtcagttttagattccttcagagctcacatagcctccactcttgtcacgaaacctaccgatatgtccagctcgttcgcactcgatctgcgatgagcagcggggtggaaaggcgaagcgccatgacaaccaggaaacttcgaccctccgagaaacccagcgttcctgctattggtcttcaacttccagccgcaagcacaaggatcgcatgcgttggcttctttgccagttctctctttcgactgttttgttcgaaatagcaaaaaaaaaaactggcgaaagaagcctacgacagccacaaccccttcgtcccaagcagatatgacacaacacacgaagacgggaggtgaaggggtcgagagaaagaatttagggaagacacagaaatacagaaaaagcgcccagcatggatcctgggaagatgtgacatgcacaggagtcaggagagaaaacaatcggcgcctcttttaacagaaattctccccgtcggggttgctttgccagccccgccgcgaacagacctacacgcgaacagaaggtttagcgcaccttagaggcgacagcagccccctggttcttcccacgactcaaaaaaacatataaaaatcgtcagacaaacagaaccggaacgttgtaaagccctcagaaaaggactgagatgtcacctaaagaacagaggcgacatgacaggagagcacattgtgagcatgcgatgctcagtaaaaaaaggcaatcacagaagggattgaatcaaggatctctgtacaaagtcagaggaatctgatacaacaatacaggtgatttgatggtgctcagggtgctacggtgcagccgttttcccgacaacagctccgattccagaaaatacacccagagcatgcaaacacgacgtacactgtcttttggagctcttcaaagttgcagccactccagatctgcgcattctgatccatgaactaaa

SEQ ID NO: 1676 - DNA, 4855 bp, Toxoplasma gondii
  source 1..4855: mol_type = genomic DNA
aggttgttgtctttggtcatcgcacgctcaccttcgtacacctgaatcagcactcctggctggttgtccgcgtacgtggtgaaggtctgagacttcttggtcgggatcgttgtgtttctttcaatcagcttggtcatgacaccaccagctgtctccagaccgagagagagaggcgcaacatccagaagaagcaaatcctgcacctgagagctggtaactcccttcaagatcgctgcctggacagcagcaccgtacgcaacggcctcatcggggttgatcgacctgcacggctcctttccgttgaagaagtcagtgatgagctgctgaatcttggggatacgggtagatccaccaaccaacacaacttcgctgaccgagcgcttgtcaataccagagtccttgaggaccttctcgacgggcaacagggagttgcggaagtagtccatgcaaagctcctcaaagcgcgcacgagagatagacacagagtagtcaatgccctcaaaaagagagtcaatttcgatggttgcctgagtgctgctagagagagttctcttggtgcgctcgcactgggtacgcaggcgacgaagggcacggctgttggtgctgatgtcctttccgcggttcttacgcttgaagtcctggacgcagaagtccaccaaacggttgtcgaaatcttcaccaccaagatgggtgtcaccagcggtggccttgacttcaaagataccgtcttcgattgtaagcagcgacacatcgaacgtaccgccacccatgtcgaagatgaggacgttcatctcaccgcagcccttcttgtccagaccataagcaatggcagccgctgtaggctcgttgataatgcggaggacgctgaggccggcaatggtaccagcatccttggtagcctgacgctgcgaatcgttgaagtacgcaggaacggtaatgacggcctccttcacttccttgccgaggtaagcctccgcgatttccttcattttgcccaaaaccatggcggaaacctcttcagggtggaacgtcttcttctctccctggtacgtgacttcaatgaggggcttgtctcccggaccagcaatgaccttgaatggccaatgcttcatgtccgactggaccgagggatcatcaaacttgcgaccgattaggcgcttggcatcgaaaatggtgttttccgggttgcgtgcgacttggttcttcgcagcatcaccgacaagtctctccgtgtcggtgaacgcgacgtaggacggggtcgtcctgtttccctggtcgttcgcgatgatttccacagcatcgttcttccacacacctacgcaagaataggtggtgccaaggtcaatacccacagcaggagagtccgccatgttgtcttctgcagggacaaacaactgcaacgcgacacaaaaaagaacgggggagtggaaaaggaaaaatggttggaaggaaaaaacactgaccttcgatccgtccttagtttgagctgcaccgcacggaacggcactctcctaaagatgaaatgcggggcgagtgccggacacaccctatgactcgtaccggacagcacacccgcgcagcagcaggggatgatgagggacgaagagggcggtgtgtggtatgtactcggacgtaggtgctgggagcaacttgtccgtgctgcggaggcagcacacggtgcaaatctcgctgttcaagccaaaaaagacgaaacacactggcgatttcttgcagagccccggtttcctttccgaaagcctttctttcttgcagatacttgaccgaacaatgcatcttctacactcctttgcgctccatactgacgcttgcgacacggacagcacaaaggttcctcgtgatgagtaccggcgtcgctcgtggggggaaggggggggaggtgacgagcaggatgacgcaagtcttcgggtggggggggcgggagcttactcaacgaggtcaaaaaagcaggcactccccgcaagaggctgacgctgcttgcacggtccactgcatgtcctgcgtctctccctgacagctgccaaataacggctgttgtgttgtccccgtcgggggagggggggggttgcgcacggcgccggacgtttccactggcaatagccagtcacaacgcgttacggacaatatctagaacgcgcccctcacgaaagtgggatagcttctcggggtgcttcgaaatattactaccgaaccgcaataaacaaagaaaaagaagcactaggagggccagtgaaagttcatgttaggcgggtgcttaactgttggattccgcgtttgtaaagagtcgcagaaggcggagaggaagtggtaagagactacggaaagttttcttcgagaagtcaagcagtcacagcggagatatgaggcacttcagcgactgagaagacggtggcattaacgtcagagtcacgcgctcacgaagtgacgcatgtaaagttgttggtagatgacgtttttagggagaagagccgtgcatggtaccgtacggtgagaaatggtatacacagtgggactctgtacgaaactggaaccaaactgcggacacagtgcacggtagcagcactccacaagttaacaagtagtagcagatgaaaacccaccgacgatggaagaatgttgtggggttaaggctacggtgtgtgtcaccccgttaaacctctgtgttcgtggtaatacaaaggttattcaagagcagactcggaatatactgcagcgtaggatgttcccggtaattcgttgcttgcgggtttcactaaccaagatgagtttgggaattacagcgtgacacagaacagggcgggtgttctcacaccggccggcgaggaaagcgtgtgcgagcgaaacggttgatccgtgcaatagattcaatgctcggagaaggccaaacaaacacgaattttgcatggtcacttcgtgtatagcagcatcgctgctgatgtgtcaggtgttttgtggccaggtacagttatccgaaagtcggcgcaaaggaacccatgaggcgtatccaatgaatcctttcgccgtgtgctcagaagtggcacaccagtacagttgtgatagacgtcgtgctgtttcttgttcataaactgatgggtgcacttctgcctgagtatctggagagatgtaatcatcgacgaaggcttgccggtctgcccgcatacacatcgcggtggtgtcatttcattgaactaaccggatgagacaatgcttaggaaagatgaagtttcttgttacatgagcttcgttgttaaggggaatgcatacgtggtcagtggctaactgccacctcagcactactacacctggaggcgccttgcatctcctgtctcacccttcgttttccgtcttttggtcaacgttaacagccaccattatccattggcaggaaacccctgtgagtcacatatttgaggaaggtctacctcataatttgacaacgcgcattttctgtaagtggctgtgtaccgaaacatgaagcgagtcagtcaaaaaagtcgagttcgctgctgtgtggcaagctgcgcagttaacgaagtgggacaggtatttcttttgtcgcgcatctgactgaacggcgagccacaatgggaacggcgcatctcgtgaatccctcagtcaacactgttgcggacacccctggaagtgctgcacagtatcttcgtagacatccgagggtcttccgtgctagtgagtagatacaagtacggatatttcatagaaatcaacattctcgactcccccttttacacagtattcaatcgtgggagctaatttatcgtcaaggtcatcaaactactaaactgaactacgtcactgtttgccacggtcacacacgataccttgtttccgcgatgaagttgactcgacgttttttgcgcggatccaaaatgttttgcgtttcccaagactaaacaagtttgtacaattgaatctgtctcaaaacgagtccgttgtctgtgggattttgcgtcaaagaacagtgacaagccagacgtgttgactcaaactaggattgcagaaaaacatgcagcgtcatgcgcgaaacgcgcgtttctactgttcatgaagccctgacccagtgctggcacaaagaaacctgcaggccgtcacgccgttgacagtgctacctatgtctgaacctatcattctcttttcagtaacggaagccgcattcagaggaagagattggagaaccaggtgtctgctgaaataagcgggccgtcttgttaacggttctcttgcccattggctgcatgctgacatctgtgtgaaccgtctgagtttaagaacagaggcaaccctctgcggaccacctccaagagctctacaagttagaaacagaattctatgcgcgagcgctcctgcgcgaacccttaggcgacgatagtcgacacagacaaaaccagtcatctactgccaagatggaagcgactgagctgaggccgttggttcgaaaacgcagaagggtgacgtccgtctctgggctctgagccctgtgcgtgcacacatatgcctcgacgctttgctgtgcccaacagtaggtgtatcttttgtcatgtttcagcgcagttcatcggttgcccaatgatgactggagttgagcctctggtgttgccagcttgctccttggtgacggagcacgccaatgggtaaacatgtttccttggtgcttggatcaggcaccggcattcggctcagttttatcccgctgggccccctgtcgtcttctgtcacacccactgtcgtgactaccccgaagacagggagataagcgtttgaaaagaaacaggccatgagcgcaggcagcaaacttttgttgttttctacggtcatacaa

SEQ ID NO: 1677 - DNA, 1881 bp, Toxoplasma gondii
  source 1..1881: mol_type = genomic DNA
ttcctcgatggagttcagttgttcgcgcgctgaaatcaagtaaagttcgcatcacaatgcgagggccgattctgcacacaagctcttgggatgtggaccgtcttttcgctgtgtggctgtgaacatcggagtggaattaccataaccgtctgcatcatccatggtactcgctaacagagcccttcgcgtcatgtcttttgaatgacatctgattcctttgccacacagcacgaacttcgtacttggcagggcacaacgcgccttttgcatcgcttacaaaaaacgccagcgagaagcatgtcgtacgactctgtacacattgtagaacacgtctccagtttgacacggagtggtgagtctatttagcgacgatatacgtttctttgctgttgggtgtcttccgcaggtacctgcgacaccatgctgaactgcaagaaatgctagcactgttcatgacgaaggttctggaggacaaaccaaacaacatcctcaagtttgctggagagttcttcactcaagatggtctcaaacagctcgtcgaagcacaggcggatgaagaagacacgtatagcggcattgatgaaaaactggaagaagtttgagttccaagcctgctttgtgtgtgtccttctacaacgcgcaacttctcagggaggaacttttcaagctccgtacaacagatttctgcctgattttagtctgcgagaaggttttcttcaaaaatggatggcactgtgattcacacgttgtggacatgcaggttgacgtgtggcgttcagccacttttccagcactcttgatgagacagtaccgatgacgggcgctccatcgaggaaacctgtggacactcactttccacatcaagctatttacttctaaacacaggtgttccaatcgtgcaacaacccaacgacggaaacgggagcaacatctgccacaaaacccattaggatgaccttttacctccgaccaccagcttgccttcgttacaaacaacacaacaagtatgtcccgacagcgctgcatttatcctactgcagctgctgaattggagcagataaactccggtaatcactgaactggtttccataagagaaccgatgcaaagtccgtcgtcttgatctgggacatgcggtttttcctcttttgtaatgagcattccagcaggcgctgaacagctgtcttccgacggaacacattttggcaaatgtctacagaaaagacattaagatatattaccttgttttctgtagaacttcggttgtaagttcccccattgccacgcgactgccaaaggaggacgcagtggcttccctacccgcgctgtgtattttgggaacctccagtgtgctggttctcagatcgtctcctaataaatcctgttaagtcagcagaaggacgatttgttgccatatgggcgtcgagaacacctgacagacgaaaataacagtagtttcctcaacttcggattcacaacgtcgcagtacctcatcctctgccccgactttacgcactctcctgaattgggaaccctacacatgcaccgacacaatttccgttgcgtccgtagcatcgatatgatcttttgagtcgagcaacataactatattttaacaaccccgtctcttgtcgattgttgccggaggtgttgcgttatttgtgtcttttcgcaagacgcctattcccgtgtttcatggtcaactctgcaggggctgccgccctccggcagctctgagctccgtccagccggccagaaaaaactgaccctctctctttaccaaacaaaactttgttgaatctccggcgcatgcactcgtccgtcgtttcccttaggaagcaccatcagggtatctcatgcgcctgacgatcgctacccaagga

SEQ ID NO: 1678 - DNA, 1608 bp, Toxoplasma gondii
  source 1..1608: mol_type = genomic DNA
ctaacacacaaacgcatccactcagttctacagtcgagaaggacaaagagacagatgccgctccaagtacataatatgtatacgagttactgaatatatatatatatatatatatacatataaatatatataaatatatatagatatatatatttgagggagagagatatggatatagagagagatatagagagatagttgcctccctctatgtgtaagtctgtaaagacacatgcatagtgatacatagaaatctatatatatatatatatatatatatacatatatacgtatataacggaatgtatatatgcgtagagatgaggtaatgtgtggtggcttttttattgcatgtgcgttacccatgacgatcccatcccacagtgcgacatagggctttttgaatttcgacgttttgaagacgagcgcgtattcgtggccaaagagtctcgcgacgtcagctcgaggcgcgccagcgacctgccgaatgtcgcctccggcgcagaaggcccggccgccttgtccagagagaagaaggagagaaactcgaggatcttcctcaacgcgaggcagcagcgcatgcaaagccgtgaccatgtcgacgttcagcgcgttgagttgcctcggacggttcagagagacggacaagcagccccccgtggtcgtttcagggaagcctaagagaagcgtctcatcccagaaggccccaggtcctggaagagaagaagagaagagccggcgcaacgccgagcggccgagcacaccgcctgtcgcgactccctctcgctctctcttaaagtcagatacagacatgaaggcggccgccgaagaagaagagagagaagacgagagagaagacgagagagaagacgagagagaagaagagagagaagaagaagagagagaagaagaagagagagaagaagaagagagagaagaagaagagagagaagaagaagagagagaagaggaagaagaaagagaagaagaaagagaagaaggaccggagagcatctgcgaagaagataggagagttgggagagaagagaagttttctcgagcgcgaacgacttcgctgaggtgagtgctcaggcgaagaaggcgccgggagcttccagttgccataccgttcgagatgcacggccagcaaacgacggatagagcagcagagagcgagaagagacagaaaaaagaaattcaagagaagaaagggaagacgagggaaggcaaaggttgaagaaagagcagaagaagaaacgggagaagactgtcggagttcagagatgagggccttgcacaagagagggaaaacgaatttctcctcagcgacttcgctgcttagacggctgattgcggtggcgcgccgagtaagagagaacagttgcgaaagccaggtgtaaaagtcaactttgtttccctcgagtaaagaaaaggagagagagcacgctcggagaacccagggcaacctctgttaggttgagacaggctctggaagccgctgtgtcggcagctgcagagacgcgcgttgtgagggcgttggaaagagctgggagatcgcttgcagaggagaaaacttccgcaaaagtatcttttgcaagcaaaagcgaa

SEQ ID NO: 1679 - DNA, 2309 bp, Toxoplasma gondii
  source 1..2309: mol_type = genomic DNA
tgcaagaatcgatgttgatctggcgtagtcacaatattgctgcatctgttagtccgtcttttctgtgcctggggggctgacgtgattctctgttaccagtgaccaaattggcaacttcatttgaatcatcgtgcccgccagtggttaccttgttgccagtgttgtgtggaagaatactgttaacactggtatgtattggtgtgtcagggatcaggtggatcgaagtctttttcgttttttccgtgtgagaaaagtttctgcctgttttttagaagaggcgaaaagagcattcgaaggaacaaatttccagaacgaaggtcatgaatatcataatctaacgagccgctctgcgcaacttggatgcccttttgtcactgagtctatctggcgctcgattccaactcacacaccgcgtttcgtattttgcagatcgtagctgacatgagcgacaaaaactcgctccgaaaccactgcgcgtagagcagtgccttcagaggtgctgccagcgggttaactaggaaaaccatagaaatgttttaagaaaagcagattcacaccccggcagtcgtcgatgtaactatgtcttgattcacactgaggtcagaggcgcagcttcgcgagcaggcgtgagattctcaagctggtgttttaccaagaatttgcatacgtacggaaatcccgtggagattgactcatcacatgccatttggaaaacagaatgacaccaccgcgcatcgctgttaggcgtccacatgtcacaccgtgcactgtgttcacacatttcatggttgttgggatgagtgctagggagcagcgtgtactgttagagggcgttcgcttggttctttttgccacagcagtcatcggcgtatacagtacgaccactgtcacagcatgtctacttactgggtcacggtcgtacgaagaacaagtatagttgaaaacaacaccatatgacaacggattcgtacgatctgagccttgctggggttcacgtctgcactcttggaaacccctgtagtgagcggtggctcgcagtcgcgttgcacacccgatgtctcgccgaattacgttacacctctacgagcaggagcagcagaaaggtattgcacttcaaaacatgcctggacactaggccacaagaccattagaggccagtgttaccgtccctgcgacgtcatcctcattctgtcttcacgagcatgagtagtccccgtcttcgttgacgtcgacgcctgcctcattaggtttgctgcacagcacgggtagacttcgctacttctgccaacagaaaacgatagcttggttatatttcgtagaattgtaccgagtcgaacatgctgtttaccacgaaaacgcaaatgccatcacaagggaacgttcagtcgaatggggaagtacatctcgcgtgtaccggtgcctgtatggaggagccagccagggtttctcgttacgagaatggaattaaggagcatccgtttcggcaacatactagcgctgattggtgacctgcagcctttgccaaaatacggtaacctcctttataactaaggggcttcctacgcggtaccagctaggtgacccgaatacctttaccacacagaaactgctccaacagacacgaggaaaattccgcgcttgcagttgctgctaccgctcttgtgtctagaatgtttatgtttctacattatattgatacagtgaacaattttaattgccgcaattgcacgtgtaacttcctgtccactttcttcatgggcgaagtgtggtaccaccgcagcgattttcttctgtggagaacgatgcgagcgttgcgtttcaccacccgctgcagaaaacacgtggtatcccagagcagtagcgtacatccactttgtcccggcacaacaaaacgcagatgcgtatactataaagcaactttgtgactagaaaagtagcagcacatcgtcggttgcaacgagggtaataaccaagggctttttcatgtgcacactgaagttggaggaaacgctgttgtgcgaaagtgtgtggaacgggtaaaaatcaccctggagggatcttgtctcgtagtgtgtggcttcttgaacggtcttttcttttcgccctctctgctcctctggggccccctttattttctactgcctgtctgttccgaaggattcttctcgcttgtctttccggtgcacaacacgttctttgatggttttcccgtcttccggtgtacgctgaagttacctgagtagctttcttcgccagtcggccaccatcagaccgtacatcgctcataatcccgcatactgtcctgacaa

SEQ ID NO: 1680 - DNA, 3515 bp, Toxoplasma gondii
  source 1..3515: mol_type = genomic DNA
ccgaagaagtacgcgccgccttcaccgagaacctccggagatcgtttctcctcttctgcatgcatttctgcaaatctctcactctccgacgtgcaaacgccttccacacaaacttgtccagagctcctgtgagtgtcggcatctgtgcctgaaagaaaggcgtggcgcgtgaagtccaaatccgagctaggtaaacttgtcatttcctgagtacctcttgaaaaaaggcgagcaccatagatggacaggtgctttccgtcaggcaagcggggctggtccgtcacccgaaacgcaaagttcgtttctagacttgacagcggaacaacactgccgcaaatccagagaaaacgggcgcaagtcgaaggaagccgagagcccgcatcagggcagagccgttcatcaggtgcagcacctggggaagaccggaattgacacacgctgcgaacctctaccggcacaaacgtggaattccgataaacctacatcgaacagataactcatgaattcgcgctgctcttgagaactgttcaaagggacgtcgcgcaggcaaaggaaacatggaacctgcacaacactcccagaacgttggatgggaatgatttgcaatctctacagcgtgggagagaatttaggatgtttcactttactcttgaacacctgcatccggcatgcagctgctgtaatttgaactgctttgttcgtcctagttgcgtcttcgaggcctttcgaaacaggcttacgcaacacgatgcaccagttcagcgcgaatcatctgcaagcgacggtagatccgcgaagcacgtcgctttcgctcacttctctgagtctcaacggatgctcaaactacccttgggatcaacgcggtgtgtagtccggaaccggcgtcgggaggcccaacagtgactggtgcgtagagagtgactagttgcccttcaaacaagaaaccaaggtttgctccacttagtcgaagaaaccggaactctcggcaaagcatctcagtacaaaaaaaaacaacggaaaccaatgtttgctaagctcgcttgacgaaaccgaagctcttggcaaagagcagaaccctacaagcagctgttcaccgtcaccgccggcgcctgtagttccgcaaaccgtaacggcgtaaataaaaagaccagataaactcgtgcactctgggtaagatgccgtttcacgtgaaaacgatgaaggcgagaacttggcgggttccgcttagagcaagggtttttgtcacgcgcttccctgcgacggttctagttctgctgacagcagccaccgctgcgtccgccaagaaggcacagatccgcacatgcaaagaatgggcaggtatcggactcatgtgtaacccagatgagaggatggaggggaatacagggagaaattcgtaaaaatcacacctctgcgaaaagctgccggcggatcgcggctcaggctgaatcacggtttttggcggaacacagcaatctgaagcagacttttgtggcgggtaatttatttatggacggagagaaaacccatcttcgaggctgactcaacagtgaatgacacgcgaaaatgcgactaagccttcgccgctcctacacgcacagtgccgggcacccgcccgctgcgtgggcagcttcaaaggattttaaaaacgggtgaggacccccggcacacgcgtctagacttgaaaaaccagagaagaactatctctcggagttggagatagacttagggagcgctgccttttctgaggtgtgaaaagcggtagcggtcggccacaacgagagcctccaacgcgactatttcgaccttgcagttgacacaccgtgtccagctgaggtgaccacacggatccagggcgttttggggccggagatccctgttttaccagatgagactccttcaggcctctgtgaggctggtacgggcggtttcaatcgccataaaccgatttccaaactgcccattcactttacctgcctcgctagtggcgcggcactccacaggcgagtgccttgaagtgacgcgtgcctcgtggcagattcagtttctctattcccgtcttgtttatcgtttgaatacgggcagacgcagggagatatgaatggtaagtttgttttggctggtgttcgaagccttccctttgctagaaagctgctgccccgtaggccattgacgcacccccgcactccacccacgatccggtcaagtgtgtgaagcccgccgagctcgtttcaggggtgtcttcgcgggatgtctctaacagaaattttggggggatagcggggttgcacgaataaaaaagggcgagacagaaaaggttcctccatcggcgcttcctagtctgtacagacacacagagaaccactaagggaatggggcaggatgttgagcaatgcacgcaactggcagaaaggcacgcgagccacttggagctctttgacggctttcaaactaatgattaaccaggtttctgtaccggtaacagtaatgtgaaatatcactttttcgtggaacttgcagtttgacgtatgcgtaggatacagtatcgatccgtgatcgtcgagctcacggtcgcagttgcgctcgcgacggctctcccataccgtgtcgacagcagggacgaaaaccagctcaagtcgctgtctcctctatgtctgctcaaagcttctaactggaaggctgaagaaggaaggcaccaacactcttcacctatgtcgccagaaaaactcagtgggtcctgatctcgcgtatatcgagaaccagtctctgcacctcgagaatcggtatgtcctgaaaaggattttgcgccagctgtggcttcccccatctgttctccatcgggcacgtgtttctccgacttctttgatgtattgttcgcacttcatttctacttgatcgggtgtccacgttgtacccactccgttgttccttgccgcagtgtgtctccgcaggatctcgggcgaaccctcaacagccgctgtttttcttgccgcgttccgtggttccttcccggaaagcaagaagtcatgggcacattcgtactaatccgtcttcttcagacagccacctctcgcagtgtacgtttcgcttccgaaaaagttagacccccggtgtagccgcgtgcaattcctacgcgcagacatatacgccaactgcttcctatgatttgagttaactcttggaggatggaaaagcaccttatccgaaggaaaagcaaggcgtgatctctggcactgccccaatctccctgccaccccgttgtccccaaagtttcgtccacttctacaaactggaatcctggcgctgttcgccgtcaagcctgctacacttccgttcgacgtggaacaccgttttttcttgccgcactaattttctctccctcgctcacctctgtgtgcgacactcactcacgcactcaccttgtgctggcgcgaattacagtgaggaacctaaaataaagacgccgagatagcgtcttgtgtcttcaccgtctttgacgaagtcgagcagaacca

SEQ ID NO: 1681 - DNA, 2322 bp, Toxoplasma gondii
  source 1..2322: mol_type = genomic DNA
gggagggatgtcataggagcgacgccaaatcttgacttgctcatctccgtgcttggctgcggtctcagccttgttgaggccctggagggcgccgtagtgacgctcgttcagtctgtaaattgcaccacaaaggaacatagttcaaaaacatggaatccttggaaatgaacgttatctgcacccgcgtgtgtgtgactctgtgcatccatttgtctggttatgcataaaaccttgtttgcaccggtgctaaatgccgcctgtctcgttgagaaagtgagtactctggcgagacagacagtcgtttagagaggtagacgcacagcttacctccatgagctcttcacagggatgtggcacatatcagtccctttcaggacggtccagcaggtgacgacggctctgcacacccacaccagcaagaaaaaaggcacgcatggctattttccgacaggaggcggatttccaaaaggcggctcagcgaaatgaggccgtgtattgtaaacaaaatggactaaaatttgaatgcctttgttttttcttacaagacgcttttgatatgacaaaacattcctctagggtcaccatgcatcgcaaactggtgtatatatacctgcacaacgtaagtgtgcgaacatattggatctggtcttggaaagacgatctgagagtccactgagaaacctgcccacgcgtgaaaaacgcaacggcacaaactctctcaagttccccttcgacagaatccttccacaaaaaactgggtccctcgtcggcgcgacaaagtagtaaaattttgggctaccagagggtagtacggaactgcaaccacaagcacccctcgcattcacttgagcaaaagccgacatcttccggcaaaggaaagaacacctataccggtgaatttccgtgatctgcttacatacaccggctgtgaaaacacggggcgtccgctacgacacatggcaatgccgcgtcagccgttcctctgccttacctctgaagcacggaagtgtaggcgacgtcaaactcgaaacccttttccttgagagcctttgcagcttccctgttacagaagaaaacccagatcaacagcaatcgtgaacgtgggaaattttgcggtgaagaggaacacggcaacaaaacacccgcgaacacaggtcacagagatatcaaacggcacccatagaaaacacagatccgtacttcagttaccagtgttattcttgtggaaaagaggagcggaaaaaaggcaactacacgcaactccagttgcgatatactagggggacagaagatataaaagaggaggattacatcctcttgcacgccgcctaggaacatacggggagaagtttgcgttcgccgattcacgaggtccggttggtttgcttctccttctacctaccccgctatcgtagctgcaccagctacctgtcaccagacaaactaatccaagagacttacacggcctcttgctcgccgacaggggacaacggcacatcggtccagccggtgaacctgttctccttgttccacgtcgattcgcctggaaagggagaacacacacaaatgcttgcattctcacgtacaacttcgctccagaatgagtaagctgccggtgaacaatagcagagtccctcgtgcttcctaccgcgctccccattaactgtctttcccgtggcagacactgcagtcccgtatcgtcgacagttccctgagccacggggttgccattttggtgctgccacagctcgaactcgagaggcacataacgggtgaagtcgacatcttccacggagaaataaactttttttgacactgtaatggtagcgtgtcactattggaagagaaaaacagcgttcttccagtggaaatcaaggggacgacgcagacggccgctcgtctacagagaagcaccgcaactaccactcttgtgcaaatagtgtggcgcgtaccgtggcggatgaggacaagagtgtactttgcttttgccatattgccgaaaaaacgacgaaaagttgaagcaggaaacatgtaatgtacgttgccgtgagaaaaagaaagatctgaagacaaaaaaggcgacgtcagaactggggagagatgacaggatgcgccacacaaatgccggtgccgggttctcccctgtttgggggtgtgcgggggtagtgtgtgcccggaacaaactccagcacattgcctgcttctttcacagcatgtccggcgtgtagggtcgcaagaagatggccaccccattttcctcgtaggaagaaggatgcctgagggtctcactggaggaaaggactgtccgtcagagttttaaca

SEQ ID NO: 1682 - DNA, 3123 bp, Toxoplasma gondii
  source 1..3123: mol_type = genomic DNA
ctccttgtagagagcgtccttacagccggcatcctgaaacatgaaaagcaaacgaaaatggcttcgcatgtcttcttaccactccgacggcgcagtttaggtgtcaaggtgtaacagtccgtttgaggtcatttgctgtctagacccatcaaacgggaggaggcacttgaaaaaagtcgaatctgggtcggccatacacagaggagtattctcgaagtatcgaacaggagagcgggacataaagcagccgattcgtatcgcgtgggcggtgcatttttcgaaatcatggggaacagagtcaggtgaatttacgggcctgcgccagagaaatgcggcagttggaataatcgatgaaaaggggaggggaaaaaacgtaaaatgggattaccagcacactgcgcagaaggagacaatgcaagtggggaggtaatggatagcaagcaagagaaacctggctgagggatggagggtcaaaacatggaaatacggccggcccccggcgttcggagtgcggtcgacagagaacgaatacatcaaatactctcagagatcggatcctgtgtctcaccatgtttcttggcactgagttcgcaagtgccctatgaaagcccttgagaatgtgttccggatttttgttgccgacaaatgtaaagaccagtgtcttttcgatttctggcgcgaacagaaggctcagcgcttcttgttcctcctccgcctttaaacccttctcagctgcatgtctccgttgtgtgtaccactctttccaaccctctaaactgtcacggttcacatacactgcaactgcgtacgccctcgccgcgggaatccaacaaatgtcgtgcatgcagcgaggcgcgacggcgacgcagtcgtgaggaaccggcgcctgttttccaaaggtcttttggggcagaaaggtctccgggaaatcaacggctaacacaggttcgtggaaacgtcttgggggctgtggcttttcttggctgtccgtaggcgaagcgcacgcaacaagaaggctccccgaggaaactctccttcgtggtcggaagggtaggctagcgactagttcgaaatcctctcttcgctgcgattgattcctcgatacatagcttggcgaatgggccttgcgcacgcgggaagaatgcaaagacggcggcgtaccgaataaagggtttacggatgaaggtgagggcagcgtataagcataggatggcaagaaatcgccgtcatacaaaggtgagaggtacgcggaggaaatcagacgacggtgaccaagatcgaaatatgaactccccaaaacagaagaagtcagtgatgagtctcccgcgctatttgatgtttggcggtgtctcagaccaccgggtaaagagttgcaagaagatggttgtctccgcaaggcagcaaaggctccaacgtttcgtctagatccccaggaaaaacgaagctcggagctagaggtgccacccctcagacgcggtgcagaggaaagggaatgcttggaacgtttggaacaagcttcaagtgacgcgaatcgagaagccgtgggacatgtctccactgttaggcttggtacaacgaacgggtaagtacgctgcgaaacaaaagggacacagcacaacaaccggaaacgctggtaatccacaattttgcagttttgcagtgtcgttattgtcgaaaggatcgcggacatggcgacaacgacaaggcctcagtcgtgttaccacacccatcgaaccacgcacgcgtgtctactccgtcgattcagcaaatctaaatgatcgagctctctttctctgactcacctgtttccacgcatagttgcgctcctgacgacagcattgtgccgtgaggaaaggcgacatcacgctaagacaaggagtgacggccaccatcatggcgctcgctggagggacgggcgaaactattttttcgctgacaaagtctcaagcgaagcacttgtcgtgtcaggcagattcagcacttgatgtgggagcggaacagacaaacgtgtctccgccatcacactaagacgactgctgtaatcgaaacggtgtaaaagagttcccgcattttgagacgccgcagtcccaacgtccaggacgggagaagtcggtacgcagtctgaagcgtctttgtcttgttactttgacgccgtctagtaactgtgaaaagaggaaggactccgaacggcacacgtcgacctccgggattggaagagctagatgcagatccgtttgacgccgcatgcgaaaagtaaaaagctttttcgatgtctcaagcaaccgtcgatcgaagtataaaccacagcagagagaagccaggctgttgactcgcagtgtcctgtattttttcacaacggttccttcctatttggaattgcagatcccgtaataccctggtgaaagaagcggcgactttccgatacgcgtatcgaccgcgtcaggtcgaaggtgtgtggcacggctggcgaacggtcgattctgtcgctaaatttttcctttgtcggtggctcatcattccagtaggcatttcaacacgaatgccttctatttcgtgtcaacaatttgtgtcggactgtttggtaagagcttggaacgaccctccctctataaggtttcgcgtccgcgttcctcgcctccaaccgcagcatttgcccctcttgatgcatacgaattttgaacaatactcaatttccgtggcggtgccggggccgtgttcaagcctgggaaaacatgagtaccacatgggtatcagctcggaagctgcgtgcatgaaactggggaaaagaagagagaccagctgaaggtgtgggttgcagtgacgtaaaggatacaacttccagcgcagtcgcctgtggcactgtagcaattaaacttctgttgtcagacgaggttgagggaggccgatgtgtacggctgaagttcagtcggcaatcccataccaacccttcctcgtgacgtggtatttccgacctacattgtcttgctcgaggtggtacttataaatgggaaggccttcagtcagtacaagggcacttgaattacaacaggccgcactatcgcacgggcaacgacacctcataaaaaaacattttgaagacggcgtgaccacggcaaaccgcaa

SEQ ID NO: 1683 - DNA, 1794 bp, Toxoplasma gondii
  source 1..1794: mol_type = genomic DNA
gagctatggtgtatgtggatattccgggtccgggagtttttcttcctcgacagcggcaaagagttccttttcttctcgggtgacaggacctacgggtgttgggagtttcgctctcagttttagtctctcaaaaacgcgcccctgtcgtcgaatgcgaagaagcgatacactcaggagtgcactgcgtcgcaacaccgtgcgctgagaatcctctgttttcctttgtcgcgtcctcgcttttcgcgcttctctcagactacgaggtgaggattctcagtgcctcgggacttcccaaagagctctccaacaacaccttcgtcaaatttaagttctttcgctgttcgagctacaccgagaccccgcgagtcagaggttctaccgccaaccctgtcttcaacttcagaaaaattttcgaagaatccgtcacaccggcgttcacggactacctcgaaaacgaggttttgatctttgaggtctacggagaggatctccgagctacaaagtagaaacaagaacgaagaagaagcacccgtctcgtgtgctgtttcagtggcgatcgagaaaaacctttccaggatggggcgccttcctttctctacagttgttatttctcttctttgcctgacagtcacctgcacgtttgattcttcctctttctacagttttcatcccttttcccgttaatagtcacctcccagctctgtctcttggttctgttgtgagaggtttccgcgtcgccgaaacgcgccatgtcgctcagtctgcctcagcactctcaccactcagagcgaagtagtgaaaacccggaattttggaagaaattcatccctttcacctaaggactggagacgattgccagaaagttcttgtggcgctgaagagccttcgatttccgacttctcctggctgtcttcagagagtcctcttccacctcaaacacacgtttgtctctcgcgaaatcacactgataaacaatcctgtccagagttttaccgacaccacggtggtgtgcttcttccttccgtgggagtcgctgctttccacccttaatccgatggctatcaccgcagtccctatgcagtagatgagaaccgttgcacagcgaagacctggctgtacgacagcgatcttagctggaataaataaaaacctagacttttggcaaaactcggaggctttcctggagccctgtgttcctttaaaatatcatctctcctagaccgttcagttcgtatacatgcctcggctgcatgcacgctggcgacctcgggcaaaagacgctaatttctcgctggactcctgaaacgaggatcagttccaagtgcgaaaaaatccaatttccaatgttgtgctcatgaatgtgtccagacatgcgggggatgtgcttcgcaatcgatggatgttctgctgcctgtgaaacgcggctttctcgaactgcatgcggatgtacgcgaaactcgcaggtcacctgtccgccgttccggactctttttaaaagaaaaatcagcaccccctcatccttgacagcttttttccccgctggctgtttgcgtttcttcgtcgcttcccaaagctcggccttttttcaaagaagaaaaaccaaagttccagcctctgctgggctccagcagccgctcgtggtccttcgagtcaaggcgagtctcttgcctgaccgttattttttcagtaagggaatctttttcttctcgataaaagtttcattcggcttcctgcttttgctctggaagcattaaaaggctctcggaaatattttccttggcacagtctctaaga

SEQ ID NO: 1684 - DNA, 2158 bp, Toxoplasma gondii
  source 1..2158: mol_type = genomic DNA
actgcaggcccaacatggcgactgcatataaccctagccatatcagcagaccgacgctattggaaaataccgaagtctgcgtcccgcatagatacttattggagtcctccacgtccttctgttccagctcgtcgataacgtagtcgacgtccggctggaggaccacccttgagtacggggaaagccccttgacgcggctcaacgacagtaagatctgctcccttttccgtcggtggcagatttcttcttcagtttcctctggtacactgcagcaccagtatccggactggggtccagagacagagtagcaatcagtcgccattgggctgtcgaaggcttgatgcgcagactaaggagtgcaacgtcgggcgtccactgccgtcaacagcatatgcacgtgctagtttcggtcgcggactacacgttcgatggaaaaacactttacaaaacagttactgcacaattcataaacgcgctgtgcttccgctcggtactacttctcttgcatagtgtggtcgatggagtgacctgacgaaacagccggtgaggaaaatgccagcgaaatgatatgaacggtttgcttccctctgttgacaagattcagattgaaaaggttgggaattccctgattgaagcttccgccggacattaggggacgatgggacacgctgatgcattccgaagacgataggcagcccccgttgcagtgtcgcggagcctgaactaactatggattacagataagtcggaaaggacaatatgggagcttagcgggcatcagtcgccgtgacgacctggttctctaacacaacgtcgagcatcatcaaacaaaaggatgtctgcgtgcgcacggcaccgcccctcggcgatataggcgcgccacacagatgatgcgcatgtttccataaaaaactgcattcacaccttattggacggcacagtgcaacggttcacggcggtgccttcttgataaatcccggattcagtcttttcgttggaatcaacaacgacggagtcgcgatccctcgccaacgcggttggctaacacccgaacagtcgacgtcaaccaaacatcgcccccgtccagtgactcggccacttcaacagaacaaaacccgtttctgcacagttgcttgcacaaaaatgcaaaggaaacggtaagtagttgccagcaaaggtttcctcgcaggtggagtcagtttctcgtgtgcggcacggctaggcttgcacgtggtcattgaaaagccagccagctgccgtaggttctgtgagaatcgataccacggcgtcgtccactgtcggtgggacaggcaacccatgcaggcaagaagcactgctgtctcactaaaaggcattcttcatgatctcttctctgcagttgtcttgcataaagaaacattttcttctgtgtccaccaagcactgccgcaagaaaaatccggaagtagcttccgtgtcctgcgagtggttaccgccaccgacagcctaatttttcatgccacgcataaagctcaactttgcgcgggcgacttgggaatacggctgtcgcttgcaggaacacttgcatcgcttctcctcatcagccgaaacgagggttagtgattcaggagaaaatgtcttgctggttcttggataaggtatctctgattgcaggcgccatagtaggcctgtttgagacattagcaagccacgcgctgatcgtgctggcgtgagttgcgacttcataatcaaaggcggctctttcgaagcagctggcgggaatgcctgctggtgtcggtttcaggcctcaaccgcgacaagcgccggtgaggtgacaataagtgggaaatcggatcgccggcagcctacagcacagtgacgtaccacagtcttccggagaaacaacaggagttccgagcttacgcccgtctacaacagcttattagctcgggccggctgtgtcgttgatgcaaacaaatagcgtaaacgtttccgccaaattgaccaccgttgcaagacgaaagcgagacccgccagtgcaaccctcccgtcgtacgaatgtggcttgacgtcctctccaccgtaccgtttgtgaggaccgtgttcatgctcagctggattcgtggggctctgtttacggcgcgcacacactaccgcctcttcacagtgggatgagagaa

SEQ ID NO: 1685 - DNA, 4003 bp, Toxoplasma gondii
  source 1..4003: mol_type = genomic DNA
gtgtttctcaaacggccggtcagtgtctgatccacgctccatgcatgaatggcgattggactgttgaaattgtgaggagatgcgtgactgcatatccgcaggtgcacagaccctcagcgatggcggcttgtccagtgttgcctcacttgtttccgcagcaagttctggaatgcgcatccgtggtggcggccagagcagactcgaccgtttgtccagaggcgttggtggcgtgtgcgaacgaggcgggatatcttttgcggaagtctgatggactctggcaagttggccgcgcctgccttcccactggctaactttcaggtgactccgctggacgtcttgcgagacaaggcatgcaaaccgcgcctccgtactcggctggaaacggggccttctccggtgtccatgcacctctttgacacacacgcacgcgtacgatctaggcactggcacggctgtaggcatgtcgacagggagtgtaccgaaaaaaatcttgatcttcactaagggactctccttcctaatgcttggctgtattggatacacggtggccggattcctgaaggctggcatatgtttacgatctggaaaaccgctgatgacgccgctgtacacctccaccgcgttggaccgctgacgacagcgaagagtggtgacattaatatcgtgacgtagagatggagaggtatctggagctcggtaaaagatgtggaggtttctgtgcatgcagtctggaactgtagagtctcgccgcagtttagtgagacaagcaagtcttcttcactggaacgggacagcaatcggctgggtcatgccgccgttcgtaatcggttctggtacaccgttgtttgcccgctggagagggctgcggctctctccgcaaatggttgggtttttcttcagggggatttcgagtagaatcgccgcctaagattgtcgatttttcccgttttcgaccgagtaagtgggcgcattggcgcattctgtgcgcgaatttctggcgtttcaccgccggtgtgtgtgtgtgggggggttacgctatggcgagcctcgaacgtccccttaacacatcgcgttttcgcgaggtttagacctgggttccaactttgcttggcaactttttcaagacggagtgtgccagtaaaaaacaaagacggtattttcacaggccaccgcctggacgcgactgcgtccctacgcggcatgatctcaaaaggccgaaaggagtggccaccggtggctttttagtggttatgccattccttgtttatctaaaactactctccgatatttgagccaccgaagtttccagcggcacgcatggcactcgacaggacgctgctgcctctgtctgcctggtcatccatcgcattcacatgttttttaggacaacaaagtcatagccgactcattcctctgagtgtcggtgcgacgaacgctcctcgagtcgtccacttccatgcatgcatgcttgttgacaccataacgagcatcagtcgatagcacaaaactcgctgaaacctgcgaccagatgctgcacgcgtattacttcgtaaacaagctaagtaacaataagtagtcagtgccggagagaaaaacgctcggagtacgtaggaaagtcgtcagaatctcgctcctcaaattctccgccactcctcgcaacgctgatacaggggatcgcgatctccgtgatgcgtcaaattcgactcaaacaccgtttctaatctagctgtcgcgagatgcggcggtcctgccgcaaacgcgacatatcctgggtgtgtagagtccggttcacactcagagcattaaacaaggctcccagcgcatctgagatggggtttgcaatgtctctgctcaataattggcgggtgcagctgcattttcaacatcgaaaatcttgaagacaatacggctagcaattccggtgtgtgtttgcacgttgacgcaatagaaaataggtgaaggaatatgcacattccagcagcgaaagaatagtgacatttgtactagaggactgtacaggaaattgccagcagcttcgccgcagcccacggctgtcaagcggaaaggagacttcaggatcgtgtgctgatgacagtggcattctcggtgtcatccgaagcagcgtggctaaaccacgccttacaattatcatctttttcggagatataggcggtgtgcaaatgatccccaatgtcccgcacagtggagttcgagacaaaaagccaccagtttacaactatcacgtatcggcggacggaagaaccccgtcgccgtttgtaggatatcgtacgaaacgtgcgcgttctgtttgttgggtgaggacgttttatgtggaccaagatcgacgttttgcatttgttcttttatggaaatggtgtaggagcagcatatcttggaatgtcttcagaacaagcgctatgatgttctgctgaggcctgtggagagggaacagtgccacacgtttttcgaggggctcgtccagccgacgcacggatgcgattgtcccagtttttacggtcgcacgcagacttgacgttccgacaccaggtgtctaaattcgctgcaagaaaacacccttcaccatccctatttccattgtacccagcgtgcaagcagacagccataaaacctaactttggagcaacatgttggcgtgtcacccgtccagtgcgccgatgcgtccactgaggcgcgtaggcgtcctgatatgccgagacggcgcctgattactgagggtagtgaaatacctgaatgtgtaactttattgcgaggcatcgcaaggcgcgaatctacagtcggcgtgcgtcgctagtctgggcgtctcgaatgacggcaccacgataccttttgcgggtcaatggtgggcaagggtctttccacggtttcgttcactggttcgaagcttgggtggcgcgtgtgccccttccaggttcagccattctgtcgctctctatcgtcgcagaactgtgggaatgtcgtggctcccctctctaccccgtccatgcgtaacccgcgagaagaggcggcggccccgaccagcgcgtttcaccgaagcgacgcgtttctgcaagtgctggcagacgatcgaggaaaggccgtttcggggttttcagaaagtgtcagcgaatgcaagtgatatgaacgtgacagagcagagcggctgttccgagatcgggactttccaccgagtagataccctatggtaactgtctacgagaggacgctcccgctgtgcgtggaccgttgaaaaccaaacttttaggtcggccacgggaggtagtgcgcgtgcagaccaggttcgtttctgcgcgtctgaacgtcggtgcgcggccttcactttcagacgcggttgctgagacaggcttcgttagatcatttctgattttccgagtttgcgctctgcgagtttgcccacgtttcccgatcgcgttaagtctgtttccggctgatttgtcgactgcgattctcttacgctacggcatttctagcagtttcgtgcgtttttcccattgtgttttctgctgtttcgagactggggctgcagtcacgccccgttctcgcgagtgtgtcgaaatatgcggtggttcccagtttctgcgagtttggcttgagtccggggtgtcttcgcgagagggacgtaggcgggtgtgtggccgcgctctgtgttctcgcgtccatcgcacacggtcttgttttttcaacgcgcttcgaagccgccgaacccgcgccggacacacgcctcgtattgacctgtgagaaaatccgacagccagccggttcgtgcgattgtcgctagcgcccgtccttgcgtgtataaccggggtcgtggcacccctgactttctggcgggttgcgctgcgcgtgcggcaccttttccggaattcagttgagtttctccgggttttgctgagtcactccagtccttttccgtctagtgtgcgcgttttttttttcgtgcgtggcgtcctcgtgtcccttcggcacgcttttcggctttccaaga

SEQ ID NO: 1686 - DNA, 2484 bp, Toxoplasma gondii
  source 1..2484: mol_type = genomic DNA
attgtggtccttcattcttccgccgttgttcaaagcgtttgactgggagtaagttggcgacagaagttggaatttcctgatgttcagtcgaatgcatgcgcgcgccgcccgacgcgacccgcggaattaaaggcaggagaaaaacgctcttcgaaaagcctgttcatccgtggggagagttattggagtggatagcacatgggtaactgtggtaaacgaaacatctgcggcgttacccgacaagaagctgttgacggaacttcagggcctttctcccttttccgccacaagccgagaaaaaacaagtggggggtgtgaaggtgccacgattctcagtttctgcgttttcatgctggggatttgactgggtcattgcaacactgttttgcagaacgagctttacgtacctgcgcgcgctgggagagtcgttctaccgtaacggaattctgccggtggttgcgttcatggtggacaaggaggacgcctggtcagctcggatgaacctgtcctaccgctcagaaagcgaacaaagctacacgtatgatgcggagcgggaagaagaagaaactggagaagacactgctctggctgaagctcacggactgaaagaacctcaggaggcgggtgcaccggccaaggctgcggcatctgacggaaaggcgaaagccaatccgccgccagcgacgggagaagctcggaaggaagacaagaacgaggagcaggacttggaggacgaagaagacgaagagcccctggctcgggatgaagagctctaaacttctcgctgtgatcctggtcacctcggcgcctttgcggcatctgctttgtttctccctgcctacacaggtgcctctttgaagagcagcgtctagtttttcagccacggcaaaccaattggaagggcagttttagaaattgtacggctagaggtcacgccagttgtgatttagctttgtttttagatggtcatgtcgcataccgccctacctgtctgcatgcgctgaaattgtttgtttctcagtactccactgaacaggagaagcacactttctggatcattttaaccggacgtctgtgctccagcacccccatgaattcacgtttcatagtggaagttgaagtttttgggttttttgcgcgtatgttcacagtggggagctttaatgagtagtcataaaaagtaaagaaaccggaggtcgggtgacaccttggatggcgggagagggaaggttacgctgtgccgcatgcctgcattttgcccttggacaaaggactgtttatctaaatgtgagctgtctcatctgccatcgaacggctgagttcctttcgccatgatagatgaacctgcgtacaatacacgtagattcgtagaacacacacatggccttctttacatcacgtaaccaccgagattccgcaaggaatcgacgttcctactttctaggctccacttggaacaccataaaacacgcaaatatttacaacaggatacaccgtcttcagcttcgaataaagctgcccttttacttccgtactttcaagtcagttttctactgagtgcgcattccccaacaagaactgctgctgtcttgatacaaggcagaaactatttgttttagcactacataagtttggttcttcatggaagcaaaatcctgtctaccacaacgaccagcttgcttggtcgaaaaaaaagatctgagaaaaggctttcttccgggctggaagtccaagaaacgttagtataagcgtgctgcgtgtttcactcttcctgctggggaagccacattttgtttgtgcggttttgaaccaggtgtgatattggttggagaaaacaaagttgcatttggtagccacaatggttatttgtccttgtagctgatcttgagtgcaaatactttaagccacgaccacgcagagacacgagaaaagccgagacgctggtggcttaaacatgcaagaggtcgcactttatacactctgtcgcactgtatcgtgtattaaaatgtgtcctccgcaaatctctctattccatgaggtgtctttttgagcacaaagcaaacccaagttcagaacgaaaattgtcggcaaccgcgcatcggaatctcggcagctcgatggtctcctgtacaggggcgctcctttcggccgctggcagagagaggaattcagaggagaaattatccacagttttcttttgaagaccttgcacagggactcgtcgttagagtcgtgtctgttttttgtggacttttttctttcgtgcgggagtttttcctcttcaaaagccttcgtgtttcgtggcgaataaccctagagttttggctttcgaggctctctactgaggcgggtctctcgtacgtggaacgcttttctgagcgcccgtcccaaagaacttgcttcttgactagtgcgcttcattgaacatttatcttttctgaaagccctgaggattccgtttcttctgagacaagtggtgattca

SEQ ID NO: 1687 - DNA, 2412 bp, Toxoplasma gondii
  source 1..2412: mol_type = genomic DNA
agccacgggagaggacgaagcaatggaaagctgaggctcactcagttctccagaggggagaggaggcaaagctctctgagaagtggaactggtaggcagaaggaggacgagcaggagaaagcagagattcaagagcgcgcgtgtggcgcttgggagggaagaccggagagctgagctcgaagacagttttcgtctcttcatgttggcgtgttgcgtccgctgggaggaaccagaaacgaaaacagttctcagcctctcgcggtgtacatacaccgaggcgcggcccgctgaggaaggcgacagacatcgacatgcgtcggagatgccgatcgacacgacaagtgaaaagagcgaagggtgcgctcatgccagcgaaggggagaggcgcagcgaggaagaagcgagatgtaggacagcgaaagggagactcgcatgcagacgcccgtgcacatgggggcgaggaagaagtcggatccgagttgacagacacagtctccacgatcgttctccaccctttcagaggcagccgcgagagagaagtgaggaactcccgcccccacccccgcccgcaggaccgaggaaggtgcaggctgcagacaccgtcgcaaaccaccagcccgcgttctccccgctgacgaagacagagcgaacggaacctcgtacgcaactccgttcgtggaaatcgagagagcgttccctggctgaagcctccgtgaaacgcagtgagttcacctggctcggttgtttgcaagcaacagtctcatttgaggtgaatgggttccaaggcagataatgcaaaaagtcgcggcctttttaataagggaagctctttacgcagaagggagactgaagaagtctcgagcctcttttcggagcagaacgcaggcagacctgtttttcgaacgccggggaaacgcaaggcgaggcgacacgaggcgagctccgcggactatgcgaggacgcagtgccccaggcgcacctgtgtggattccgtgcgaaggagccttcctgcttgttgcgtttccttttggactgaaagttcttgaagagaggagagcaactgacgctttttgcagctgtgtgcttggcgcgcgatgagtgtgaaacctcacaaggagtttgaggcgacggcgcggctaacgcggagtctgcagagacctgcacacactgcgaacgcggagcggaaatcgccgcaaccgacgagcctcccagtcagcaaacggcgactggacaccgcggcaacagatcctccagtggctcagtgcagggaactcgcaagcgatcgaaaaggtcggcaaatagatacaagtgcagtctcaacacgcgaacggagggccggtgcccggttgctggtccaggttcgttcgcgttttcctctctttttcttcggctggcgctcgcgtttgtacagggtttcctctgtcgagagacaaagctgctgacatagagagtttgtctggagaaaagggcactgaagcggagaaaaactgctgcgcgggcgcatgcagccagcgagaaatggcgcgcaaagcacgcgaccctccacacagtcgaacaagacactggtcctcggtcacacttatacttgcgctgctccgttggtgccgaggaacggaagcctggcgacgacgaaaactttgcccgtctgcttctctgatctgtcttctctggagcgacagaaacggattccccgcctccttgcctggcggcggagcttcgattctcacaaccgcccccgctccccgcccccccagatatgcaacagcgaacgcaggcggtgtgcaggtcctctccctgtcttcacgcggtttcctctgctgacctgccgtttcacccatcagaactttcggaaagcgagggcaacctcgcacctctcagggtggtctccgcagtcgcctgcgtgagtgggtggccgagcgcgggaagacacacgccagcacagttgaattgtcagaatcccagtcgaaagggtcttcccgtttccggcagatcctgcgagactgggaaagacagcattgctcgctcagaaacgctcgacggaaagcgccgatgccgacgaacaacgcaactccagactgtcgacacgcaaacaaaactgtctttccccagattaccacggtagtcttctgaggtgtatgtacaccagaagaattgccgaggtgtatgtacaccccactaagtcggccagcgtatgcggtttggagaatcgaggcagagttatgtaaacgacgggtttaggacttcagggatgaccgcgagagccgcgaagacctggaggcagcagcgacacaagcggtgccgcgcgtgtgggcgtctctctgtcgcttcagacgctgtcgttttcactcctgtgtcgcgcccgcgagccctgaagacatgacttttgcttgttcacccgcgcttcagtcccga

SEQ ID NO: 1688 - DNA, 2689 bp, Toxoplasma gondii
  source 1..2689: mol_type = genomic DNA
cctttttctgcttgtggtcttgattcgtgtttcacacggaaggccgctcacgaggttgtctctcctggatcttttgcggtcgcttcagaaaacgttttttcacctctgtagtgtgcgagggaaactggaccttgacgaaagcgcgcctgcacactttacttttttctgtttaacttgacgcgaatcagtcctcggaaatcctctctctttcgctacggcagcgcgcaccactcggcgtttccgaaagggtccgtatagtctcgtgtgcactcgaagcccgctgcgttgcggacgccatctcaggactcttctgagaacagcaccttgccacagtcttcgcaagtctctgcggagacagctgcggtggattctcctttcgtagtcgctgcgtgctcggagagtgtctgaatagcatgcgaacatgcctccgcgctgaaagccgtcgctcggaacactgtcggcagaagcagaagacatgttcactaaacagttttcaccgaacgtcctcgcggcggttgtgggagaactaggtgcagcggtacacacttttctaagagcgagatcacggacgacccctgaggtggactgtgcggcactgcaaccagaagttgctcaaatgccgccttgtctgacgttccgaaacgtttggaagtgcttgcctgcaaacctcgactcccttctcgttctctgaccacgagaaaaaacatgatttcttccccttcactttcgaggaagtatcacgtccctgcgtctttccagagtggcgatagccctcgcggaacgtttctcagttctctgcagagggaacctgcctggctgtttttcctttcttcttcaagcagacacagagacccccttctcccgcgttcttcactgtctcctccgagaaaaagaatctcgcggcattgcgtctagaccaggagaccagccgtctgaggtgaggggaccctgtgaacggacttcacctgttccagcgcagaagtcaggaaagagagcgctccacgactccgcaacagcagtttaaaggaaggctgagagtcacgttgaaatgcagaggcagaggacatccacgggagaatcaccgtgggttcgttaacaccagcatgtcgacacactgctccggcgagtttcctctcttgtctgtcgacgaccctgctgcacactttgccgtcgttctcttcctcgcgcttacccctcgcgttcggccactcactccgatcggcacaaaggccatggccaaggagaaaacaacggggaagcaatcccgatcatggggacgacagatccggaacgtgtctgtcgccgactgcagatgggcgcaagcgttcttttctgcgtttcttcgcgatgcctgcgcgatgtgaagtttctgcacgcgctcaattcgacggactcgagggtctcgtcagaagtttctccctcttcgacgcaaaacacgattcacagtcgttgcgaggacgcctaggccgtccgtgcagactcgcgtcctttctttcttttgtttctcgagaaaacagtctctcgaaagaaacgcctgggagagctaccttcgacgctgtgctgcgagccggctaacgggcagtgcgctttctgagcgtcacgcgtttccacatcgaccatttgtcactctgcttcgacgaaatgtcgatagaagattgcagagggttccgagaagaccttacataatgtcccgttgcatttactcaaagttatacagtttactggtaagtgtggaactcgagatgtactcgacggaaatctcttcttgcgcgaaacctcatctcgaagtaggcgagctcgacttccttcgaggcagacacggcttccctcgcgagaattaactcttttctgctctgcgagaactaactgtgtgattccgtttgcaggaagaacgaaagtcttctcagtcgcgtcggcttgtgaactgagggaccttccgttcggtgtgctgccgtcgcaggagggcagaactttttctcgacttctttccggatcgctggcgggggcgacgctgacggtcaagacagacgcgtggagtgttggcttcgcgaggcggtcaggttttcgcgaaaaacgcgtgcattttctccagaaaatcgacgtccgcacccgagatctcctcgaatcagtccggcggccgttctttttctcgcttttctcggcgcaaactcgcgagaaaggcgcacacactgcgacgggggtgtgtgctgtctcctgcttctgcaatctctcttcttctgccttccttctttctactccaaatcgagaatcgagcgttttcccctcgtcctccccggcaacctcttctgcgcctcccttccagcgcttttccttcctctcccagttgaattgtctctttcgtttctccaccctctgtggctttcgccgtctcgcttctgttccctcccgttgcgattccccttctccaccgcgtccttctcttctcgtcacaaaatcgtcgtctaagtctttgtcattcggctgcgtcttgtctctcctctttgcggtctcgtcgctcgcggttccctcgagtctttccgtcacgttgcctgttgtctctcgcgcgttgtctcctcgtcccgccgacgcgctgtgcgacgcacttgcccttctgtgcaagctttggaacttctctctttatcttcctcgtttctccacttctgcgctggcttcgttcctctggaaatga

SEQ ID NO: 1689 - DNA, 2062 bp, Toxoplasma gondii
  source 1..2062: mol_type = genomic DNA
gaacacagcggcgagtcgcggccgcaaggaccgaaagaaccattttggggcaacgcagagctacgcgaagctacgtcgccacttgctagccaactgcgtgttcaagaatgagatacgcgaaggcggccaagatgccaggaacaaggacgcctcccgactttcccgtcaaaacatgttttgaagaaaacgaaacaatcaactgcgggagtagatgaaagatgctacgagttgaaggaaagctccgaaaacggaactcgtggctggatctacagcgagaggggcagtcgaaacttcgtgcacggggtgtacgaacacctagggacagcatgtgtttgcgcggaacctcgagttttgaagaaacacgtcaaacgatttcctcttgtttctctagaaagaatatctcaagatgcgtcctgttctccaacagaaaatcggcagaggtgtgtctgttctgctgtgaaagatgagagcggtcctcgtttttgcggctgcgaagccgagcaagactctgcaagaggctcttcgagacaggcttccctcggttattctccactttcctctaaggtgaaaacgccaactcgattcctccgttttcgcatccagagtggcgcaaggtgttccatgcagagggcacagacgttcgcaaaacgcaaaggacgggcgttttgggctgtacgaacacgggcaacaccctgcccaacacagctggcgaagaggttttccacaaaggcagcgaaggcgtaggagagcacgcggagggagccttatgaagagagaggggagcatgtccgtttctgcagcttgtagacaaatgcaggtgcgtttttcgtgtttgtccggtcgagagaagtctcaaggcactggtggactccgagagactcacgcagagctgaggatatccactgtgcagatgtgcctcgaccctgtgcaaagccacctgaggaacaagaaaaggcggcacaaactagtacagattctaaagttggaaggagaaggccgccgtccaagacgcgaagagaaattcagttatctttaaaccctcgcgtgagacaccgagcccgacagatacctttgcggcacacacccctttcaggtttggagctggaaaaggagtctttcaagaagggcctttgagaagatcagctgagaggcaagagagctgagaaatggtgcgctcttgtttctcgagaacgcaagctctcgtattgctctcgccgatgtgggcagcaagcgcatgcggagagtcgcatgcaagagcagcagagccgattttgacatttccagaaaaagccttcggctttcgacactaggaaaacgaaaaagcgaacatccatggattcctgtcagcctttttggaactggagggatcctctgaaaaagccacaagcgtcgtgtgttccggcaaagcttgccatttcggcgagtccgcagcgaaaagcggagacgagacattctggttttcaagtggagaaaccgactcagtctcagtcaaaggagtttctgctcttgactccgagaagtcgctttcttcctggccttcagggagattcgaactcagaattcaacccctcgcaagtgcctgcaggagtatacgcggcgagatgaagccaatggagacgattttcctgtcctgcactctttatgtacacttgtaaacgcctacccgtcttcactgagtctccggtcgttcgtctgtctggaagggaagaacatgcaggaggtctctcggtcggaaagagtatctgtccctcctcctctgtgtctcggcgttgctcctccggtcctcctctccgtcgtcgtcttgagcagctgctttgtatcgtcgactcagacatcattcgccgtctccttctctcgccttctttctggcgtttgcacacctcagcacctgtgcagcgctttgccgtcgctgtcctttgacggtggcccctgtttcctccgcctcccgctttctgcgggacttcttcgttgctgaaccagggcgtgccgttgcaaacaggaagacaaaccagttgaaaatggttgcttcgcttggttttcctctcctctctgtttagaacca

SEQ ID NO: 1690 - DNA, 2327 bp, Toxoplasma gondii
  source 1..2327: mol_type = genomic DNA
tccgagagacgaactgcatgcgctcatgtgagagtgcggattgcacggcccggagaaggcgagggttggcgggagagtgttcaaggcgccagaaaacgcatcggaaaaagtactcgctgaaggcggcctcgggagtctgtacaccccacagggcagggaagaagcggcccagccacagggacggtcatgcgtcgtcctccatgcggcgcattcgtttgttcctgccccggcagacgatgtctgctggtcgtcaggtgcaggtcgacagagggaagatgtctccttcacatgagtcctcggattagagagaacttgagcatcttcatgcgttccggtctccgcaggcgcgtctcgtgacggttgcggaagcgtcttggacggcgcgagttccaaagtcttttcttctgatggggaggagggatgggtctttgggcagagctgcgtattgagccgactcccatctaacgcttctttggacgaagaatctgttttcgcactctctttctcagatttttgtgcgtcgtctggattcgggggagcatttgactccgctggagccgacgcttcgggccaggagtcgaccgtctgaacaggcacagtgcttccctgtggcgtgaggggagccaacggggcatcgttttctccccggctttccccgggaagagacgaatgctcatgtttctcctcttcgggcgcagagacggaagaactcgctgcgaccgtgtctgccgctctcgcagcggacagaggagctgtcgcggcgaaagacgcccctggcacactgagacaggcgcgcggcattccttctcgaaaggacgtttttctgtattcggcacagattgcacgactcacacgaggtatttaggtctatgatcacgcgcaaaagactagaatgaaacattcaggtcacagacgattcggccgacaccagactcccctcgcatctactgtgccacaacctccgacaaactgtgcagctgcgaccagcaggaacgctgaacgacgcagacgcgacctgcggcgatctgacgaatcttgaatgtcaaacctcgagcttgacactcgagcctttccatcggagccaggaaggactcttgaacttcgcaaagaaaccgcgatacagcgatgcattcgagaaaaaatgcatgcgcacacacaccgaatacatgcctgcatatgaatacttttttttgctacgtagcggcgggtttcagcggctgctaatgtgcagttacacgagtcgacacctctcaggaagtaacgcgggagaggaacagtcggcgatgaaggagagtgacaagagactgcgttcggttgggaggaactggcggacgccgggacatatcttggcgtatttgcaggttcctgccggatggaaggggcgaaaatccagcggcgctctctcgaaagcaatctttgtaaagaatcaaacacagtgttgcgcaaaacttttccgcttttcccagactccacatgtccaaccatcaggacaccgacctcagacacggggggtgggagaggtggtaccgctgccagccaggaggtctgtcacagacaaaagagtgcattacggaaaaaccagtcgagctacaggggagaaaaatcacgcaagcaaacagctcctggcgaagagttcttgctggaaaaaaggctttggtacagccacgtgaaggtacagaaaactgctgtttccagcatgtctagtcaacctgcagcagcagctgtcgctgcacacatgcgcatgcgaaaaaactcgacacggagtctcggaaggagaaccccgttttcccggagaggaagtgtctataggaagtttcagagagctgttcttatctcttcaatcgcgttttaaagtgaaggaagcaaacgcgggaccttcaagtgccgagagtggctttctctgcctctctacgcacatgctcacacatgcgcgacagaccttgcgacggaagacacgagaaaaccagctgcctgctggcccccctatcgaagtagaccgtccttccagtttttttagaaatcttgtaacagtaaagctcaccctccccatttctatcgacgaactccattccttttcaagagacgctctgacgtcggtcggcgactctcccggggtggtacggccgcgggtcgctctcttgcgcattgattccagcacagagttggctggtgtacactcacgctgtgtttttcttcccagtttctggaacttccctcactcggactgcttccggagcgcctttattgcacagtgtctgcgcgcccttcgcgtccaaggagtctcttgagatcgtcaccctttcctcgttttgttccggctccaacca

SEQ ID NO: 1691 - DNA, 1416 bp, Toxoplasma gondii
  source 1..1416: mol_type = genomic DNA
caaatgtattacagtgttcgattcgcaggttgtcagccacatctcacggctagtgcagtcgactaccaccaagcgttgtgaggcagaagtgatgatgggttgcgtcgacttgtgcaaaaagacgtttcgtgagtttttgtggggaacacgaaggaatacatgtttcaacgaggtgtacgacggttttcgctgtgctgcttgcgaaataaagagccctctgaggatgttaaaacccgggcgtctaaaaatacattgtttttttcgtcctgtcaccgcaactttccgactctgaaaattctcatgtttttgtaacggtagtgtcgtagaacgcgactgcattaagtacgcgagatacacccatctcttagatggaattgtttcactgctgagtcggttcacctgtcaaactctaacatatctcgtgtgcctgataaaagttaatcgattaactgtagccgaagaaacatcgcgcctatcggacctttactgatccaaaatttctcatagtgtcataaggaaattatgactcgaaaagggggaatgcaccccagaaacgtattgtctctattgcacacgctccgcacaggacggccacgtgggggacaaccgtcctactacttcaaaacgcaaggggaaacgaagatttttcgggacggaaagacaaagggaaagaagttgaaaaacaccgattgaatcaggtgtgctaccctagacagtcgacactccattcaccaggcagtgaagagcatgattctgttgaacatcgggacctcgtgactttcggcatacaccgatatgacttactgaatcttaagaagcatatcgctctagcccagcactttaccaacgttggctgtatatctcacagctgttcggtcggttcatgtcggttcatgcgtcagcatcctcgaaaccgttgcaaaatccgtccgagtcggatcgcttcggcaacactccttcagatgtgtgcagtctatagacaagctcttgcagactgagttttacttcggtagacgctgcaacgcgtacgactggaaggacagatttaaactcgttttggtttcaacggttcttcaatggcgtgcacgtttcataggaatgttccgcagaaggaacacttgctgggagatgtcgcgatcagtagatcgttatcggaatcgactgttggtggtcaggcagaaataacgtcacaacgggaaaaaaagttcctgcacccgcgaaagaaacgaaaggcagcgcagccgttcaatctggcctccagatttactggagttgcctctaaatcgttttctgggggatgtcgaacggctcgcgagcattctcgaggccacatccgttcatctcagagcgtcgcctccacactgatctacgcctatttcctgttccttgccccacaatctgtgttgtacccctcta

SEQ ID NO: 1692 - DNA, 1567 bp, Toxoplasma gondii
  source 1..1567: mol_type = genomic DNA
cccgaggctacatacgtagatgcctttacgcattcatgtaaattttattatttatgcatatgctagttatatatatatatatatatatatgtatatatatatatatatataacgatacatgactgtagaggacctctgttacgtgtgggattccaaaagggatataacacgtcctgggaaggtttcaaaactcgcgattagagacagtttttttttgacaaagtgaagggagcaaattgtagttgaagagagctttcggtagtggcgagtgcggaaagcccaaaccgtaagcaaacgcagactgtctgtggaagtgaaggaccttcgtcgattcgaagacagaaagatcaaagaagcgaacgcagagcaactctaccgcccgcccattctcctgctttgcttcacacagaacaaggaactcgcattcacagaaagaagatagctgtcagatttgtgtcgctggcgagtcgccgtcctcaaatctcttaaaggcttcacattacgaatcctgtgggcgcgtgctctcaatcgttcacttcacaaaaaattttcggcattctctctcttcctctccgtccggtctcatcacactacatatatcatatatatatatatatatatatatattcgatatttcgtgggtgcatttgtttttcggttcttccgctgtgtgtctatactagtatgagtctgtgtgtggttgtgtgtgtttgtacaagcatgtaggtagtttcacggttttcacggtgctatccccaagagcagggaaattgctttcttcgtcatctttcgtctgttggagctgtgcatgtgagagccagggcgaagaaaagagatagaaagtgaaagtgtaaaactgctacagactgcgtttgcaaacatacagaacaggggaggacaaccacgttgctttctgtctgtttctcctcttttctgcactgtctcatgcgccacaccgtccacaacacgcttcctctcggttggggttgcgtcgtgtacagagagccggaaaaatcgcctcttcctcgcttttcttccatttttcttgagcgttcctttcactgcgaagtgtctctcttatgtgggccgctttcctctccctttcctcttttctgcgactcttgcacgagcaaggcgcagagttcgatgctttcaagaagaccgacggggaccccggttgcctgcatgcactacgcaaccgaggtgtaaaaccgggattctctggtcaagacagagaaaagcgcgtggccgctcttcgtcctcgacttattatggacccaaggcagcagcgagagagccagaaaaagagcataaaaagcataaaaacgtttcgcttctccccagcgtgcgacatctttcttcttgtctctctgcctctctcctcagcttttcccgtcgcaccccacttccgcgactcttctcttcgcgttgcttccttctgcgtgtctctgctctgagatcttcttctttttctgggcgcctctgaaaccgctctctgcctctcgcctttgttttctggagtctctttcaacactgtaaaacctttcaactctctccttcgttaaga

SEQ ID NO: 1693 - DNA, 2273 bp, Toxoplasma gondii
  source 1..2273: mol_type = genomic DNA
tgaagaagatcaaagagccgttgtcttttgggtgccgtgctttgcgccggttcttagaggcacttttgccactcgcatccacgcctcttgtcgcaacctcggtggatatgcttcgatctttgctgtcccgaatgcaaacacagttccgctatttgaaggccgcagcggccggcaagcgggcaagaggccggaaacaacctaggattttctttggattttgtgttttccgagtactaacctatcaccccagtgccgtggtgcgatggcagggaccaccgttgttcgtcatggagaaatgtgacgtcaccacatttcaaatgtaaaagcacagagcgcagtgttccaccgtcagaaaaacacggaatacgtccgggttcgccccgccggtgggtgggtccatcatttctttctgcgttcgtgccttacgtcggcacgtgtgtgtgccagccacttttggtcaagtggcagccaagagctgtttcctgcagcggtagaagacaagaaaatgcagtcgtttattcgacgaatcagcctgtgacattgtatctgttttcgaacgactccccagagtgggtacggattacctacggtagtgtggccgcaagtcctatgtccgtattaagaggagtaacacaaccagaacaagaagtattaatatcccggtggatattgtgggtgcgacggctcacggacatccgccaatgtgtgtgctctgtgccacctgtatcaccacaaccgttgtcggccaggtggcaaacagatcccaatttaatgctggggtgcgaaaaacttagcaggtgctgtgttttccgctagcttaggctccccagcaaaattagagcattactagtaaaagcatctagtcagttcagaagacgcaacagagcattgcccagtgagagtcgacacggtttttagtggactctcgtatcagataacggcgcgagaaaactttttttccccctggtttgtgtgtccgcggcagagaagtgtactgggcgcctgtctacagaaagagaaaggttcgctgtcggaccctgagaagaatggagcagattgcttccgttcatcttcaagtcgactcaaatgagtgtagtccgagcctgctacggattttgaaggagctcattcagttaatagagatggcttctgtgtactgagaccacccgtgatgagcgcagtgtagcagcgagcactgttattggcaggaaaagacgaatctaacagaaatgacagaaataatttgaggtagttgacattcgcggcacatcggaacaccagtgttgccattttctggcgtgcttatgcgggctgaccttgtcgaggagacctttggtgttgctgcgttaactacactggcggaccgaggccagtgaactagcataatcaacacatgggcatgaaatactataaaacagagtcatacatacctagaagcatagacgcgtacggccgctacatcgaatgctgaagttgtgaacgtgtgagggagaaatataagggcgccagctagtgctgcagagtatttcggcaaaacgatgtttgttctgttctaatggtaagccgccggaccttcaggtaccatctttgaggagatacgcatgatatagggatgactgcagttctttcattccacaaggagcaagggagatctcccgctgtccgcgtccttcgaagatgaaaataaccaaaacggattctcgaggctgaaccaccgtgtcggtaaacagagtcgtgttgcgatggtttctggcgagctctacagcagcccaccgtctgctgcatagtaacgccaatcctatatattgcagcgtcaacgaggatgtcctccaggcgaatagctcctctaaagacgtttgtgccaaactatcaagcggggaaaacagtggattcgtgtagattcctttgtgccttgacccaagcacggaacacaggaaagtgagaatctgaaaaatctgtaccgctggaagctgtataggtgaacttgtgaaattacgagaagggaaaaaacgcacctgtggcgtgcgaagaggaaatgaccgacttctgagcgtttgtggtctagtggtagaatacctcgttgccatcgaggtgacccgggttcgattcccggcaaacgcacgttctcacatgcttcttatttcacccgtgatagttcgaacctttgttgaaagaacaacggcaccggcaccagaacatgcttcaagcaaaagttttcggctgggaaacaagaaacatgcggtccccaaaagcggaaattcgaacagtgcgag

SEQ ID NO: 1694 - DNA, 4493 bp, Toxoplasma gondii
  source 1..4493: mol_type = genomic DNA
agtgcgctagagctggtagctgagactcatagcgaatgatgtaaaaaatgattcgctgcaccgtcaaaacttagtttcaacttcaaagtacagcaacgcttgcaacgcgtcgtacggtatttctatcatggtgtaacacgtccttagtgtttccctaccttgttcctcggacgcgtacggattcaccacgaagcgcacacctctttccgaggcgaagaaagacctcgaagaagccggggctccacaatgggtggcaagtttttctgatgcgaacgaggagtccaccctctgagagccaagcgttcggctggagtcatggaaaggagctgctgaaacaccagaatacgcgaaacgcaatggttcctctgcaggagggaacagaggcactctgcctagaggagtcgtcgatgcactgagtttaaagacgctcggctgtcgacgtccaggcgttttgccatctggacagacagcagaagacgacgaacaagcgaagtccgagccccgatcgacagacgaatcaccaggaggacactcggaagcaagatgcgtttgctttccactgggatcagccatctctgtaaacaaaaagctacggccacagtgatcagaacgacggacgggagtgcaaggagagagacgaaaggaaaagagcttcctcagttttttgtccagtgatttgacaggcgaagaactcgtcgattcgttctagattgaaatgcacaaaacaagctctggcgcaatcagatagcaaaaaagccaacgaacaggcgtgacttcacgtgggtatcgctgagtcgaggacattgcacggattcgtgactgcagaaagaaagagccccgaaaaggtaacaaacgagtggtaatcccatcgagcaactgaaagcatcggtttaattcagctacacgcttgaagagggataaactcggcaaacgcgcgagaaaagcgcagggcagagccccaaagttctcagcgtgtcgtctccagctttatttccatattttgcctgaagactcgagcaactcaagcgaccccctatgtgatatactccccgaagaagatccactacgaacgacgacgaaaggttaccacaaagtgaagtcttgttcttatttctttcgtcggtgactatcgagtgtcgacatgactcggtgtctctggaacggctttggggacgctgtcgaggtactggcagcgtctgagaagaagcactccccaagtcagtacattttgcacgcgccacatcctatcgctacgcattccagtttgtctgagcttccgaagcaccgtttgcccgttttgttgccagtgtttgccgtttcaacgaccccgagctgccccgacttttctcgcgcaaacactcgactcgatggagtccagcgcatcccagtgttgtgaatgtgtgaatcctgactctgtctcaacggaagtgaggagacggctgtgaatcagacacgaacacaaatatatctcctttctgctcgtgctgtctctaccatttaatctcttccgtggaggaaaaatgccgccttttggtcgcgagaaaagtggtagagtagtagccacggggagaaggccgcgtagtctcatttggctgctaggtgtcagggagctgtctaaatacccgcggaattaaaaacagtgagagagggctgggtgaaaggccactcacggagtctccattgacggagctggaaaagcgtagctgtcctgagtcttctgaaagtgtcctactctacgaaattctccaagggcagttcaacatggactaagatattagggcggtgagagtggctctcgggcacccggtgaagatgacagcacacacgcgagattttcctctgactgagaaagtcacgttcacctgggcaaggagttggggaagggttttcgttctttccttcttcctccgcaacaggacgttctgtatgcaaatttgagtagttagttcgcaaaatgtggtttgttgagtgtcatatatgatggcctgcacagcgtgatagaagtatgctgaaatggtaaacatcggatactggcgatattcctgctcagaactcgagctgctagatttcctcagtttcgagaggaacacgccatggctacctttatgcttttcgtccgatattttctttgggtttttgctgagggtttccccgtcactccggtggcagcaactgatccatactaaagttaatagaatgtgcagttcacgagagacaaacaaacactggggtagcattcttaggaggaatgatctggtacaccacatgagggaagtcaggtttctctggagccagagtttgacaccggtggcatgctcgaaaacgcgatggcagccccgaactttcgctgtggggtgacgtagaggcacttatctacacactaagggtcttgtccccatcaagggcttcaattttttgttcgatacgaacgtgcagagacgcagcgaatcgtctttttccatgctttccggttgagaacaactggggagaggcaacgctgcgaaaccgtactgcctgttcgtttctttgacgactaaacccgtattcttatttgttacatacataatggtaatcggcaggctgcgccatgcccgtgggtttgaccgcttccacgaggttttcgcaggtttggacacatctcgctctcgttactatcaccagaaactagtgctgctctcaaggcgcaccaggcgacaacatcgtgttggcatgtatccttgagcaattcaggctctcatctcaatttgtgacatgaaaaacgaaagcgacaggcgactgggcggttgattgagtgtgtttggtgttttggaagtggtctacctcagaggcatattgacctggttgaccttgaccgtggtcatatgtttgtcgtaaagattaagccatgcatgcctaagtataagcgtctatgctgtcaatggtcattaccacagagaggtgtgcccctgcaatcgccattcacattcaacgttcgtttttcctgggccttttgagcgagatcccctttgatggcgggtgatgaaaatgttttaatgagtgacagagaaacacgacacacctctgccgacacaaacacatatgaatattcagtatagatgaagtataagaaacgaccaggaagcacatgtatttagtcgtcatgaacaaaggcagacacctgagttgagaaaatgacgaatagagacaggaacacacgggctgtgccacttaaaggcaacgcgacacggagacgacgtttgacacaagaaactggcgcatgataaagctgtagacgtacagacacccagataaggagtgataaatcgtgactccgagcaagatgtacccatgcacgctgcagcggcgaagaacaccctacagtgctcagagggggctacgagataaagggacttctccacacgctacggcggtcacaatgaagtcagaactgtaccaattctattctatttacgctatatgacgtttcccagcagatactgggtcgcgcaaaaccagcgtcgatgcttttctgcgcacggtatctcgcgttctgccactgccccagacactgcgcatttgcctatgttttctggagtatgatagcactagaaaacgtatccggtcctcaatgtgtatatttgtgtgtgatcgtgcctgcctgtaaatatataacgatacgtggacgtttattaaccggcttgtgcgcactgtctagtcgtgggtcaacatttcttgcgctttttgcacctcatcttggaccgctcgcagtggcactccttctctccttcaagcctgcagtcaatgagggaaatatgccactggattggcctggaccgaaaaatgcaaagaaccgactcaataaaagaaattcaaggacgagatgccacagaaacacagtacccgcctctggttgagaccagctagtgtcccccccccagcatgctgttgtttgcggagaagagacggcgcgttgacactaaatggaaccaagaaagcgccagaggccaaaaaacatatatttgaaaggtaagagagagagtaaccttcagaaagacgaacctattgaattctggggatcggctgtctccaatttttttttgcgataggcgagtctcgatctagctgcatgcagcgcgtttcaaggcacgtcgacctcgtcgccagtctccttactgcggcatattccggtgtttgaatctgctctctgttcttctacattctactttgtgtctttgtcctgcctcgcaacagtcgctttttcgtcttcacagccgcttccccttctcgtcgtctcgtcctgttggtctctttcctcgccgcctgtcgtttaggatgcttgtgagcgatatgggaaactagaatgacgtttgcagctctttgtggtttcttctccctgcagccctccttgaatcaaaattgaatcaaaattgtaagatgaatttagatttggagctcaccgaaaaaacacgaagtgtgcccggaagccaggtctctttcctcggcgtgtgagcaga

SEQ ID NO: 1695 - DNA, 3671 bp, Toxoplasma gondii
  source 1..3671: mol_type = genomic DNA
gatggttgatctcagcccgtctcttctgacaatgcggtcaagagattcacgctgaaactgtgtttgtgtgtgcgtggatgcgtgtgcgaaggtgcgtgaaaagaagcagcgcaaggaaagagatttctcggatagcagagacaggagaccctctccctcaccctctaggtggtgatgattccccgtctgggagcttcaggcgatcattgttgaacgttgcgcgttagcaacattcacgcctaccaaaagtctactaggcttttatgttgagtgagcaaaggtatagggaatcaggtatacatgtgatgaaagcgttggatgagcttcggacaaacctctactctgttggttatcctgtactgtagaagttccttcgctatttctcatctctaggaaagatggatcggtttttggctgtgaatttgtctcaaagcaaccctacctacaaaagtttcgattctgtttttcgtccgtaaaaaggtacaggcactccgctatgtaaaggcggcgacaacggagatgtacgacgcattcgagcgttctctactacaggcgatttgcgacgacacagtcgaaaaacgacacatacagcttttcgtacgcgagtttttcggagctccactcgtgggattttttgcgaatggcattgcacatgcactgacaacccattcacagacgagaattcgcacacccactggtggaagttctgcgtacgtagggtcctctttgccactctctacgttcctctcttcaaacggcactcctgaacacgattgcaacatactgctctggcgtgcacatggctcgaagctccactggattctgtagccctgctctgtcccgtcatcacgcaaaagtaatggatcttggagaaccggcgctggggcaacatcgaactcgagctttttgtaacaccacaaaagcatgcgttccttcgcagacacattcaaaatgtcgcagacttgacaagaacgtcaaacggtgctttaccacacaggtcctgctatttccttatgcgacaggcgaggccgatgaactgaagtcatcaaggccgggcttaacacctgtcagcccttcgctaagaaatcagaaacattctccaaaatggtgtggcaaattctttgccgagacgttttagaggatcaggaaaattacgcgattctcctcactctacgttagaccaggcgatcacatcattactgagagcaccacttcccgacagaaacgccgtatgcacaaatccgttccgcaagacacacctcctcagcctgacagaaagtaccatcaactcctgcattttcaccttgtaaccacttgtggcaacaagaaaaggtaaatctgccgctctgaattccgaacaaaagcataactcgttgctcgcattcttgctcggaaccgttggaggtggtgtttgccgctttcaaggatgtttcgttcagtacggctggaggaacgcgcctccattttctccagaatactccaccgcaacacagttacatcagcgccatgcaccgaggtgaaacaatcacatccttccccagtcactgttcccgcgctctagttgcgtcgatgagtgtgtgcgggtctagcggcggtccgacgaagatcttttacaaccctggcacttcccacatgctcctcgatgacgtcaaggacagaatcttcgtctagaacaggactgcttggcatgtcttgcgatgaagaaggagctgaggcagttatggagtcctgcgcgttcagcgaccactgacctcgactccaagaccttagggcgcgcactacgtcgtcttgatttgaagcagaagaaccaaagcttggcgctttcgttatgtcaacgtctccaatagaagacagactgtccacagtgctcgcatggaagtctttcgtctccatgctgtcgcctttctctaccttctcagagtgttcacaggtacccgacttcactgcaccaccgggtcgtcgacttttccgggattctgcaacaccggtagacgagttcccccctctgtttgccacttcttggttcccctgcttctcgttcccatcgtgaacagttgattcggcttccatcatcgatgccatccacatttcgcggctgtgccgccgaaggactgtgacgacaggatcgtcaggtaaccgtggtgaatggagtcccatgttcttgggtttgagaccagttgaaaacaaaattctacgctgaagttaaacacgcgaatgacaccccggaagcgagtttagcggtgcaagaacaagtgtctgaacaatgtggaaacgcggtcactgcatcaccaccgtgatcttggcgcgtggcacgcttagaaaagtcataaggacatcaccacaagcttgcaagacatgagtaacaatctcagaacgcgaagggacagatttcgtacactcgctctgctctgtctctttcaccggcgcgaaactcggtgaaaccaccgaaatccacaaaccaattcgatgggaaaggcgaagcagccgccgtggactaccagccgtaccggtagggctgaagacagtagaagtcaaccgtctcaatttccaactccatcaacacaagggacccgagtgacaggaggcaaaattcattttcttttcaactttctcagaaaagtacttctcaaaaatcatcagaatagtgtgtctgtcggtgttaaccaaaacccgttgcatgaccgcactcacccgatgagcgaaccatgtagcgaatcgcgctgggcgtcgccggcaaaagtgaagcgggtacaggcatgtctcgaggcaagaagctgtctgctcagtccccagcttgcacacgattatccaccaccaaatgatgaggttcatagtattctcctctctaccttttgcttgacgctttccttcccacaacatctaagcgaactgcagaagcgccaaaatccccagcaccgtcatctttcttgtctgttacatgcatatcgtggcggcactattttcaccaccgaaatggagattcttctttctaggatgcgagttgctgctccgacagagggatcgtattcgagggggaacatttcattctaaattcacatatcttcaagttttgggctttcctttgccgccaacgttgacccagtgctgttgtatttgcatgcaagccaacaggcaggccagttcagggtcgatcgcagcaaaacatgcgacgtcgctgcgttcctgaccattccgatatgcgccatttccccctaatctttcccgctcgtttcccatcaccttgggatggtccaaatcccatctcgtgggcacttgcttgccgttcgcggtgaaaatatcctatctcgtatcgcttttagagacaaatcgaagcattgccagcaatcttacacgagcacctgaatgttctgtgaagtacgcactgttttttcttctcgggagcccgacatacgaagagcgaaagttcttggctacacaggtacagacagtctcctagatgtgtgacagagaggctccccacgtgtttgagaccagctaggtttcaccaatctagtggagccaggcctgcccaagcagaaagacaatttgctatcccctccctcactttgtcgaagttggaactcaaagagagaccgtaacctcttcgtttggtttcgactgtgcaacccgtctgacgaaaactagccgccccctgtcttcccttgaaaaaa

SEQ ID NO: 1696 - DNA, 2691 bp, Toxoplasma gondii
  source 1..2691: mol_type = genomic DNA
aggtggaaacgatgtacaatcttggacatcactgactggaaagcggcacgcggctccctatcgtcatgtttcactcgccagtgatttgcttgtttgaaactatctacaagtctaccaactttcatcaagcgcaagaaaagtcctcaccgtaagatggcctcagcatcccaaagggtgacgtctccatctgccatgccacccgcaagaagccccagagcacgttcgccaacacccactccattcccgtgttctccagcgactcctgcaagtttattctggccactgcttccccacgcgatgcactgaaagggtgaagaggcggacacggaagccacgacaggcagcgccgtggaagaagaggcgaagtcgacggtggccagttcaaggtgtggatcgaggcccatcgtgcccagggctaagtacagctggtggctctgtagagaggacccagaactggtagatttttcttcctgcgacgccgcacattttgtgtgggcaggccctcgtgtgggcggcccccacgcaatacaagcactccggcacacctccttcagtgccatgtttctgtctggcgaaagtcagtgaagggccaccgaaaatactggtgacgatatatcaagctggaagggtgcttgcttgttggaagagttccacgaggagtccaaattactctacttacggacggggtgtaacagcggcaacaaaacgccaatatcgagaaacagacggaagcgacgcgtaaagaggaactatgcatatcaacaacatcccaaaaacgggggaaacaactgaatgggggaaaaacaaagagggagacctctggattctatgggtcagacgaaatggaagacccggttttaagacttcagcctcctcgattgtcactcagatacggcttgaacctgacggctactggtgaaaacaacagcacaccacgatactaaaaacagtacaggacgtcaactagcacatttcgaaaatgcctccttcgaaacgagcattcagatccagagattaacacttctgcctggcgtgatagagacgggggtccctgagcatcgtacacgctgaggtgaagacaagaggagatccgaggaagacgaccgcagataacacagtcagcagaaaagcagacgaccagtacacggaaagaaagtggtaagctgctgaaggcacatgaggaaactaggcggaaactgcacatggattcagagaatgtgaagaatccacgatgtcctgatatccgacggcacacacaaaaaagctctggctttttggggtgtatgtacaccaccgcaccagctgccgacaatatctgggtacactaacttcggatttcggtctaagatccgtgccttttcctgaactaccctcacgcacagcattacgacgcgtacagctctcgcagggcccgaggtcaacagtttccgtttctctgcaaaacagcaacaccgcctgtcgccagctgtgttcttctctggcctcttctagccgggcagtcgctgcgaacgtcgcgtgccacagcccgggactactacgctgctgcctcagtctcagccgtcctaccggtaatgtgcaaccgtcccgactgttcccagctccacagtagaggtgcgaacccccgctttagctgggggtcgcctggccaacgacacgtaatatggtgtttgccgtaggcatttgggtaaaccatcaaggttttgaatcaacctgcgagacagccctcacagttctgtcttaatgcttgtcttcgatgtttttcctgtctcacttttcgtcgccagggagagtttctcgttctcctcagcagagttcgactgcgcgtgacgggcatgcatgcttcttccctactgacgaatcaagcgaaaactgcatgccccatccgtcgacagcaaaagccgggcagcgaaaaattctctgtggggcgggactcaaaatttagcgacaattccacgactacggaaaggtacaagaagacaatctaatctccactgtctgcggtatttccacttgctgttggagaagcaaggccttttccgctcggcagcgttttgcgtcgtgggccgccaagccgtctctctctgttgaactcaactgccccgtgatgttcgtctgcatgtaaccatcatctgtgccagcgccacgaggcgatacgcgctctttccctgtcttcctttcgtgtgccgctttattggaacctctgtgccatccatcgcgtagaaacagttccgggacattgaccctcatctgctggtgtgcgttcctggccctgtccgatcacccttttgtacgtcacctggtcgtttcccccctttttttctcgttcattttgcaagctgttttgatgcaaagcagatatacctgcttttccaggtctgcccccttcccacgccgagtggactaccggagttcttttttaagcagggaaaggcgtccgctgcttttgtggatgccggcgggctcgcgggtctcactgagcttcctcggtcgtccttgaggcaactggaaggcagttctcttctgagttgcctctggtgacgtcatacaactcaaaggtgatccactttttcgttggagaactcgtgtctccgcagcatgcgcaaagggagtctcggaccctcaatttgcgaagtttctactcttccgaccgcgtaactcgtaggtcttaagcggacgaaagagttcgtgcaa

SEQ ID NO: 1697 - DNA, 4398 bp, Toxoplasma gondii
  source 1..4398: mol_type = genomic DNA
ctctcctgtgtctcgtcttcacttgctcgtcttctcgtccgtttcctcgcacctgctcagggactccgaggtcgcgcagactttcctcgacggggaggaggaccaagacggaccctcccggcgaagcgcggcttcctgcctgaggcttcgcttctctgctcgcgacactcgacgaggctgccgccgtcaggattcgctcgtggtggcgcaccacgcgctgcaggaaagcgtgcgaccccagagacatggagagaaaacacaggaccaggaaagaagcagagagagagaagaaaaggcaaaaagaagaaagcaggaaaagcagaagagggagaggagagaagacagagcgacgcggtgccttcaggacgcttcagaacgcgcactggggtgcccgagctgcccctctctcttctccgtcctcaaagatttctcttctacaggcaggggtcaccatctgcctctctcttcgtctctctcttgttctccctcctgctcgccgccttgcgccctccgctctcttatcctcttctccctcagcttcttttcaccctctcgttctctctcgctgactccaggcgcttttcctctccttcttctgccttctctgcaaaagagcgtgcggactgcatccgcagagcggagctggagaggagtcctgcatgcaacgcctgaagaagcaggctggccgttcagctggagtgtctctcgacggcctccttgtacgacgagagataacatcgggggggggaggccgggcagatgcgcctgctggggaaaagctgcactaggcgagtaacgcgctggtgcgccgacaagtaccgcggcattgaacgacaaaaggcgtcacatgctaatgaacacagacctcaatccaccctgaattacagacacacatatacatgtatgtatatgcatatatctatagagatagtagcaaaaagcgattgacggtgaaggcacctcggaagaaagacaagaggcagagtgtgtcgggagaaaaagaatggcgtgtgcagtgcggaggcgcccgctcgctgggagtttcttcaggacacggacggcttctgtgtccgtaaacagagacaccggaggcgagagagcggttggttttctctttttccttggtacgcagcgcgccagcgtgcagagcgcggtaaacttcagaggtctctttgatgctctctcaaatctgaaagtccagagacagaacggcgcgtggagagaccagccaagggcgggagttccttacggtggtctcacacctgctttgcgtcgtctcgcgctgctttttggcgcacacgaaacgcgggagagtcccgcccagtttagagggagagaggttcgaacaaagagaaagaaggcgtcatttccagcgagacttgccgggaaatattgaaggaaacgcagaaagctcgccctcaacccacccagcgacgtcgcccccgcccgctagctggggagaaagagccgcgcactctgcgactctccccccgatgtgtatgtacacttcagcgtggaggggagcggctcgatgaggtcggggaacacagaggcgactgagcatttcacgacatcggaggtcgcgcccattcttggagaaacgtcggcttagactgaatctttgagacgcagcgccgaacgctactcttagagcagagtcgactgcggtggcggaatcagcgaccctgaagaactcgggagcacagtcgacaggccttggtccctcgttgtccttttttctctgggtgcatgctcttctctgttcctttctagccagtgtcagaggaagcgaaactcacagaaaggaaaacaaagcaagaggaaagtctctgtcggtcgccgtcgtcatctgaggcaaagagcctccgagtgcttgacgcacacacggttgcatgcacaagtacgtaacttcggaagtagagtatctgtgttgtggcactcgtaacaatgtgtgttcatgaagaacgaaggacgcggaagcgaagatgtatttcgaacggagagaggaaaaggtggaaatggtggtgggtccgtgtatctgctgttctacgagctgcctccgggactgtctgtacaccccacgcgtctcacgtttgcgtacggcagaaggattcgtgcctgaacagaagaatcagttcttgactttcgactagggaagccgcgatgctgctcgagccaaggagagaaaaaaacgaagcacccaactcgggtggaggagggtgcgcgcctcgtcacaagaaatccaagtgcttgaaagaaaacgtttcttgctcttcataaatatatgcatctataaacctataaacatatatatatatatatgtatatattcaatcttcttcagtgccacacatctagatagatgcgtatataatgcatgggtcatcatccttttgagataaagggtgcaaacatcccccgcttgcctgtgtcgatgccgaggacctaccgtgtacgccttgtcccgcagagggaagtcatttttttgcgtcggaattctttagtggctggaaaggtgtcacgactgctcacacatacttctatgcatatacgtgtatgtaaagatggaaacgcttatgtgctcccgtacatacacgcatgcttctttctccatggtgtgtgaggccggtactctcggttacgctgctcgtgagcgccgtaaaacgctgcatctgcttccttcgaaagccctcgggacgagacagaaaaggagagaaaatcgaaggccaacatgaaaagcgggacccgctctcagttcgcaaaatagtccgacggacctctgcacaccccagactgtgcctcgcgaaaaaaaccttcctgcatccttctgaaagctgttcacggctgtctctgcaggacacacaatgccccataaaaccatgcatgtatttcacatatacatatatatatatatatatgtttgtgcgtgcatgtgtgtataggcctgtatatatgtgcatgtatacagacatacattcatatgcatatctgtattcatgtatgtatgtacgtatgtatgtaggtgtgtaaacgcggttcttcgcgagacacgctagctgcgtggatgatgctttctttcaagtcgagaactggggaggagacttgggtttcagaaaggcctttctcagagtcaggttttcgaaagttgattcgttgtcgaaaagtttgtccgggcgcctccaaaagtttttctttgcgggaagctccctcggggctgctcttggggctggcagagcaagcgggggcgcctcgcggggtgccgcgggagacgtcaaggtgtagatggacgcctgagagtctgtcgctcacggcagagtttctttcggggagagtttgattgcgtttcgttcgcgctttggaggcgaagtcttgttctccttcctcaaaaggagtggagctacatgctctttttccaagaaatcctgacgaacgtcgctggcagctgagtgggtgcgcgagctgcatgtcgcactgcgcgccggacgcgcgaggctttcagaacgcggcgtcgggcctttttcgcgtcgtttctgctcctcttccccgtttttcaatacgtaaatctccgcgtcttgccgccaattctccgtgcttcgcgcgccctcttcccgcccgcgcttctctcgcagcgagagatgcgacagttgaccggaacgcgaggatgcgaggacgggagagaaacagcagagaacgcgcgaggcttctttcgccgtccacggccttcggagttcttttccggtctccgcaccgtcactttttcaggtgtatgtacacgtgaacgggacatgcagtcgacgactcttcgcggcgttcgcgtcgtgtcgtcaaagctccccgtttcgccgtgaagtgactggcttctctgccgtttcctcccaggttcccggagttcggactttgcgtcttccacgcggtaagccttttcaactctccgcctcgtcgctgccaggcaggggcgccaagagctccgcgcgttgctcggctcctgacacagctcgccgaggccttgggggtggcgccggtcggctgaagcgccctcgagactttgcagtgttcactcctttcgcctttcttctctcagcctccctgtgtctgttccgtcggcgcggaacctggccgccgagctgaggcagcgagacttcttccgagtcgaccgctctctcttcttcaggagtctcttttgccaatccttccttcttccccgactcttcccgcgcttctctcccctctttctctcctatctttctctcctctctttctctcttctctttcttctcttttctgcttcttcgcgcccgttggaagctccctttctgccgactgttgttcgtgcgtcgcctctttgctgcccctcttcctgtctcttctccctcatcttcgcgtccttcctccgcgaga

SEQ ID NO: 1698 - DNA, 4397 bp, Toxoplasma gondii
  source 1..4397: mol_type = genomic DNA
agctgagctggagtcaagccagaaacaaaacgagtcggagccaaatacctccttgaacaacgtgaagtagtcaatattgcgtttcacctgtggttcttgtcctccacatgcactcagacagagatcgacagaggctatgttgatgcaccactgtcgatcaacgtttgacgcactgggcccgttgcccgttcgtttcgcggaatagggcacctggttctggacaatgttcttgggtatcagacacgccaactccgaaccgcgctctgcccaccacgaaatggtcatgtctcggaagttctcgagaatcttgtagccagcaattgtccctattgattcggggtgaaactggacgccatgcagtggcagttctcggtggcgaacgcccatcagcacgttatcctcgtctgtggtccagcaagttggctcgaggcatttcggcaggctgcatccgcacaggatcacacgggataactttcaaaaccagaactgcatgcaccagtaattgaccgtggtgaacaaaagctgactgtgcttacctgtctttgtccacctgaagagaatggtagcgtacaaccggagtttcactctccacgccctcgaatagcttgtagcccctgatgaaactaatagggcttcgccttccgtgtaccggtcgcggtgtcctctgaatctgacgcgacaggaacacatgctcaaaagcaggttagcagagcatatttgtatcttcggaacgactgtcatttgtctacggctcgacaacagttgcaccgttacagttttcgcagagtcgggtattcttacctttcccccataaacatgaccaagaccctggtgaccaaggcagattccgaggattgggacggcagcttccctcagcgcttcactgcacaccccgaaatcatgttcgttttcgacagttccagggcctggagagatgacgatgttatgcacagggccgacgcttgcctttgcctctctccagctggagaattcatcgttccggatgacagttggagccacaccattgatcgttgcaaggtactgaaacacgttatacgtgtaggaatcatggttgtcaatcaacaacgtgcgcacagcagcggacgacgggcttggcagccctcctctctccttggggggcagtggccgtgggaggtccccgcctgcgacgacactgtggttcatgctgatttaattacaacggtgacacgaaactctattattgccaagatatgagtcgggaaacggcgtgctggagcaggcgttacggtcataattccagcctgcacggcagcgttgcatgtcaaagcctcgctgtatgccacgttcgagcccgttgcactgccgcatgtcgtttacatgcgcacgctgctgtacagacacgcaagacacgtagacgaactcaacagcttcatccggatttttacccagttctccgaacatttagtcgcaagctgccaaacaatgaagtgcgtccctgggctggctgtcatcgctggcacttttgtggcgatgctaagggcgtccgccgagttgccacactactaccatactacgccccaactcaaagaagaggtggagaaattagggaaggactgcgacggatttagtgtccaccatgagccgatcggcaacgaccacactattgagtttgttactgtctcacgtgcaagcggaactcgagacagattcttcctgctggcgggtgaacactcaagggaattaatttcggcggaaagcgccctgcactttctccagggtaaggcagctccatctgcttattccgcagcttcatcgtactgcgcgtgctacagtcctatgtgaaagagaaacgaagctggcagagaaagcaggaaaagtgcttcagcacacaaacatccaagttgtcgtgaacggaaatccggtgtcccgggcgaaggtggaggcgggtgatttctgtgtaaggcaactacgcacaatccggtctctggcagcggcactccagcttcgcctttttgcagctgcgaggaaacgagaataacgtcgacttaaaccgcaactggggaggcaagttatcagcgattgataaggtgttaatctgtggtgacgcttgtctgactatagatcactggaactctgcagcggcaaacgcggagacaagtccgggcaataaagctttctctggtcagtagccaagttccaccgcttgtaaggaaattcaccgtcatgaaaatgcacactacagagcctgagacgcaagcatttgccaaagctgtcacgtcgttcaagccacacatcttcctttcggttcattcaggtgagcagtacgtggcttttgagagtgcgaaacggcatccggttttctggtagacaggcaccttagggatgtacatgccgtgggccttttctgcagaagaaccagcacggaatgagcaagcaatggagtgtgtactcatacaacaagtcgtgtttcaaacgtcagtgaaattgggtcatcaggtctgttttgaaggaggttgacgagaagttctgtcgctgtccctacggtaaggacggatgcacgcaggccgttgccgcagagagactagtcagggtgtttcaggagcagcagggaaagaagtcgggtaccagagttctggtacttgcctcgactttgtgtatgacaagctaaagacgcccttgtcgtttgcggtagaggtgtgcaacttgccgagggcctccgattttcacttcaagtcaaacatcgtcagatttacgcccaccccaacagacaagctgagctccataaagcatggaagaaggaaatcaagtttttggatccccactcagacttcagtggattaggacacccacggcgcacgcgcatcggcaaaggaccgcattttgccataatgccggagccagcagatgcttacaatgaatgctttgaggtacaccaccatgactcacctgatatcagatcagcttaatccctccgtgttcagcaatttaatccgaatagcgaagaagacttttcttccacgctaatgaactggagcgaggtaacggattgaccttgcaacgcaaggagatgagattgactgttgcttccgttaggcgtatctggaactcattgaaaagtctagcgaacagctgaggaatctgtaggttaacctgggtcgcagaagtgcgccaagcgaacggatttggtgctttagcaccgcaactgaacagctcggtcgccctcatgtaattgagactggcaccaccacttgtacttttggttgattgcagctgtgaaactgcccgaaccattcgaacacaatcaaggcttgagcagggttcctgttagaatgtggtgctgttgtgcagttgaattgctaagcattttgatcgttaagtacaacgtaaccctcgcgtcccgacgggctgattacccgagttactgggtgacttgagacctcgcagaaaattaaccatcctcgctacaatcgtgcgtgccccgtggtccgaaagatcctccaatgacttgcccttccccggtcagtcacttttcttgcgcgcttctgggaaaggatgacgaccagaacttgcggaggtacctcgtcggggggttggccgaggaaagtagaaaatatgacgttcattactgcgagcagtccatctttagtttttatacggagtcgacttcttgtccgcatgatgctgcggggttcatagtctcctttgcgaagatgcgttcagaagtcttagattctctgtggcaccccaaagtgtccgacgaatgcatgccccggcagacagtttgacagacacctcggcaccgaatagacaacttcggcgtcataacggttcaagcgccttcgtcagttctggttccgatgccttgcggatacttccaaatttggaaaaggactgctcgaatgaatgtacccattcttgcaggctttacgatttgtttagggcccgacggccgcccagtgttctcagccgatggtttgtgctcggaggagcagccacatggaaagcgagcggccttcgccgtccaagtgtgcagcaggcataacccacggtagaaatgccgctgtcgaaaaaaagtgacgccaggctcttacaattcgttttcactttccttttcgttcttttccagtaattgcttggaaatgtttgctggcctgctggagcgcttcgcatgactggagggtttgttcactgcggggttcgttagagtcgcctccggcggcggcttttttgtggggtcgccagcagtgggtgcgatatccgtctctagcaagagacacggcacagtaggacaacgatgttgcacgtcattgaaatattttgatcggagttcgtgtactgtttcttactgcgggaaattgattcgacaacggcgttgtcgccacttttgcgacaccagcgcctactcatttgtgaaa

SEQ ID NO: 1699 - DNA, 4910 bp, Toxoplasma gondii
  source 1..4910: mol_type = genomic DNA
gtgttgacgcggaaaggcttgggtggccatccttgtcgctttcatctccagtggggggtgcggatgccagcgtcatgccaccttcagttgccggcaccggcgacggcgccgactgaagagccgcgaggtcctccatgtccctctgggatgcttcttccttccgttcaccacggagctctctgtccacttcgtcgcagtcgccttcgttggacgtcgcatagtcgccttccctcacgacccgcgtttgtcgcgcctccggaccctcctgtgtcgggtgcatccgatcacttcctcgccgtcccctgggtatcgtgccatgggaagacgagcaggaagaaaagacgggggagggactggaggacggggaaggagacggaggggcagctgtcactgcaagcgcgagagcaaataagtcctctgtcgggtggaatgcgaggctggtcactcgaaacgagaggccctgatgtggagacgaagaaggcggacgacatacagacatccactgggcagggcgacgcttggagaagggcgcggcctcaggaggatcgagaatctcgagaggcaacgcatgcgtaaggagtggctcgtctcgcgtcgggactctgaagacattcgggtgtcgacagagatagtagaagtcctggccaaccattgtggcggaagtcggtgaggatggcgaggtggtcaggcgagaacagcagaaactccttttgaggaggcaaagaaaaggatgtcaggacaacgacaggatgggcagggagccaggcacccgggacgaaagcggaaagaggcatcgtctgcaaagaagaggcgtgctgagaaggaaagcacgagacaaaacagaaacggaggtcggcgaagaacgaagggccactcaagagaaggcaagggagaaggaggggagcggtggaagcaggtagagagaaatgaggggagagacagaagaaaaaaaaggtaatgtttgtcggttcggcgacagatgtcagcgaaacgagaggctttgacaagaaagtttcagaagatgcctcgtccgccgggtgctgatgtgacagcagcgctctcgcacatctcttgtgagcaaaaaggcctcgggagaccccctgctgttcttgcacaccgcggagaggaccggagggaagaaatgaggtgcagttccgtctttactttgggattttttgaagtttaagatgcggtcacgtagctctggcaggacatccaaagacaggaaaaagcggccgcgtcgtctgtttgaccgtgcgcggaaagtgaccagcccaagtgaccggctcgcctcgacatgccatcgcgggcacctgtacgcaaaaacgcggagagtcagccgagcgctgcttggcagcattctcactcagccgcgaggaatagtcccgcggtttctcggcggtttcagcattcgacttccaacatttttgcaccagcagacacgcagcctcaatcggcaagagtctccgataaacagagcggaagggaaaggcgagggccaagaacccgggtcccaggtggggcagggtgtcgggttgcgttctcacctgaatgaaaactccgcttttgtcggcattgtttagaacagacgggaaaggtcggaggtcgttaaatcgacgatgaagaagcgagacaaacagaagacgcggaagatggcaagaggaaggggcaactggcgagtctcatgtgagtcttgcgagacgccgaaactcgggcttcgtcaattcgtagggagccgcaggagaaatggttcccagaatgttacacgcgataaaccgaggttcaagcaggtgtagtggatgacgaaatatcgaacgtttctgcccctttccattcggcctctactccggaacccagcctgcccatatgataagctgcagtctgcagaacgtccgcgtggaaatgcgttccccgcggctaaggcgggggcaccggggaaaaccgttcgtgtctcggcaaaaatcaatgcagcgccgtgcgtaaatcttcgccattctacatctcgactttgacggtcactctgtcgagtacgcagggaggtgaatcagaagacaagaatctgcgtattttcctactagtgaggagcagcggagccggcaaggcgtggatctcggtttccctccggtgtcgttacgctcaaacaaacagccttgctaagcaggcgagcgaagttattcgccaactggtgtgaggctgggaatgcgttttcatttgttctgtgagaacgtcactccgcacgtaccagttcagatcaatctgcagccgctaatgtgaaaaaaagtatgcatattgttgcgattaccgctgtacatgaattcgtgtgtttgggtgcacatctacaatataccagtgatgcatatatgcgtgcgaaagttgcacgctagtagcatacacagtaagaggaaaagtacgtgagaagagctgagaatgtgacggtgaatccgcatgtgtgaattcgatagggcaccacggtcagcaccgccttttgaagcacgttgtgtcgagagactagtcatgcggagcagccaattggacggcgaggggatgagtccctttgcaacatcgcaggtcttccttaacgtacatcagactcgctgagggacgctgaaccgattactcccttacgctgacggtgcaccgatccgatcaggcagtggcaacgcttcaacatgactaaaaaggagtaagtttctctggaagaacgaagaagccctacaaagtattcgacgaagatcctgtgggtcttcatttacgcagactactatgtgtgtctcattagagaaacgcgtggagtgagtcacctgcgcatgtgtctgggtttatgtgtaattctaacaggaggcattgcgcatgggcatggctggcggccactttgtggaagactcccatgcagatccacttgtaaccgggtgtcctatgtgtttcttcgtgaatgtttagtctgcacaccgtccaacaggaactggcgtccggaagagggagaaaccaacagaagggccggaggcagaagccgtcagccagtgccgacgcgagtgagaggtgcctctaccgccccagactttcctttctgagatccttttcgttcatccggattcatcggttccgccgcaccgtaggttcctcgtgaaccagttctggagatttttgtgtaagcgaaaatgatttctgccgtgtagaccaaggaatgataggcaaggttccccgttttcaatgggtggttggcaacgcaaagtgtccacaaattcgctgacgcatcttgagatttcccatgttctcgttgccagcaaggtcacccagttcggtttgttttctgtttgttccttgttaaatatacatcggctgcacaatcaccctctccgtatgcaaagtcatggaagtcaagtgcgtcaacaagtcagagaaacgggtcttctgcgcgtctgtgtggctatgctttccacctttggccctaggatgttgaaattgaactctcgcatctatcttaggagttcagtgccgtgacggtgtgcagcagtcatacagcacgtggttatctgtatctcataactggactcatactcagtatccttggcactatattgtctgtttttttcgatctgagacgaacgattatggatcgggctcgatcagtcggaggctcctcctgcttctctatctttctcgataccacacagaaaaacggacagccgatgaacaaccgtagaaagtagcatctggtctacgtacttccccgcgtaactgccagatctgttaagtagccagagcgacaggaagagcaaaaacgtgctactgagagccggggcggggctctgcgtagagtgcctccggaatcccctatcagagccacaggttgtaggagttgcaacacacctccgaagattaaaaaagggaaattcgaaagaggaagggtctggcgttcgttctccgacggactgtggtgcgacttcgcgtcttgcaggtcttgtcgagacgaggaatccgcgtcgcatgatctttcgcgcccgagtttcctccgcgcacgcgccgcactccgacaagcggagggaggttgtgaggccgagaggcggcaaggcccacagcagcgcggtggagagcggagactctcgtgagatgtagtcagccgtactcgaagtctgtgcgccagcgttttgcggaggtgtgttttgtgagtctctgggttttccagactttcccgtgcacgtgctttgctttgggacgtaactcggggccggagccgctctctcctgcactatattcgcgctctgcgtcgcccgattttcctcccttttgtctcagaggtgctctcaggagtggcgcgcagttcggctgcttttcggccgctctccgttggggctttttgcccctcttttttgccaggctggatccgtctgtcttgtctcctctggcaggctcgtctcgttgccacgactccccgtgtgcgcgcggtccaacttcgccgaccgagtcgcgagatgtcggctctcgctttagctcccgactgacttttcccccgttttcccttccttcgtttccgctctacctttgtccgcgcctctttcttccctgtctcctcttttctctcccgcactcgactgtttgactggcgggcggggtcgaaagtccgcgaaagtttttttctgcccaattttgaggcccgcgaacgacgacgcacttctcgaaaacgccgcccgttcctctggcccaactcgcagccctcgaagtctttgctgcgctcctggcgtcgcacgcactgctaggaccagtagcttccttctccctctcgtccttctacgagcgggactgctgcggtagatctggaaagcctgtgaccactccgccccgcggtccgttccggagtcgacgcacctggatctcgccgcgttggccgtttcccctctcctcagagacca

SEQ ID NO: 1700 - DNA, 3529 bp, Toxoplasma gondii
  source 1..3529: mol_type = genomic DNA
gacaacagacgacttaaagtgacactctcatatatggaggtgtatgcacgtcccgcgggtctcccgcaagtcggcaagaaacgacaatgtccctaaacaaagcactatcactccagataggatacaggcacccaacgaagagtcatgtccatctaaaaaaaagattgcgctccatgaatgtgtcttgagagatgtagaaatccacgtggagaagccgaattagagcatggggcttgcagaagctcgtgtttctcagatgactgtgaacgtgaagaggcgagctgcgaatcgagtgcacgagttcctcctgagagtgaagcctgcgtggtaccatttgcgataccggctcagagtcttctctggatgcgcgtcgtctggagctgcgtttgaaattcagtttgtctccacagttcgcgcgtcctgggcgaagctctcgactccccggcgaatgctgcgaaggaacgccgagagacacgaggagggaggcgccgtcgaagtcactctcggacagcgaagcaagggagtcgacgccgacgacactgccctgtcgacttctgacgagtgacgagacgctgcagccatttccttgcccgaagaaggaaggtccccgatctcctggcggaaccgtcgatccttcgaatgacgtggtgagctggaccagcggatggcattcgttcgcgccctccgtcgctctgccttcttctcccctccgacttgaaggcgagtctctgaactctctctcgccttcgccatctgccctgcgctttgaagagactccagcgaggcgaatcgcctcatctcgactcttagcatcaggcggcgcggccgccgcgagggtcagaggagactctcttgaacggacgacgaactctggctgacgagacgaggaagaagaagaggaagaagaggaagaagaggacgaagaggaagaagaggaagaagcggaagaagaggaagatggctttgcgaagtagtctgaggacattcgttgtgtctgttgatttacatcaggaggtgcgtacatgctggcgagtcctccttccgtggaagccgatacgagagagacatcccgtcggtcgtggttgtcgcgcaggactggggggcctcctgtttcgtctgtccacgcgaatttggaggcttccttcgcccagagaggaggaagggcaagacaggctgcatctggggatcctggctcttccgccgcagagcgagaagaacgtggaaaccggacatctaagagagttgcggcaacgacgacccccccttgcttccgacgcaggtgaagagccgcgaggcccgcgcatgcagcgttaaacagccagacgacagcgagaggaaacagcagagcaaagggtgcacaggagcagaagagagcgacgcagagaggaagcagcgaagaaggaggcgaggagacagagacggcgtctgcggaggtgagttgccccgcgtcgtcagcctggtcgagaagaaagagaggaaagacagaaggctggagggaggcgccgagaaggaagatgtagcacccggtggacacacagcagagcgcagcttgacggaaggaggccgctgcaggtgtggacgagtgagaaggcgagccgcgcagagagggagagaagaaggccgaggggagagacagcgccggctgcgacgcaaaggaagagacgcgccgcagaacagaggcgaaggagttcgtagggagaccgaaaacgcggtcgcaggagtcgacaggaaacggaccggaggaagactcttcctggacgggagacaggccgttcaaggggagaacagagcggtcgacagcgggggtcgacggcagtgccatagtgacagagggaagcaagaaacaccgggcgggagggggaggacgcagccgtattgacgcaaaagacgcggaatgaggacaacggcgtagcaaatcagcaacggactacaggggagagaggagaaattgccgagaaacgactccgaagtgacgaggtccaggagaaaggagggagagcaggaggaacgagaagtccgacgattccgccagaacgaatgggagggacatcagatctggactgtcgcgttcgttgagcaggaactctctttctggctggtgaacgtacatctcggttccagcgtcacgcgctcgccagaccttcgggaagcgtcggtcgcgttttccatctttttcctccccgcttttgcgtgataaaatgtagcgaatgtgaagacggcttctaacaaattgcgaaaaaaagtttcgaacggcaccgcgttgccacagcatcgcattgcacctgcagaagcagtcgtgtgtctccccccttctttggggatctctcgcgctttctcgcgtgtatccgatcgaaactgtcctaccattcaatctctaaagtgaagaaacaggaagacaataccgcgacaaatgtctaaacaataccgtccactcttcagcaaacagtccgtcgaaaaagaacgacgccgcctagcgacgccacaatgttggaagtgtgtctccctgtggttccacggttttcttcctcagttgcagccagaggcagaagcaagtcctcgctgcagagtgctcaggtcgactggttttggtgtgacccgcgttttgatgtttgtcgaagctatctgcgttttactttcctgcgtgtgtatgacttttcagagagacattccccaggtcattttcaagtttcctcgtcgcattccgcgcgccgcctctctccgcagcagctgctgctttgttctttcgcagttctttttcgcgcagtggctccctctcgacttctccacgcctcgggattgcgcgacttcgacttgcagctgaaaatactgctccacgcggcgtctctctcgcctgtccaccccgatgcatttcagctgcgcctaaacttcgcctcggaggctcgcgaacaggactcgtttcgcgagagaagacaggaagtcaccgcccgccgccggctttttctgggaggggcgacgacgactcgcgggaactcgcacggggaagaattgtcgaaaaggttcagctgtaccctgagttgcaagagaaggcgacgtggaagcaaggcggaggaggttggtgtgtcgactgcctggcgaaagaaaaggttccacggtgggtgtgcagagacctgagacagagagagaggggcgtcagaatcgcttcaaggtcaagcgcttcatcgatgcatgcacggcgaactcgcgacgccagccgtcgtcccgttccacgagttctcgtcgctttgcagggcagggaggccgaggggagagagtggctagctgtgcggttacgtactcttgcatggttggcgcgcgcgtcgatgcttgaatcggggtgcagcgcgcaaaagaaggaacttcttcatttttcgcggagaagaggaagattcaggatctttgcggcagcgaggaaggcggaaggacggctcagattccgtggaccgcgagaacgacagtcgtcttccgttccgaagtggagagaggcacacgcaggggagagcagcctgccaagttcccctccacaagtcga

SEQ ID NO: 1701 - DNA, 3354 bp, Toxoplasma gondii
  source 1..3354: mol_type = genomic DNA
gagaaggaaaagcagaggaagtcggtgtcagtgtagacaaggcgaaggcgggggaacgagagagagacgaggaacgtgagagagtagacgaagaaaggcagaaagcatctttagacggacgggaggagaggagaactcgacgctcagggattctgtgtcgacggccgtggaaagagtaaagaaaggacgaagaagcaaagaccgacggagacagaaacgaaagcaaataggaaggtacttcagatgaagaagatgaaagggaagcagaagaaaacgaaagcgaagaagacgaccgcgacgacaaagacgacgacgacggcgaagaggatgaaagggccgataaggaagacgaaagagaagataaagaagacgagaaagaaagtgaaggtagtgagagagaagaggcagagaaggaaaatcccgaagactcaacctgcgaaagaggaggaaacatgtaagagcgatgaccccaaggaacgcaggaggaggcggtcactggggtctgcaacaggagacgagaaaagaggagaaagagaagagcaagaaaggagacaccctggaagacgaaacctcgtcggtgaattaggccagaaacgcacatcttcctcgcctacgaaagagaaatcaagatccatcttcacacatctttgaccttctgcctgaagacaagagggcatgcatcctttcttccctttgctgtctctccagctttgacagaagaggagagagtgcgtccaaagcttcgggggggatcctgaattcttctttttcctcacatacattcctcggcagacaagcagacgcgagaaacaagtctgcgctgacaagagaaacagcgcgacctgaggcgaactgcatgcgaaaacctagctgcagggtcactcctttttttctgggcgaaagagcgaacgaggaagggaatttcttgttcgggggaaagaattaaaaaaacctgagggagggacttcaaggaaaacaaaagaaacggaggaggagagtcgctctgaagtccggatcccttcacggaaaccgcgattcactcaccgcatgcactcaaccgttcgaccgctgtgatgtcttctgagaactcgagtagtaccacggttgcgcagagagtgtctccggtaatgcattcacagcgcgttttcttcattcgcttcgcaacgagaataacaacagcttggatgtttgtctctctgccgcggaaaagacagccttccatgtctggaaattgttcgtttcctgttgaggtttacgtcaggctcggaaactcgacttgcagagtggaaggagaaattccactttcctacgtgtgacacagcacatccaaagcggacattaagaacacactgattgattgtaacgggtcaatccgcgaacgaaagacaaccgacgaggaacaagctgacacccatccgtacctcccaggtggatggccttatatttacaccgcaaagcatgctggaaactgccattaacgttcggtgcaaagaggtcgccgcgatgtcgaggaccagctggagcccgacacacggttcctggtcgtagatgcgggataaactaaggcatgcgtaaacgcggtagaaacagggtgacatcccgactctggtaggatggagttgcttctatcagagtcccgtcgtttttcgaatctacgaaaaagctttaaaatgcgacgctgttggacggcttgaaacaggcaagagctcggggtctcaagacctccgcctctacggtgctgttgctcgtccaggtatttcacagctgcgccaggtcgtcagagacaattcgacgcatgtatctcgtaaagcctgacggcagggaagaacctgcggaagcgcagatcgcatgatttcagcttgccgcttccatttctgtcctgttcgagtgtcaggagtgaacggcgtcgacaaagcgccacgagaaagcgagcaagacaccccgagttgaaccaagtccgcaaaactgccttcaggaaggcgagttgcccgtgtgttctaaagggagtccagtgtggcgacccggtcactactctgccgaggccatttcgctttttgaatcctgagttgtgaagcgctgtccatttggctgcggacgccggcacattcttcggtggttcttgctttctgaaaagaaagagaaagcgaatgctcgctggcctagttaccgagtcacgcacagggcagtgtgtgtcgctattgagttttttttcctcaacgcatgatggcgtttggagcaggtacgcacgcactagctcgacatgcatgtgtcagaggtcttgagacgctctccagctgaatcagtgaaactcgtcttgaatgggtcttgtcggaaaagacggccaaaacacaggcggcgcaactgccgcctctgtgtgcaagcaagggaggcgccactgttggaggaacgaaaggcactctgttcctggcgaggaaggaaaggaattcgttggaaaaagaaaaagttcatcaccttgcctcacgctgaacgagtgctctcagtacgatgggactgaccgtagtcgtatctgaagagtcgtttgtttttctcgccgtttgcaacagtggcgacaggcaggagattccaaagcacaggtcgcgaccacgagctcagcattgaaaacaaggcagttcactgccgtgaaaatgttcgctgtcttgcacccttcacctgcacaaaacgccagcgtggaagcgcgaagttcgctgtcgcacacgctaaccttcactttggtttatgtgcccatgttcgtcagttgatggctactcaggaaaactgcttcttgtgtgtgaattggtgaaacctcttgtcgacgttaccctttgtttgcgtccactccaaaacactcggccaaagacaaagccccatgaggaactctcccgcttctgcgcgcgggacaggggaactttgagacggcgacgccaagcacgaggtaatgtgcacactgcccatagggcagctttccttcccattgaatacgtctagagttgccgaaaggtgaacagaagcagagaccctggaaagcatctcatcgtgttagcaaagcgcaattctctgcagggcttctacacaatgtttgcttctctacggtcaccgagacccccacccgcatatgtttgccgaatcgacaccatcgacacccgaaagcgtcttcgtttctcggttctcttcaacgagagtacgcggacttgagtcatggagaggctttctatcccgttgtttttgataaggagctggagaaacgcattgtgctgtcgacgctctcccaactccttccgtatctaggcgacatgtgaacacacaccgttcacgacgtccaccttttcgtgctctcgtctccgtttttcagctaga

SEQ ID NO: 1702 - DNA, 2317 bp, Toxoplasma gondii
  source 1..2317: mol_type = genomic DNA
ttgacaccatcgtcaagcttcattgaatcttcaaagcctttttcgctttcaagagtctgggtttgaactcaaatttgcctgcatgtgcatagaggtgtacatacacatgaaagactatctgttaggaacatgcttctcgcaacaaaagcatccacgtatacacagggagactcacctcttcaatgctgaacgccgcgtaccagacccggccgtcggcgtcaacctgcgtctccatttttgttcgtctttttccgcgtttttcccccaagagaaagtcagaagattccctctgcccttgtcctcgcttagacttctcgggtcttgaagacacacggatgccttgtgatcgcttctgtcacacttggatcccgttttctgtgcacgtccctctttcgttttcactttgtgagcggcgaagagagaaagaggaagacaccttcgccactcccgtagtccttctataagaagagaggtgtacaccgatcataaaaaacttggcaagttcgcctaattccagtcggacgcgcagttgacgaatcgaggagaatcccttcaatcattcaaagtctatcccgaaagccaacgtctagatgatacaccccagtctccatgaaacgccacctgctggccactgcattcttcggagattcctgccgcggctgcccagccagcggaggcgacgaacctcagaacaacaaacaatgggaactgaaaggaaaaagtgacaaaaataataagtggaagaacaggagacagggaggcaagcggatacgtggcgaatgtgtctgaagactgtcctgtttgctgtcactcaagaaatcgctcttcttcagtgagagcaagctcctcttcaccttttacgcttgtggtagcttgccgctaaggaaatagcacgagacaacggggcagtagacaagaaagacgagaaagcagacccgcaggcatccatctgctagtttttacatcagtgcgtgtctccgtgaagtccaaatgcaacgattccgcatgtacacattataattgtacatatatatgtgaatatgcatcagagcaagagaataatttgacggaggtgcacatatctgtggtgaaacggttcacagtcattctctcggcagaagggaaagccgaggaggaacattccctgttgggagacgccagcatctccacaattatcttgcacatctggacgacaaccgacgacctcccgtatatgcagctagagcatgcgtgtagaatgattaacaatggacacagcgacttgcctgttttcgatgagagagacagagagataaaaaaagatcatctctgagaaaaagcgataggtttttggaccacggcttcacgccgctttgcgtggcgggtaagcttggttttgcatgcacgcgaagcaacccatgacacagacgttttcagccggccgtgttcgcgggaagagacttgagcaaggactccgaaacctgtttgatgaatcacttcctgccacttcacaagctttcatgggtgtctcttgacgcgtcgagattgattgaggggactactccgagtgatacctcccgggaaagtgtcgattttccacgaatgctctcgcgctccatcgagtttctcgatcccgagtgccatgggcaccccggaggttctgcaccgcatgcatactgggaaggcttattttccgctttctcgatcttgcagttttcaggggaaacgagaacagagactccttggggtcagggtggttgtgtctgggtattttccgtctttcacggaccgtgcctccctggaagaggccttgtaagaagcctcctaaccgcgaacccgttgctgggcttctgccaccaacctttttcctgattccatttctggtttacagcgttgctttttgctcacgtttcaaccattttccgtgcacctttgaagcggttcattccccaactcccccatctggctgtgcccgttttcatggatcagaaaccgtttgaaccgtacaggtcctcgagtttttgccgtgacactccaggcataccctgaccttatcggtggcaaacccgttaacggttctcgcagaatcgcacatttgcgggttcctcgtgttcactcgaagggcctctagtgtatgtacaactccttccatgccacatccggcggcggctgcccgaccaccccggcggttacgccacattttcttttccgcgctaccgtccgacaatcctaggctcggtcaaattcattcctccacctttccgacttctttcccgtttctcgcttttcgcttactttcccttggaattcgtgtttgagctttcgttcgtggaaaaaa

SEQ ID NO: 1703 - DNA, 3951 bp, Toxoplasma gondii
  source 1..3951: mol_type = genomic DNA
ttttttgatgcgttcgttggtgcaggataacgaagtaactgcttgttgcttgctccctgtcaggaatgcatccaccagggaactttgattttttcggcgccccctggatcaggcgtgcatatctagtggagtcaatgatagaatatggcgtggaactcaaaatggatttcagtctaagcgtgaggcggcagcagatgtacgaacgcacaacaaacgagctgttgtctccaaaggcattcgtctgaatcggcataataaggtggtacatcactactaacttttctccgctgcacaaccctgacccattggcagatcgtttctgttggtagacaagaattttgcagacattttcataccctatcgactgtacctaaaccactgacgctctgtagacaagttatgcagtcactgaggatgcatgaatgcggcagcgcagctgtcatttaacctgaggaagcaccttttctttgtgaaatgcgagtttccgcagaacgctgtagatatctgctgcgacttcgaggccccttgcgcacattaccaattgtgaatttagcatttctgagagctagcccatcaattgtcaccgaccgctggtgtagcatgtgtgttgaaatagcacatgacgtcgaactgcttgagccccgagcaacgaagccgaaattggctttgctgcaacctgcgaattactgtccacaggccaccgtcagcctactgcagccagaaaagctgttgtgctgatctcatgttctagacagacttcgttgctgtacactgacaattgggtcgctcaactctccaaagaatgcactattccacataaggggcacttccacgaagtgacctggagggcaaagtgcattgcccgatgtgtgcagcggccacgaggcagagatgatagtttgtttgtacattgaggtgagtataccacgcctatgtcgtgcctggaatacaggaaacgccaagggatatcgaaagctgggacgaagtcatttgcttccgcgcctgtctccgcgatcccaaagttggcctgatgctctttccttatgctgctgtagacagggcgaatccattctttgagcgttgtcgcaaacttgccaaagtaccatcaatgcagatatacactagaatgcgagctccggctgtccaaataatgagatgaacgcgtcaggacacaaaaggcaatcgtgtttatacctgttttgtattggtagcaccagttatacatttgttgaagatgcttgtgaatcggagcagttcctgtctgttagttccaactttcggatcgtctttgagactctaacagaggacatctggtggctttcaaaaaggcagacatcccacagcacagacttaggtactgacagggaaacgtgggtgtgagagcacacaaacgagtgatgccgttgccgtttttttagcgctcttgtgttcccaacggagctttgcgctttagtacccgaatttaattcgactacaatgatggctcaaaacgtttgtaggtggcacaccgaacaaggccgaaccgtccgtttcgtcttttgcgaattccagtatggtgcctcactcttcttgtagccaaaaactcgtccctttttttcttgttggtgttcgttgcgcatccattccacgacaagttgctgccctcacttctgcagaggcctcccgaaccggctcgccctccaaaaaaactgaacccttggattcagagaagagtgaccaggtcgtgttttggaaatttgcacatatgtttaatggagacgaatatgagtactggaatttgcctttccggctaggacagccccctttacctcctcgctctctttaaaagtcacctgaagctgtagtgcccgcctcaggcgggcagtgacctgcgtgcccatgagcgagcccgagcaattcgcactaaaagctggtggcgatttgaggccagcgcagatatcagagcgcttaagacccgcgagtccgtcatgtggcggacaaaacttgtagactccctgaaaacaagcagcgacatccacatgcgaggaatgcttgctgccttgtttctatgtaaaagagtgagtacaagcctgacacccacttagctttcccctgccctgcagacggctgtctcaaagattttccaaacaaacggcgcttcagatttctgcacatctatgtggatggtgtagaggcatgcatacgcgaatgggagtgtgtgtttgcaaggccaattttcgctgcaaatcaccccatttccgtcggtaaacgcccgccgcccccaccgcctcgatatccgttgccggtcagcctttcttttgggttggtgcctcgtcaccgcacgaggtcgaagacaacttcagatattggttttcctgttctttttttaaaacgagccggcttcgtcccgtgctctatggtccgtaaagttttgggttttcacgacagctgaacgcactgctgtctgccagagagcacgtttgtagcccgtcccggctacaggagcatagtcctagtgcgtttgccccatatgtaagtcatccgtgaccctttatgaatttttttcctcccagtcgatcggcaccgatgaggatcacccgattctttccgcctcctgcactccagtgtcggttcctcatgagcgcattttctgcaaatacggggtaagacctcacctccttcttgaagtatcgatccagggataaagttcgagaactcaagagacaacagcgtttggaggttccagtcgcggtcttcatgggtgactttccgagcttcttaggatttcgtgtcctcttcccctcatgttttcgtgaatgggatcccttttcccgcgcgaccccggtgaaccgactgccactgcgctcccttttcagcatcggaagcggcgtgggtacacacgtcgggtctcgtgtacgtttcgctttgtaacgcttgtctgtccacactttttgtggcaaaagaaatggcgcatatctgtgcacttgtgcagcgattatggccggtcgcgaccgcagctgctacgttggttcagagaagttgaagtgaccgtcgtcgatggcgatgcggttgcctgttgacactcattccttgcttagcaggcttccccctgtagtccagtcgcaaaatatataaatgtatacttttatgttgaggtatgcagacagtatgagaacagcaaaggcgacaaggttcgctgtgctggctctgataggggacttactcaagcttgttatgagacagcactctagagtcagaagggcaagcacacgctgcactgtttcctgtcattcgtcaaacaggtaggactgctggtgccatggtccttttcatctgtgcatcgaaaacctcgtttgatgacgaaccacgggctctcaccattcagggtccggggtccatgtaataacgcctacagacagtgaattgaggatggtgcgaagggggcagccacatgcccactatctctctggatgacgcgacgaaaactttttaaaagctgaattgagtgtatttttttcaagcgactgcaagtcagcagggagcagcgtgaacgggacttcggcgtccagcgccgaattttttttcagccgtttggaccccgtcgcgtcgttgagcttcggtcgacagagctctcgtcacgcccttttcctctctatctttcaatggatcggatcctccacgggtctctcgctgcctagtcttcttgactctgtggcgagttcattccctctggccctctttgaaaaagacgttggcatgtgtgtagcggggcgttggcctgtggcaggctgcgaaaatatcctcggatctaggtcgccgcaacgcgcccgccggttcctgtctgcgaggcccgcagcgaaggacgggcacctcgaaatcggctggcgacgaagcctcgtcctcgtccccttgctgccccttcgctcccgaggcgcggtgttggacaaatcgttgtggctttctcgttgacaa

SEQ ID NO: 1704 - DNA, 4204 bp, Toxoplasma gondii
  source 1..4204: mol_type = genomic DNA
ttcagtcaatggcgtggcctgattttgaggcgtggatgtcgaagaaactggcgtcctacaaccctgaggaggagttgatcaaatctttcaaggcttttgaccggtcgaacgacggcaccgtgtctgcggacgagctttctcaagttatgctcgctctcggcgagttgctttccgacgaagaagtcaaggccatgatcaaggaagccgacccgaacggcactggcaagatccagtacgccaactttgtcaagatgctgctgaaataaaagtgggtttgagtaagggagaagcgaaaagccgagacaaaaacgcgacgggaggcgagagctgctggaagcaaagaggggagaatgaggaaggaaagattagcgcacgcacacgcgacgtacgccgcaaggggagctggtgcgcagctgacgagggaaaattttcttcgcctttggggcgtttctctttttcgttttctagccgagttctctcgcatgtcgagtccatagccagtgcactgacatttctcaaggggaacgcgccaggctgcggatgtatctaggaagaacgcacgaaagtccgagaggttgtgaggccccaggtttttccgttcgagctccaggtttttaaaaaaggcgacacgcgcggatcgtgtgtgtcaggctcctttgctcccttaaaaacagaactaaacacgcagaaccgacctcgcgttttgttcagaggcgctttccattgagtacaagattaaaacggggcccagcttcgatggcggccgccgcagctccgcaacatcaccgaaagcgagtaacaggcgtttcccgttgccagcgaaaaacacgactcaccttcacatacgcagaaacctgtaccgccgtgtgcgcagccccattttccacatcggttctgttttacgcgtaataacatacagatgttgccacaagagcccgttgagacaactgtaccaaggaacttgacggaactaaggatacgccatgtgtgtgttttgcttcggtagtaaacacatgttcgcagaaactctaattatgtcccagaaaggcaagaaagcaatcggggattcgttgtcgagtgccccccttcgagttgattgccgcggcgcctcgtgggtggcaagaaatgaaagggtgacagatggcttttttgtgtgtgggctgataaaatttaagcgaacaacggaggaaaacaagcacgacatgcaggatgaacgtgtttgcagcacgaatatcgttgagctccgcttgatcggcgatcggtggcctagaaaaacctcaaacactacgccaaaagagggtgtcgattgttagattttgaagtgtcaagagggaggaacgaggcatcaactgtttcgagaatctgacacacattggaacagatgcggtacgagttgtgttcctcctaaggtggttcacagattcgaaggggttgatccgatttagcctccaatcctgcacgcttttacatcacggcaaatatgaatacatgcgtagctgaagcgcacgtgtgaattataattccttgtcgacctggcaggagacaagggatcgataccgacaggcgaacttcgcgaaagggtggacacctgcgcgcatgagcaatatccagttttgtgtttctgtgtgtctaacgacgaaatcgtcggcgcgcatgaccttcccagttgcttcttttcttccattgctagcgggacaagctctacaaatatcagggtattcacgttggtagtttgcttcccaattttagtctgttcgaaaaacatggacccggttcttgttggtctggcatcttctttcgcttttctgcacgagggacaaagggcgagcactgacgaacagagagagagaccggatgtccaccagagtggtctgagctgggctgtcacgttcagatcatcgtcggtttcctcctgtgctcgggtgttcctgtgaatctggccgtcgagtgcgttcacgccttccgaaaaccaggcacaaggcaacaaacgccggcgaaaaaacggagtgtacccgtagacgcatagcgtcatcattgtggctgtgctctcctgctttttgtaccatcgctatcccaaatattctacgtctgctaactacagatataagctgctgccagttgtccggctcgttttatacgacgaacccattcctgtctttgatttcttgaaagtcttctcgagatcccaactttccttttccgcgcataattaaggcatgcacgacacttagatagcacctgacgctcgcttccacgttacgcattataaactgggattccaagatttctataaactaccttcaacagaattcgtgtgtctgggccgtcgcgaccaccccgacggaattcgttgctccaacatttcctccactgcagtgtcattcgaccctctcgctgtcaccctcaaaggtaactcttgtctttacttctctgagagctccatcgccccgcacatctctcattcccccttagttgtacacatctaattaaaactgcgctcctcacgctagcggacacgctcagatggccgctccgattatcaacaaacttaaaatcatctccgtttccccgccgttgttcatctttccgtccctggagcgcccgaacgatcggaacgacgctgagtcatgacttccacgaaagacaatagaagcacagacacgctttctcgaacagagactggctctgccgaacccagagagaagttagagtcgcagagaagcacatacatgaatgcacggcagattgatagaggcagatttaggtcgagacacaatgatacgtagacatagcgatacagacggaaacagagatagaaaaaagtagatacaaatagacagaaacagaaatacagatagaatagcggcaaatgcagagatacagttacacgtagagattcggatgtagacagagagagagatatagatacagatgttgacatagatagagaagtacagatatagacaaacaccaaaataggaatattgatgaaaaggtgtagatgaaggtgtatagagatatagatacatagaaatacaggtgtgtttctgtcccgatgcctcgtccgctgctgcttacctcgactcgggttgccctgctcttacgtcaatatccacgtcataacttgcagttgcagagccatggttctaccgttaccccaagtttttgaaggacccattctccgcgcgcattctgcaccggtgcaagttctgttaggtcggtgaagatccggcttgtttgttctgtgatttgccggcctttgcatgtcgcgcgttcgctgcggacttctgccatgaccgtgccgctgcgaactcgacgtcggtgaggcatttttctcgcgtttgccttttcatttctgctttatggagatgcccgctaagaaatggaggagacatgaaggaattttactgcttttcttgtggcgatgtgcggttttcgtagttgcacaccgctctccgagcctagtcatttcgcggccggcagcgtttcacagcctacggggtctttcctgagaggaacagataactgtgtaggcgcccttctccctcgaagatgtttttaaggcatcctgagaatctcctgcttgatttctccaagcggcaattgaatttcgggcctccgaacacccgtgttcctaccgtcgcagtccgtgagctggcagactcaccgacctctgggtttccctgagaaattttcaagacgacagggccttcttttctctttctctgcttttcctgtctcgcgaggcgccatggagtgacgactacactggtcctttcattttttctttgtgtctgtgccttcttcgcgggcctttcttacgactctcaggcaaccgaggaaaatcagactcctctgccgagcttgccggccgcacattctctcacgtagctcttcatgctttcgtccgtttcctctgtctcttcctctatgcgtgaagctctttgctctgccggcctcggtttcacctccagtgcgtctctgctctcgcgctgaccctctgtcgccgtccgtctcaccactgaacgtcttttcgttcgtctggttcttcgtcttttttttgtcgccttcgtcgcccgtcgcttcctttctttttctttccttctgttcccttctgtcgcctccgttcctcgccgtttccgcgttcctgcgcactcgctctccctcccgcgcgggtccctcctcgaaaacgcacctcgcaaga

SEQ ID NO: 1705 - DNA, 4431 bp, Toxoplasma gondii
  source 1..4431: mol_type = genomic DNA
aagcaaatctaggcttcgaaacagttcggctgaactcggcacttccggcgccactttttcgagagtttgcggagtgccggaatgtcgattcccgaagtgaaggaaggagaaatgcagcgttgttcaaaaggttccctcagtcaggtcgtctccggcatcgataggagagagcagaatgcagtgattagaaagcgagagttcatcggccccgaaacgtcgccggggcttggttggcttcttcctaggtgcgatcttgggcacgaacgtgacaaagcttgcgttccgcaacatacttgagctgtccaggaacaggtgaaacgttcagtgcgatgcgatgcgtttttggggggacagtcgacgccggtgagtcacttttttgcgcgctgaagcgagaagtgttttttcccgctactcgtgtccaggtaggaatgtgttttttcttccttgccgtgtgccctgttcgcggacattggatcttctgcgtttacaaacggacacagtgactggcgaagataagccaggatatacccagttaatgatcttcgtttcttcgttttcgagcagctgcctttttccccacagctgtcaaactaggttgcggttgctcattttttgtttccactctgcccctccagtctgccgagaagagtcgttcagcgacggagcgaacccagagtgaaacacgcgaagggtccgaaacagtcgcggtggacgcaggacaagctacgccatcgctgacgattcagaggtttctgtatcgaggatttcacgagaccaacgcaacacttgactcacctgtatctaccgtagctaacgaggtagtcataaacacctcagaagtcgcaaaaagtccctgtgaagggacaaaaactgccgagggttagtcggggctcgatcgcttgtaaacgacgcaggaaagcttctacatcgtgtggactcaacctaaattccccggcaagcctgcatgcgatatcatgctcctagaagttcttggtcggcacaactcggataactctataaggaaaaatcgaaagttccaaccgatgtggcactaagcgttctgctggcaggagctaatctaccggagatggggaaccgcgcgtgattcgctttttgtgacaagtgttcttgtacacgagccgtatacagctgttgggttccaaactaaagagaatcaatggtaagatgctccacctaggccacgtaaaactcgaatatatgcatagaagcctgtctgcacaacagccgctgatatggcagactaactccagagtgcgtagagtcatagattctgcacctgcatataaacctaggagggccataactatcctcctggttcagcactttatgcgacgctgaagcgactctgtgtatcacagtgtctttgccccaagtggacgatctccacaaaagtggagagggaagaggacaaaagggcccacgagaaaagaagccaatgggagcagttcagggccccatggttttcgtaggatagtctgcctgcttcgttgaatccgaggcacacacagaaaagaaggcaaattctgcggttcgagacgcgtggcaggaaaagtgctgtgtctctttgaaaattgcggtgtatctccgaattcttttcagttatgtttgtgtgaaggaacagtctgtctagatcactgggtttatttgctttcagaaccgacagacaaagtgggaggtgacacatttgactggcacactggatgacttgaaatccttcagctgatgtctcggcattgccatttctacgcagcatctatacaaggtaccttcacaaacaagcaaaacagatagccaagagaaccgaggaacgagagaaacagaagagattgtagtagggaagacagcagtgccaaactcctgacctcgagtgcttctttctagcaaatgcaggtatctgaaaaaagttgcagtggggcatgtacaacaaaagaggcacgacagagtgacgcgtgctcccgataattcttttctcattcaatctagcttcccggctcgtggatggctcctgatacgctcagttttcttgtttttctcctaccactcctcacttgtgcggcaaccaatgtggggtagcctgcaggatctacgtgggtcactgattatgcctttagttaacgagatgcagacaatcaagttccttaaggttactgtacacgaccactccactggactgcttagagtagccagatgtgttggatttcaatatcctacgagatcaaggtgattccacatcggttatgttatgggtgtaatatatgaattactgttacggttcatgaaggagggattcgtttcatctctgctcacccactttgctggaatcagaaccggcactcacaccctgggatttcctcgggtagcttgctaacgatatctgtaggtagcttcgccttatgcggtgttccttagagtggtggcggttgcagaggagtgtcgtcaccacgatgtaagtgagcttacttgtgcgaacgagacgaacactgtgggaaaaaagtggttccagtcgcggaggcaaattccttggtgtcgttagatataaatagaagaaatagatacatatttgtagatatggatcgaaatagatagagagattcgtgtagcgtcaccaatccagctcgcagtcccagaagaaccggaaatggtcagatcacccgaggatccgtcgggatccaaggttcttgccagaagccgatgctgacgcctgaggctagtgcgttcattccttgctacaggttgcccatccaaggatcacagcgtgtgtgagacagcgcatgatcatgagttaattaggtgagacgacccggagcgtgcaagcggcgaattccagagaaaatgcgggaattctgtcaggaggagttggacaggagaagaccgggaatccgcacggaccctggaggagtcgtgaggtcgaagaatcgtcggaatcacgcatcgtgagtcgttttcttctttttttgtctgctgcagtgtaacacccgccatcctacttacgtgttactggttagggcacgcttgcaggtctttttagatgaatatgtgatcaaagttgactgttgcctccgtgcgttaatctcagattctgaatatccagttgagactttccagatgcaggcgcggatcgcagaacatgaaaaggtgaatccctgagagggcgtaagtgactccatggacacgcacttgactgactatttaggaagtgcggtgcagtcgcgagcttgaaaactaacgggtgttcaccgcgcaagacatgccagcgctgcacgttttaaactgccctggacatgttcaggaaggcgatgttaccttctcatacgtaccgcgtgccctggtatgtgcaggtacacggtggcaagcactagcgagtgtcggttgcgtcggatcatttttctccacgagcagacgaagagttgcgctgaaacatcgtgaaaatacgacaccgaaagagacggaaactcgtgcgtctttccagggtgtagacccttcgtattggtttaaacgctgtaagctgaaaatcacgacatgaggacaggaacccaccgacaaataccacttgccgtctcattcaccgaccaacctccctcgccaggagggttttttctcgtgcagtgcgctcgcgttgtcttgtaactgcatccctcgataaacatttcgtcttctcttttcgccaaggaaatctgtcgcgtccacttttttcatttcctcccgtttgctttccctgtctcgcggcatttttcactcccatattgtcatgtctgcgttgtgtagcaagcgacttgccggtccggcctccaagtcgccccgtcacccttttaggcgaggtgagctgtgcgcctgtttgctaattgtttttcttctggtctctaaaatctgagggaaaattccgctatctgaggtctccgctgcaacgcagaaccgccgcatttcctagtgctgccgctcacatgcactagcgatcgctgctgcttgcgtcctttctcgcatttcaccctaagccgctgctaactcccaaagtgaatcagtctgcacaactaccacaaatggtggttcttcctatcgacacggagtcctagaagaacggtctttgttgaaaaccacgcacgaggaagcgcctccgtgtgttgggggctagatcgtgtgtcaaccctggttttccccgtggctttcgcgggcatccaatatctctttctctgtcgtagcttctgtctaccctaccgctgttctttccacaccacgttttggccactggtcttcgcaagtcctgctgacggggacaagaagcgtgccttcttcgttcgtctcgccgatcctctcagtttgtggatccggtatgtctgggcacttggcttcctcctgctctccactacctcgtcccagttccgctctccttggttttcggggaaacaaggaaaa

SEQ ID NO: 1706 - DNA, 4858 bp, Toxoplasma gondii
  source 1..4858: mol_type = genomic DNA
tcagagtccacactccgcgattcgtggcgaataaatctcttcgtctctcgctgatttagcacgtcttggcgccgagccgccagcgcctcttcctgccgatacacacgcagtacgcgacggacgcacacgaaaaagcgtcaaggaactgttcgcatgcgcaaatgcatgcagttccgcgtcgacgacgcctcgggaagaagtatttcgatgcatattcacatgaatctacctagagaaacacatggagctgcgtgccgactactgagttcaaaacttgctgaatgtgtaggctcagcagcacgcaagccatatcggaacaccgagtcttcctctctctctggacctcagaatctgggcagaccgctatgttccccgtcatgttctgccagaatgtggagtaaacacaagcactacgtctctcggcctctctcgcgtccagagtctcttcttgcgtgaattattcaccatcacccgcgtcccggtcagcgaaggctccttacatcatatccgcgttgttcttgcttcgccatcttctcgtcgaggcgcacctgccacatggcgcgcgtcgcgtggatcttcgcagcaaccgcggcctgctcggactctgttattgctggggatcccccgggaggtcggctgctagtttctgccccgcctcgctgcagagtgggctgggacaaattcgccagttcatcactttcgggagcagagtgtgggaagggcggatctgccgcatttgtttctgaagagtcgggaaatacgggtggcttcccggtaccacctgcagagttccttgacggagacatcgtgtgcgccgagcacgagacggaacacgtcgaaagaaaagacagaaaacctcgtgagcagatacaagcggtctagaaacgaaaggaagacgctacagcagcagacgagatcggcggaggaaaacgtagacaagcccaagaaaagcaactgccagccggtcagttgtcgacgacggcacgaggtgtacgaacactcgacacggtacatcacgcaccgacggcgattcgtgagcgtttgacttgtgaaaacaagaagcgaaatacaacaagaaataacaaggggaaacacggagaaagagaagagaaattcgagagagagtgccttgtctaaaactgccttcaatcgccacgcagtctccggcacagtcgatgtctacggagtgctcatcgccgaaacgcactctgcctacgcggaagtgaattactgacgaagaggacaaacagaaagcaaatggacagcccgacaggagaacctaatccacgaaggagaggtagagaaatggcaccggtacggtaacttgacagccacgcatgcaagcgtcgccgccacggtggcaaagaactggctttttcccgtaagtcacatcaacgccgaaacgacgagcagtgtccggcagatttagacgagtgatctgaagaacgagtacgagagacaaaggtgataaaaaatgcagagaaggatggaaaacaaagtcatagaagaagccggaccactagtcgagtcgacagttgtccggccgcggtatagcggtctggaggcgggcgggacgacgcacaaaccagcccgttcggaggcgaagttcatggccaggaaaaggaaaacatagcgatagactttctatggaaaaagcgacaacaaacgaaactgaagaaacgaagcagtcacagaggaagagtcgcattgccaactcaaaatgtcggcgtacgcacgctgtcagccgatgccgcgcgcgcacccgtggcgctcctaactcgtttatcgaagcagtgtgcctacgcaaatgcgaagaaacggtacgcgcgttgggaatgaggttcgtcagctccgtttgaaggcactccaccgttttacccgaacagacgaatttcgtcacgtgacacggccctaaagttccgcgtccatctccaattcggttacgtgcggcacagcgcatacatgcgtacgttctgtcctacctagaccgctgtggtacgggtagagggacgggaaaattgaggcagcaatgcaaaccatttagatcgttctgctgttccccccctcgtgagtttgttcaggtgtttaccgcggcagacgtcgcctctcatgcacctgcatgccctgtattgatctataatgcggcggcattctagcggacacccgtggtagacggtgaaaggtcggaaactatcaggcggctctaattacgccggccacaaaattgtctcgtgattctcgcgagaagcgtcgacggacaaacaagacgaaacaataggggaaaggggcttctacaccaaatagagggtacggggtgtgtgggcgcgagtttcgccggcttctggtgtgcaccagcgacgaagtcctataggctccgagtctggagcgttacttagtgatgaggtgtcagaacgtagtcgagtcttctgggcgttctgtttacttttctgtcggtcgtgcacctcactctttcgcctccgatgcacagcgtcagagttactgttcgaattccccacgctatctctcgcctcggttgggtcaggctgtggaaacaaaacagtggctcgagttcccgcgtcgattcggtttctgttcgctacagcggcaacattcctgttctctttttttcaaagcacagaagttggatcggaaagggtaaagatccacgggccactgagtcctaagaatagagaaaagaacactggcgtgccaccggccgcaggcacacccatgcttccggatgatgtcgacaccgagacacaaggatcagagcgcgccttgacgagtagtaagtcagcgctgtcagtaagtttcttcgccatgggtcttctgtgtgtgtccgcagaggttttgtgcggttaaattgagccgtggcgtggatcgtaggtaagggtttctggatttttgaagacggaaagtgactcggcagctttgtcgttttagacaagtcacccgactccatgttccagtctccagcgcagtgaaacacgcgtggaacagtataaggtgcgcccctgttcacctgttgagctaaattcagccttttctggcggtgctctttgccgatacaactgtcgcgaagatggttctggaggctggcactcacacgctggcttcgcagcacagcgtgaggcacgcgacagggggtacaagtgccaagaggcaggagaacacaacaatctagaagaatgagctgagtggcaataagaagagaagtagagtgagagaccggacttgaaatagaaacagagaaacaaacagaggagagttatggaaccgaggttccccggtgtgcaactaccacagaggcgagggcttgcagagtgggagaggcgggccatgcgacagctgcgggcaggacgttttcctcggttttccggatattccgccggttcgccaacgagaagggcacaaataaaaccattgaatcccggttcttgcagttgtgtctatcagagcacgtcctttctaggccttctctagaaatttccggtatcttgtgcctgacagcctgacacggcaaccgtactcgcttgcgttccccgcagaggccgctgcgcacgagttccaccaagaaggatttcgtgttgccaggagccgtccttgtctggtgcgtcgcgtctgaagagttccccgcctcttcagcctctccgttcccttcggcatctggttccaattggagcatgactcatctcgtcgttttgccgaggagcaagcggtgtgctctcgtgaaaggccttcggagaacaatagcacgggacctcgagtgcaagtgtcgtccagctcctcggatcgccatgccccccttctccacgaacaagattcttttcgcgttggacatccgagagtcagttgctcgcgattcttcgggattaatccactttgcttgacagagttttttcgtgtctctcgccccaacgcaaatttccgcagctgccgtccgctcattccgagttctcccgcatctccaacttcatccgcgcatgttgagcttccaaacccgccgcattcttcgatttcttcgtcctccccctttcgttttttcgttgggcgtgccagtttgctctcggccttccctcgcctcgcgttttgggtcaacgtagggttgcacgtgcgtagccagtccaggggccccgctgtgcgtcagagtggcgcgtttttttcttctcggtctttttcccgtgggtgacgcttagctccctctgcattttcctgccctcttgtttcctgcagtgagagcgaaacttccggttttgtggcggtgaacgcagcaccgagtcggcagacgtctttccgttagctctaagcggaggccagatagcattctactccgtaatgctcgtcaatcttgtcggttctccactttctgtcgcgctgcttactactctgcctgcgtaaagcagacatcctttttcaccgaattgagttgcagactctcttctccggcgattcggttttccctcggcttgtagttctgcctacgaagttgtccgtctccgttggttcactggctgccgcagaaacgttgggttcctttgagggacagcttccctgttttttcttccgataaatccgccgttatcctcttcttccgccttcctgtggtactgtccgtccaaacttgtctctcgtgcattcttgctttctgggggtctctttcactgtttgcccagggaagaacaaagagtcaggggagctcgaccgcagacttgcttacgatttcgtcagctgcgctccccggctcgcgtctccgttgccggtctcctcgcccccgttttcttttttccactccttcagcccgaaggagctttctctctttctccagcctcgccgaaattcgcaaaaaaacaaagcgcca

SEQ ID NO: 1707 - DNA, 1982 bp, Toxoplasma gondii
  source 1..1982: mol_type = genomic DNA
ttgtgtggagaaaacagaagactgtgagatccactccgtcctcggtcctgcgggccaaggccgtggacaaacttcggggaggcaaggcttcgcgaaccgcagtccgacactgaaggagaagggcaggctctgcaaagagtcggccgcgtaccaccacacggagcagtcgtcctggagggaatcccgaaacgggaagccgtcggatacagccacgacaggttcagtggccgccgttgtactccttcagagcgctctcgcaacgacgctgatttcaaaggaaagagcgacggcacgctcatacgctccacgatcgtgtgacgagattcagaacaagcgagcgaaccatgtttgcgaggcccacagaagccgaaggcaaattgcctgctgtgttgtgctgtgtccggctgcccaacgataacgctcgcgacacccaggcggctaacggggacagaaacgcagagaaggaagcaggcagaggccacgaaggcgagggagctgcggcccatagcgcgagaaaagatcgaggaacctctgacggacagcgaagctgccagcgagcatcgcgttacccggacacacgcacaagcgcataacgatcttagctacaccaggtactgcaactgtcacattgtaagtagttgatgtctcgaaacaaataatcaacgatccaggactctataaggcaagtcaaacagagacattgtagcacgcaggatactgaacatgactccagttgccagatagagacaacaaggttctttacgactgctgtgtggtatagtctgagaactggaaagactgacagaacttgaacgagaaacagaaggaaacgcagcttgactccaaatagttctcaggcttctgagggaaggtctaaacgtttgtccacctctcgtcagagaagcgtacagaattgggagactgtgccaaagtccattgtctctggaattgggagacaacgcctgatgtggatggttcccgctcgacagcgcggagtattggcgcaacgcacagcagcagtctgcgtcaaattcacatacgagagaaatgggcgagacagggtgcacgcgggaggaaagaaacacggactgtgaacttaattccgccgataagagagccacatcgtttctggacaaccctccgggacaaccgtctcagagctgttcacagggcagcgagaagccatgaagctagcttcttgtcagcacacttttgtgtttatcacaacttgtctcggactcttcctctgtggtcctcaattcatattcccatccgggctctcttatacaagacatatcgagtgccgatctcagagcgcagcgcatgtcgtcacagtcgcatgctgttgtcaccaggtatctttgcgcagtgttaaccacgaaaaatgggaaagagtagttgtaaaagcagcttcaatcgttctgagaagtgaattttcgtgtttggttcgtcttgagaacctgcgcaggagtgtagtagccttcaacaagctgcggccgggcattctcgcgcatgcaaccctatgtaaagaaccagcagtgctttccgcatacataccgcgatcactggccatctacgcaattgtttctttgagttattgcgtccgcctttcgccgtggcggtttgttaatgacttgcgatccccatctagcaattggtggtcatgcctggatagcaactgtcttgcaaattgttgaccactgctcgtcgtgtgccgtcgttacaacaaacgttgctgcacgtgggttggattatcacaccagcccagcctcaatggtccgtctgcataaccttcacagaaggaatatcagacatttcaacacttgtgcttcgccgctagcgaaggagcctgcaacgaaaactcggtggcatagtgaacgggtttccttacgtacgtacgtttcggtttggagtctagtcggcgctttccgtcaccgggacgagaaccgggatcagagcagagcacgactccacgaaaaaga

SEQ ID NO: 1708 - DNA, 3448 bp, Toxoplasma gondii
  source 1..3448: mol_type = genomic DNA
gctctcctcaccagcctgtgttcacagatattataactgcatgcccgagtacatttgtacgaatctccgagtgcttttttgatagccacatgcattctcttgtacatatatatatatatatatatatatatatatatggttatatatatggttatatatatatatatatatatggttatatatatatggttatatatatatatacatgtatatatatatatatatatatggttctacatatatatacatatatacgtaaatacatatataattatacatctatataattgtgtatccgcctgtacgagagagattgtgaacacgggagagagtaggcgcgaccgtggcacagcagcagatgcgaagggggattttttttttgcgtagggctgtgtatggatttgtcaaaatgcacataaatccgtttctctccacgacgttagcatcgccgtcatgctctggaagcttgtggatatttagaaatctgaaaggaagcgaagcgcgcactgtacctgctctgtggggcaagcctcgagtgctgcacggcaaccgacagtcggaactcagaggcatgtttagcgagatgtcaattcaagatgcgaggatgttcctacgaaatctgtttcgaggcagcggccaggcccaccacagcgatggccttatatttgtgcaacttctctgcagacaccggttttcacatacgcgttttctgccgtgcgagaggactggaaaagaaccatcctctctggagaaaagcgaaaatcgagccgatgagtcgtggctggttttgatgcctttgaaaagcagaaaaaagcgccactccaggtcacggcaaccaactccccccatatgcgcgtaatcacaaggcagtgtttgcgcgttcttttcctctatcgacaaaaatgtcgacgcatgcactacaaacaactcacacgcacaagtccatatgcaagtacatatatatatatatatatatatgtttctataggcgaatcagaatgtaaataaccgtcggtatccttgtctctgtgggttgatatctgtgaccgacgccatttttgctatcgtttttgtctcgagatctcgtactgttttaagtttcgtttgagtgtctggggacgaaggtgattctccgcgatactgagaagcaggaaattctaaaaaccaggaaactctcacctttcatggcctcgctgatgaaaaattccacctcgagaggatccatgtccgcctggcggacgactgcctttgcgagcgacatgttttttcgtttctccgtatctgtgtccttccaccttttctcttttcagtcgccacgagaacgcagagaacgtctctcgttttatatgcttgtctaccgacgggtgcctcagtctcctcccctcgcttgcggtttagtgaaagaggaaacggaggatcgttgcggctgaagcatctaaagcgcgtcactcaaacctgcgacgttgggtttccatggagtctgtttggaggatgcctttgtcgacaaagattttttacgagacagacaggcaattgcttctgctggaggcgagaaacgtccgataacacaagagaactccgctctcaacactacacacgcaaaagccagagcaagactctcaatgaacgcacgctgagcggttctcggcggtcgataggccttggccaacaacgggaaaatacggatcaaaggacctccagaaaagaaacagaggtgacaaatggagggagaaacgacaggcaaccgtctacagaacagtcgaaacgattccacaacaggagaggacgagagctgatgcgtttcggagtcagcagggaagaaacaacagagtgaagagggaacaaaactcgacaagagtcagtgtggcaagccgacagtctctgcgtttcttgcatccgagcaaggagctgacagaaagggaacctagcatatgcagtgagactcgtctttgaagccgaacttcccaggaagagtgcagacaagaaacaaaggcactagatgcatttgttggctttctgaaaaatcgcgactgttgcagactttcttctcaagaacaaagtaactcgcaggaacgctggatcgtctcgaacgatgaaatcgagactccctcaactttgtgtcccagttactcgcgttcaagcgcggagaagatcttctcggctaaagagacagacagtttcgtgcaacctttttttcctacagtaaagagtctgttcttttgaaccacgtctctcagagcacgagaggaatgaacacacgcgtgcggcgaacaagttgcggcgcacatttccttctggactgcagacgcggctttttcacgaatcgcgattttttcctttgttctcggtgcagcgtcttgcgtgtcgaacaagacggcgaaaaagatgctcaggtgtttcctcctattcagcgcgtctcggcgctgaggttctgtgtttttcaggggcgactgcacaatcttcagtacggcgaggagagctgcgggtgttcgttagaaagtctgtcgtcctctggcctttcatcttacgctcgttgtcagacagattgtgggtttcgttcgtttgtcatgctacagaagatggggcgacagaacgtgcagagaattcgctgctttttctcttcgcaccaaagctccacaacaaaagaaggcagaggacccagcagacacgcgttaccgagtttcgctcgaagtgggtgacgacgaacggacagcgcgcatcaagcaaagacagacacaccgcagaaaagacggaaaggtctgtttgtttggccccacgggtgttgccactcggatttggtaatctgacgctgcatgcatctggtttggaagagagtctcgcgacttcgaggacagcccgataccggatcgaccggttaacagcaagagaagacatcgaaacagtttcgcggtgcaaaacaagctttctttcggctgttcagtgcccagtggaactcgaaggctgcacgcatctgtcttgtggggggacctgggaaaactttggactgatgcacaaaccagaaagtcgagggctctctggaatgggccagaccatctaggtggcacaaacgtatgacaagccgacgccgcgtgagtaccgcgttgtcacgatgctctgtcggtgttacgctgtgagtctgttgctctcgggtgattcacgttcagcgaactcgcaaggaagtctcgagaaagaagcacgttccccgagaagagaagcgacagagaaacacttggcagcctcgaagactgctgcgcgacagcgggacctcttcgcaaaaacctctttttccatgagaacctaaagcgtttttcgctcgacatttaaaagatccgtttcagtgcagcttcctctggcgttgactactgccggttctaaaacacagtcaggttgatcttcctctggacttgagtcgcaagaagcgagagcggttgtagcgttttgaagaaga

SEQ ID NO: 1709 - DNA, 2386 bp, Toxoplasma gondii
  source 1..2386: mol_type = genomic DNA
ttttcgaatgttacgtgatttagcgattttggcatattgatagtttccaacagttttgtattatgtgacattcctttgtacgccaaaatcgtcttggaaacatttgagcgttgtcaaagcgggaagcaaaattctttgctgtgtttgtatgctgtcaatgtttgtcaaagtggcaggagcttgcgggatgtacctgtgcttcctagtgagcctcgggggcgatgcctgagttcgtggctttccacggttgacccaactcgaaatgtgtagcaaacgattccttcgctggttcctcgtagcaacgtttttcaaaatggttttgatgagtgtaccccgtggtggcacactctcacgccactagctgctggcaaactcgatagtcttgcgtgatccaagtagatatgtggggtattgagacagcttccgattaagtgtaaggagtttgcgaaaaaggctagctcgtttttaactaatctcccgcttctaactcattttttacgttttgtaacgagggatagcagctaagagtggtgtactgccagcggccgtgccgtgtacagacaatggtcaggttggaatattgagtggtatttcgtggtaatcgaagttacgagccacactgaaagtggaccacttgcacggttactgacctgcaatatcagcaatttcttgttctttacttcttttgtccatcccaacacatccttttttcacggacagtacttgctcggttctgtctcttctttccatattttgccaatacacgaaactggaaaaccgcagttgccaccaactcctacgtataaaagcgtccctggttgagtggctgcccggataacaacagtagttcgcgtgagcgaatgcgtatttgagtggccgatattctagcctccactcaacatgccgtagaacgcgacgtgcaggggtctgtatgaggatacgaagctggttgttacctcttctcgcgtcgctttggctaggggctcccgggaagggggttagagagggacgaccccttacaaacgggcaagttgtcctcatgttgctagttccagcgaggcacgacgtaaaggctgcgtgtggtggtgtccggagacctagtacgagatatcgatctaaaaacagtgggatgcaggattatcaagcactcggcagaagtccttctgagggacaattcctgcaaattatgttggcgggaaatgaacagcacagtttggcacgctctgtgtgcttgcgttcccgaccagccgcctcgaagcagactgctcatgtacctccgcgactcgcttgatcactgcaggaataattgtaggtccatcatcgaccacattcggttctacccagccctgaggggcatacggattaagctgttcactctaattgagagtgtactgcaggcgttatccacttcatggtcgaagcaaaattaacacggagacaaactgctagttggtcagggagcggccaactgtaacccccccccccctctggcggccactcgaaattgactcccctaaatggcagggctctgaccagataatgcgctttttcgtgaaagccatcgacttgacatactttcttttctaacgaataaacagaatttcgccaaatacatttccgtcgttttagcgtgaggaaggggctcccagaagacaagccagagtaacgccgatcgatcgtgtggatcgaagggcgcttgcaaaactgtcgtcaacctgtggaaacgaccggtctgagaagtgttttacactaagattttccgggtttcttacgcagatttgtacctctctgcttcgaaggagactgaaaagagtggaacaagaatgccgctacccgtccgcagtgcagagtggtcgagccaatgctgtgtctgggacgctatccacccaaggctgcgcgcaactacccccttgaaaggctcagcgtcttcttatcgtgagctcagcatccccagttagcataggtctcaccgttaagctaaacttccttactattttttgctgttttaggcttacaaactgcaagccgtaggtgattcgagttttggggagtcttccccgcaaatcatgtcaacgcctgtgggtctggtacccccccctttccctcctctgcaagacatggctttcttggcgcttctacagcgttgccacgctttgctgtgcttcattcatgcgactacgtggtgaggagtttttatcatttccggactgtccagtctacttcatccagactttcccgttgttgctgtccagggagtaccacggccaggtgtctccctggcacagccactgtgcccgccttggtgatttcttttctcgttgttgtaccttgtgataccccactaccaaaacgcatctacttccacgaagactgacaaattttgcca

SEQ ID NO: 1710 - DNA, 4949 bp, Toxoplasma gondii
  source 1..4949: mol_type = genomic DNA
ctccgtagtagctaaaaaggcgaatgcgttgctgcctgaggttgtcttcggcaccggaagtgttccgactgtgagccgagcctcatctagggtggtctttggtctttataggactttaaaagagaaggcagttgtgtttgcaggtacttcgccaggtgcgtgggcgttgagagtctgtcaacaacgagctcagtgcttgtggggtgataagtcggtcactgctttggcgtttggatccgttaaacatacacgttcaagatggaaatcgccggtcgatcccatcctttcttggggttttgacaacctacctttgagaggctctcttaacaaaaacaggagaaaaattgaaaaagtaacctctgcggtatagatcgacggattcggcacagacacaagttacaccaaacatgtacaggagtgcgttggtatgtctgacgcggcgactgcatgcaggtggccatcaaattccaggaagtttctgactaacacagtagattcgagaaaccggtattttgtgtctgcgttctggacagagtgtgtgcgacacacacggtgtgcatgtgagtgacgttgcatggtgtgttttaaagtgctttaaatgtgacgaatacgcacgcatggaaaatttaagacgcaggctgtgcaggtatgttgaccgctcagaaaaactgggagaaacgcgctctccgaaaaaacattggatctgcttcttaatatattgtctacagcgcgcaaaatgcacggtgcagtctgcagagaaaggaagaaagaacggtctctcgtacagatcactggcgcgtctgcctgaaccgtacagtgcacatttcactgccaaagaggcgacggaagctccaagaaggcgtgacgggagcttcttggaagcaacataaagacaccatctgcactgagacaccacggacagggctggttctgcccgagagagcggcgcaggtggttgtgcctgtgaagagacagaaaagcaaccgaaaggaggaatgtcgaaatcctgtcgcatttatacacgcgggcgatttcattcgaacgccgagtacggggctcttgaaaaggcagagaatggtaacgtcctgctgtcagttaaaatagccctcaaacagaactcgggaaacgaggtgaaagtgcagcgctgaagtgattcgcgagattacgacgcagctttcagatccgctttgcttgttgcctgtttgttcttggtctttggtgacgagaaagaacgcgtgtggtcggtagcgctcatggagagaagcgacatcagtggaagatccgtttcaaatcgtatgcgcgaagcgtgtttggtgtttgccgccagcaggaacctgtgcttctcgacaagtgcagtctattcgcatatagccagaagaggagcatccgcagctgcgtcgccgttccagaactaccacgactagtgcagcctctcgtgcgtcttacaaagcagacttgcaagattcaaaagtctgcatcgcgttcgcttctgtctgtggcgacagcatttcgttaaccgaggagtgctttgcgttgggtctgggaggctgcgtccgccgtggtcagaagacacacgtgagactacaaaacaaagtgacttcatcctgggtcgagactgttcacaacgaaacgagggcagaggtgcagcaattcacagtttttgtctctcaacgtggaaccccgaaaaactacaaacatgtggcattttaaaaatctgccttcgccatcgttcttcccgtcaggttctcagcgcaaactcgcgtgctctgacgtgtttctcttgtctgggatacgaaacaccacacaacctcgagagttctcgtgcatctctcttcctagagaccgattgcccacctgctgtgaaactctgagacaacgcattccctcctgggagccgcagggtggaaaaatgcatttttttctccacccacgcgtctcctttcctcgccgatcccttttttgcagcctccacgagtgcacacacgtcacgccgcgagcgcatatatccgaggtgactgccctattcagcagttgttgtacaggtccgagcgtcggtttagtatttctcttccttcagaccgtcgcgaatgtagatgaggcggggcgcctcctcgccgtccttgtagtaagcgaagacaacgccggcttcgcagtctgcgctttcaccgaggaaaaactggaagtcgtcgaactggcctagaatcttcttcacgagagcctgggcgccgctcatgaacttgtccacgcggtccggatggttcttctccagatgacccttcacacgctgcatgtaacctttgatgtaggtgccgaactccttcttggaaaacggagtttcctgcagacggaaagcgtcgaccacatccaccacggtctcggacgtgctgtccacgccgccaccgtcttcctcgctgaaggaaaaggcaacctcaacagcaaaaaaaaacaggtcaaaacagagaacgaaatgcggcgacaaattgcatgcgcctaggaccctcagacgaacgaaacgacggctgggatacaggagggttctcaagactacgaacagaatggggtccagccaacagcggacggtaggtcgggaccttctttattttaatggcgggagtgtcgatttttctccttcagatcaacaagccacacagactccacgtccatcctgcaaaaaagttaagtgaacggactttcggaaaaagtctaggtcctgcaacgacggtccccgtttgtcctgtcgacctgagaaaggagagcgtgtctgccgagtatttgccggcgctgaagaacagattccgtcaacgcacattcgaagtttcgtgctgaaatgcacacagaaacgatctggttttttttcggtgaaatatgctcaagagagcctcctcacctattgtcagcaatgccgtagtcctcagcacccttgacgatacgcttggttgcaacctcgaacgcaactgaaacaacgcagcggatagagaaaaaacactttgctcgactaacctcaacgagccttacacccttttctcgcgaccaagaagctcgtccgctgtaaactaaacacggcacagaatcgacacgctcagagcggcggagaccacaacctccagcaaaatatcgtgtcgatggcaaatctctatttattccttctttttgggatttctagagaaacgcccaccaccctctttccccaaaaatgtacaatcttgaaataatcgctatgcacaacaatacgagagtcccctgtctcgcacccagtgggacattgaggtacaacattcgtttgcggatctgaaccttttagatggcgacttcacgggcgaaaaaaactcagtccaccaaagtaccctcacggagacgcatagaaagaaaaaccgcaactgagagtgaggggagaagcacgattgagaactgctgatcacggaagcgcggttcgacgcggcagaggcatcgttctgagaggaagtgaggctcgatgcgccgttttcctctgcctcttggtagctgataagtactctttccaggaaaatacaagctgacagtccatgccgcctcttttggaagcttttcaaagacattcgtgggtggaagggaagacgagacgtcggtgcattgccagcgcagtccgcactaccccaccgatgtgacagttggaacgcgtagatccggcgcagttttgccgaagaatcgttttgcacagcactgaaagtcatggagattgccgaatacatttcagggggtcgagatcgcagtcgcaatcgtcgatttgcgtccttgttgccgtccagaactcaccttccgagaggctggggtcgtccatagggggcaactccgcgtaggagtccgagcagagctcgtcaccagtgaaaacgtccttgtagaccttcattttgacagtgatggagacaaaagacggcgaaagaaagggaagaaacagagggagaaaagagcaggaaaaaacgagtggcgaatcgtggcaaccgaccgacaaccccccttttcctcgcagtgaatccgaacggactggggcaccaagtctctgtcgccaagtttccagaacgtgcggggtgggggctctcgatgttgttttttccaaggggttaaccccccgacttctacccccactctttgggaaaaggggggctaacgcagtcttcgaatcttgaggctgttgcaccgctgttcccgctcctttttttgtctctttgccccgcgaactttcgtcgactccgaacccctctgatatcgagagctaaatcaactggaaaacgactctcggtgagcagatgcaggcaaagacgagacgtagaagggcaggaatcgaggcgtatgtcttcacgcaagtcgtagagcggtgcgcgcggcaaatacacgaaaactcatccgtgttggtgagaaagagttccagcgcctgcagacacgcgcggcaaacaatacccggaggctgacgcgaccggggcaggttttccgtccgagaagggatttagacagacaacatctgccgattcgaaagtcgattttctaaacactgcatttgacagcccgcgaaaggacagaaggcagaagcactgacagtttgagttccagaggccgctgggtgttttcacagtgtgagcgcgcgcgcgcccaccgacatttgaggtccccatcccccagaatcggagttgcatgtatctcctgtctcttctgccgatttttgcctttcgcatctcctgcctaccacgtccacacttttagtttggccagacgactccagtcgaccttgaaaagagttccgagctggcgtctagaggcacgcttcccctcgcgatcacttctcgatcactgcctaccctgtctctctctttgtatcgttttttccccagcggtggcgcgtctccttggctctgccctcgcttccaccggctgtcagagtcgccatctgcgttttctttcgactcggcaaaacaaga

SEQ ID NO: 1711 - DNA, 2454 bp, Toxoplasma gondii
  source 1..2454: mol_type = genomic DNA
gtattccctagtggttggtgacttctcgtaaaccattctctcagtgcaggtgacagctctgcggtggaaagaagggcagccgtgtggcatcgtccacgtgtatgtcgaaggcagagtgtcgtgcatatgaaattgcagaatatgtatcagctccccacgtccagccacacacgtaacttcttccgacttctgttacgtccacataaaggcgcttgacacgctgtgtggaatcttttgagctgaatgaatttcaaatccactcacggacggacggaggaagctgtaccgtcgcttacaggcgtttctggcacgtttcctcacccccacgagacttcatcctcttggcgcgagagcggtgcgacctcaaagaaattactgagaagattgcgtatccgctacagaaccacagcgggggatcaggtgactgagtgatgatatatgaaatcggtcgaagctcgagcagacctcgaagtagccttgcctgtgcttgctgtctcccacctttgctgtgaacaccaaacattgttgagggcgcgtagcgcgttctccgcctctgaaagtgtgtcttctacactgtccaccgcactgttcttggtcatgacagatccgtcgaccttggaaacgcgcgggtgccattaccgcagtacaagcgattgagggaaactgttttcccactgtcgtcgataataacatgtctatgtagctcctgaccctttgcgtgttacctcccaacagaattcccagatcgttatcactcgtgtcggagtcgacgtcccctccctttggtacacggcaaagaattcctgttgaaaggtcaagcgaatcaaccacccatgtccccgttgagaaactatactattagacctgcggtgtaatataactaggagctcaagccatatccacgtaataaagcctctgaggtggcccagtcaacgaatatgttcctacgagtggggagccgcatgtaacaccatcgcccgagcacttttactactgcagtttcgcaggactttatcctcccacgcaagcgtcgaccgtatggaagcgaagtaaattgggagaaacgcttgcccggttcctcgcacaaagtacgactacctgcaaagcggcatgccaacagcctttgaatgggcattttttttctgaaaactccctctcctacggtatgcgcggagccacgccgctcaaactggtgacctcaggaaagatcaaccgcgagatgcgttttctggttggcactgcgaatccgtgtcagaagaaagtcactgcatgcagcaatgcgccaggtgatcgattgttctgcgctttgcgcagtcgcccaggtggctaagcgtggggcagaacacagttgtctaggtcgccctccccaccagcgcaccaggtgtgggctttccagggacgcttagcgactgaagcgggaagatactaggaagatccgtgaacggttgaagaggcgacgtggcccgcatgggcggtcgaatgggaattcctggggaaatccaagacgaacatcagagaaaatgatggagcgaaagtgttaggcccgtgattcgtttcttcctcaacccgtctctggcctttgtaagtgaagaaaaaagacgtggtccctctcttttcttcggcctggtgtaaaaatgtaacagcgagagcgtgtcggtagttcagccatgacgaaggagggatgggaaaaaggatggtcgtggccagtacggtgcgggattcgtcgaattcgcgtttttcttgtcgatatatatcctgctggagttgattctctcccacgggaaagggctgcggagcgatattcccttgccgccgcatatttttcttttcacgcgcccgccctctgcagtcgataccccaagcgacaatttgggttcagccctatggactcggtttcctctggtgccactttacatcgtgatacattttcttgttattctataagaaaagacaggcaggcgtagacgccgcattactgaatataaaacccaatactgcggtctctccgcaaagggggggaatgccgtaactgtggcactatctctagtggcaactccattggccatctgcggttgttccatgccgtctcctattgcgacgtctgcggtaaaacaggcgatgttctaaagataattgtcagggctggtgccgaagtttttacgtaccggggactaaaggtttttgtcatcttttggttgtgtggcagtgtgaactggggccactaggcgcaaaacagttccagtcttcccagggtagctcgcttccaaatcagtgcttcagtttttgtaagggcctccccccccccccaatgctgcatcctggtgtctcttcgcttttatgtcagtaaatggcaggttgacgtttgcgtgtggtgttgtgtagcaggctgcaccctaatcgccgtcatcgtttttctctttggacctgccgacttccttaccagtttctccaaga

SEQ ID NO: 1712 - DNA, 3297 bp, Toxoplasma gondii
  source 1..3297: mol_type = genomic DNA
catcagttttcggagcatcgaaggctgacggaaacgcaagcaatccgtttcagttcggcaaagtgcccggtggtagtatccttggggccggcaccgggtccctcttcggaaacggtggaacgaccagctcgactggaacgagtctcttcggagcctcattgggcgcaccggggagcggaggttcggggagtctgtttggcgctgcagccggagggactgcaactggaggatcagagtctcagaggccgggcgctgccccagtagtttcgtcaccgtttggttcccaaagcgcctcaggtggagggtcttccggaggtgcaagcgtgttcgggagtgctgttgcttcacgccctctcacctttggggcgactggcatcgggggaggcaatcaaacctctacaggtctaggagcggggtccgctgcaggaagcacgggtacgttcggtgcagctaccggggctggaggactgggacagagtggagaagatggcaattcactttttgggccacaaacaggcggtcccgtcattcgacgcccgcgactgactatcaagcgaacaaaaaaatgaagtggttttaagtgaaagactaatcgttgtttatcggggcaaaaaacgtgctgcgcgacaactgttgcgtcttctagtaccccgtctgctgtatcttttttatttcggttagtaccgatctctctctgttttatacatcgtttctgtttctacgcatatatttcttgagtccacctgagtatagtcactttgaacgctgtctactgagtgtcacgtatgtgggtttttgactcgccactccactttttgtcgtttcgtccctatgtgggagggggcaaacctagttgtagcgtcgaggaaaataatgccgcaaaacggacaggaaccaggtggctgccgtagccaagaagtcaggcgatactgattcacccaaggtaaatatcacctgtaagacaatgagggaacaaactggacaaagaagcttgccacagccgcaaaaggggggggcaccgaagcactctgtccatttctctgccttgttacagttcagtagatatgatgaagcctcatggtgagctttatcgctctgcactacatgcttcaaggtatcacggactctgagaaggaaacaaatgagttgccattagggctcacatacgtctacccagtcaagcgcgacacttttccgagatgagattgcaaggtatactgtaacggcaactgtgtgttacaaagcgagtccactgattttcttcaaggggtctaacatattcctttgttcaaagaagccgcaactttatctgggtccacaaagactacacttagttggcagtaggaacggctgaagcggtcgggagacggaccttttctgccgtataccctggagccagttgaaattaatcgagtagtgcatagttcggaggacaaacaagtaccgctgatggtatcctacgcaacgctcactcatataaagtcgtattaccagattcgctaagttccgtcgacatatggaagatgctttacactgtatacaacaagaaacgcatggactgatgggttgttactcgcacggccgtttgacgatcttggtaatacgttcagaagggtatggacctcgtgtcgttcagcggcaccatccgagtatatttccttcacagacttcattcgttgtctcaggaaacgactgctacaaaaaagtatcagtgtgtatcagaaaatacccgtccgacggagagcggagcccccgcagcgcagcaagacaaatgacatctctggtgttgcgcaacaaggcggactgtgttttttgcatcaccgcgaaattggatgtattccagcgaaggtgagcagccagatagagtttccggtttcgcattggcgtcggatcttaaaatacggcagtaatttagtgtcgtttgacctcgataatgatttggatgtcctgttgaacacctgcacagcgggcatgctcagcaaatcggctgatgcgtatgcttgcctgaatgtctgtactaatcataatgcagtagttacagcgggctgctacaaacgaagtctttttgagtagttgttgacgccagagtactcatactctctgacaagaccgagattccgcccacttggtttggacttaaccagtacaaaagcgacatagggtcgccacactgtgtatgtggcatcaatgaacatcctacggaaatgccgcaatcacagttgttaatccacgtcctggatagacgcagtcgaggcgaaaaaggctgaaaaaaagatctgccctccccagagggccaccctgccttgcaagagcgtgagggcgcacacactcactcggccggctcctgatgggccacagaaagggcagctcgagggggaatgcactttggcggcagttccgcgggaactccaggtagcaagtgactgttcttctgttgttttggcggactgttccccctgtaaggttctttggcgatctggttcgatagttaggggtccgcgatccgtatgttgtacttttcgattgaacaatcagacactagacgctacaggctcaaagctgtagcgagccatgcgttgcggtaccctcgcgcggtatcgcctatacgtcacccgaagcagcgtatcctttattgctttctcgagaacgcatcccaacttttttctgtagctcatctcgaggtgagaagcaaatctcgtttcttaggttcgaatttagctacagcgctcccggttgcgtaaccctcgttggcgagccaggggcccggagccgaggggtctgtgctgcacggttttgttgccttagttgtattcatcatcagagcgatccattctttctttgagtcactgggaatcctccgaacgcaacttatcaaacagtcctaagctcggtaggcagttgcctacaacacagtgagggatattctctgcatcgataaaggaccatccccgttgagttcgctctgcttctccattctacggaggcgttgctacgccccaggaaattgctaaccccatgtctggtttcagtctattgtcactttgcctctagttgagccctccttggcttcagtgcccttcggcttgacgggcaaggtgattcttctcttcatcgaggaaaatctcaaccaacccgacgtgtcaatttgcaacagttctgataccccaatcagctgtcaacaagggcgggtctagtctgacaacggagattcacatcagtggccaaaaggcaacctagatactcggttattttcgtcttctttttgattttgctgctcgctttctcacggtgtacgaa

SEQ ID NO: 1713 - DNA, 3556 bp, Toxoplasma gondii
  source 1..3556: mol_type = genomic DNA
cagagcgcggttgagaaccgtcgctgtgaatgtccagatatatttgtttcgcgtgcatgtttgctctgcaggtgtggggaatgatgcagaaaacatggcgaactgcgcgcagggaggaaactgtttccgcttctgtcgagactcggtttccgaggactttcgtgtgtacagagaaagcgtttttgcgtgcggaagccgcttggctgacctggctaaatagtcttttcttgactctgacaattttttgaggaaacgcgagaaaagatcgaccgatagaagcccccggcgtcggttttttctgcttcgttagcatctcctttcgccgcggctatctgtgagctcgcatatccaggcagcttctgaaccgcatgaactgcaaccgaaaacacaaactaggagtcgagttcaagagaacacttttcgaagaatgatactataaatttatatagaatatcctttttatttgttacaacaagacctattttaatggtaatgtatctgtttgcatagttacttctgaaaacaactcaaggaaacaaacttgatctttgttttataatattctccaataaacgtgcaaggtctaagtgaaaaagtcaacatcgtgtacacgcctcccccgtgcaaccaagacaccccactttaagtcaacgcacaacaagaacattttatgcacaaaattgctaccacagaatgcaaatcagtcttgtcgatctatcaaacaagcgatgtacaaccactcgcattttttgtttgctgtaggcggcatcgcctgttcacgtggagcgctctgcttcacggagattccgaagcggcctctgcgtggtttcctgggagattcttttgtatcggaaaatgcattttcttcttaggctcctacgtcgagttttatttccagaaagacaggatcatcattaaccctagctttcgaacgtttcaaaccaatgtcttttattttgaaaacggtcgtacctacttcaggctgagcatgagcagaaacttgcttcctcaccacctcctttaccggcaacctttctgccggttcccatccttgctaaaacccttgtgagaaaggggcacgacaggatctggcatcgactgttatattcacttaagagttggtccaactctccacatgtggttgatctagaacttcacgaaatagaactgctttagaacatgagagtcaaggtcgcgcggccacatgcgtaagaacgaccaccacacacgcacaaacagcgcgctcgagttaacggaagaaaaacacctgaaatggaaacccagtggattccaccaagaacctcgaaactctcctcacacatccaactttcatcaatatcgctacaaggacccgaacagattttcgtatgccgccggcaaaacctgctaagcgggtgccaccagcatcgggattggctggtacagggttttctgctttcttgagcagtctagactcgtgagccgaagcatttttacatccgaccagccacattcatgcatcaactcttcctttgagagacgtccaccgctgtgtagaagtccctttgctacagtggacgactgagacgtttgctcaccagatctagtgccgtttggtttcgcagaacaagatgaaacgcttttccactatccagtgaaaaccgtgagctcgtcaggtgattcaaagccgcagagtcacttctcgagcttagtgtattgtaccctttttcaaacgccgacactctgttgtttcccgtcaaatttcatcgatgctcttccgagtctcctacatcggtgccggcgccagttttttgtcgttataggaaacgccattcagcgttggcgcggctgtgccgtggtgccttccacaggggaaatcgaatttttactccaaacgagagtagaaatttcaaccagctcgcactcgggtgagccgcgtggtcgctccgttgtaaggcgtcagtgtctgtgcagccggttgccgcctgagttcttgcacgaggcgagcgaactttcgtttctcgctgtctttctccgcgacttgtgatgtctacgaactaattcacgggacccgattccaaactgccactgcaataagagggaacaccgatttagagagtttctaaagtggagagcagagctgcagaggcgaccgagagcgggtcgcgattttagaggcacaaagtgaggggccatagacagtggtgtaggtgtagacgcaggtgacgaaagcactcttcgcgctctattcggagacagctgggtcaacagtgcgtgagaaacgagactcttttgtcaaccgtcacggcgaaggagtacgcgccaaagatgtgaaggagtgcgtttcagtttgagaacgaaagaaagagacctgacttctattgagtaggagagtgaggcccttcgtcgggggcgactccggcggtaacgcattccaagtagacagcaacagaacgctcctctgttgttcttcgaagcacatccgctttttcttcatcgctggctacctatgcctgtctccagttccaccatttcacttgacgcgcagtttcctgcttccgcgtttagccagttgctccctggcgaggaacgccgcgagctgcgcttcttggtccggtttcacaaagggcatttccgctttcttggtgacactttccgtcgttttctgcctgtcaaaaaagacacgctgttccgacccgcgtcctctaggcacccgtgcgagcaggcaacggcaacagaaggacgtgttagaattcgggcatttctggatccgcacgtactggtccctgaagccatttccatcggatgctcgcgtcctccgcgtcagatctccgtacttaactgccgttgacttcgaatttcacgccgtgacaatcggccgaagtgagccgaatcgacataacgcgctggcatttttcctttctgaccgtgattcttcttcacgggtagttcttcgcccctctgtggaagaggtgcgcaagtagccgagtcgaacatgccctcttcctagagttttactcgggtttgtgtcgtggaaaaacgcggcaacattcaagacgggccagccagacccggacagtttccgccgcatagaacctaggaacgcggtctctgtggtaaaataaaaatcggatactaacgcgaatcccacgtcttccctttttctcgttttgcaaggccccttttgtccacactttcgagaacggcgcttgcagaacacagtgcccgccccttcgttgaacttggccgttctgtgtgtcggcccattccggtgtcggtacacatgggaaaacgcaatccacacaaatttctgcgtcaaccgcttcgacacaagagtcgttgtactttttctgtatctttcgaccggaagagaaaattgtttcccgtttcgtctccgttttatatgcgttcgtgtaccccagccggcctgtctcttcatcgaccgactcatttttgtcgtccggcctctcagtgattgaaacccagccttgcgcccttcacactgcgttcgccagtggatcgaaggtgcacaccgcccgcatcgcttttctcgtggtcgtactttttccagacagaa

SEQ ID NO: 1714 - DNA, 1875 bp, Toxoplasma gondii
  source 1..1875: mol_type = genomic DNA
aatttctgtgacagcaacgctttcgacaattcttcggttgcgcacgaaatcaaacagccgcctcaccagctgctgtatgaggggtgggcaggcacgcgcacgatatggatttgctatagcgctttctattccacctcgaacacctcggtgtcaacatcagtgcagtagatgtgtagaaatgcaagtcaagttccatgttccggctttctaaagagcctcagtgacgctgtgttgtgacaaacgcatagaggtgctttcctaagcgtcctcaaccagtgtttcagtcgacacatgtcagtgtaacaacatacggaatggtacaaaacacgtctgggctaccacgggaggcagacggtgtgtcctctccacatgttttcctttcacagccgtcttgaacaatttgtgtattatcatcgaatccggacaggccacattagccagggggccgtgcgctcgttgaactggttggaacacttttctccatttacatggaacctcgctatgtacgctgcagccaaacaaggcgtagtattttttgtaaacagagacgaaacaaggaacaactggatccacgagactcgaccgtcggcgcacggtcatcttcttacgtttcacgtgtaaaataggacgcggcaatgtgtgccttcttaggaatactcgaatgcatctcgctgatcgaggtatatgaatgccgatgattcccgtttatcttaaatgtaaaaacatccttccatgtcaatcccttttcggcaccagtgtctcgctctcgcagcggctcgagtatggcgccgaagaaaatttcttcttttggcaccaggaagcagatatatcacttgtggtactctggtggcaatttcttcgtctcactcagtggaccttcgggtaaacgcacacgccccttgcacaccgtttgcacaggggtatcttctacactgtagagaaccctttcgccagatagagcgtccctcttccagaagcatctttgcacgaagcagatctattctgcagtgttgcgcggcaaacaacagagtagaactatgcctttccaaggtcacttgaacggtgagggacgtccactggagattccgctttgtttcttaaaatactgttctacgctcttcccattcggaggaactgtgctggtatggaacatggccggatatgtggaagacccatgctatctggtataagaaagattgagagcgaaattcgcggaaaatgcctttgctgtttcaatagttgtgctcccggccgactcgcgcatgcacaattttgcatgctgggtagttgttagcagcgcatgtctgctgcaaaaatatccatgagcgttctccggcagtagcaacccttggtctgcacgtttgttgctccctttccccgccatacagtggaattgtcttttcgaaggaaagctcgatctgtccccggcggaagctgtgccgtcaggtttgcgtttggaagcttcagtgattacggggataagttcttttttccagttcgtgaggtttcgccaaagatacaacattgccatgtttctctctccattcccgcagttgcgagtctgtttaacttcctaacgtctctctttcctgttggctcacgaaaaaatccctttgcatctctgaactgacccttgccctatattttttcccttcgtgcaccacactgtcagtaagcgcagtggtcctttccacgctcgacatagactgataacggtgccaagcttccacgttctgtaacaggaaacgtctgccgttgttctctgtattgtttcgaacccgcaccgcgatcatccgttgatgctgatgtaatcctctggaaaatatctttgttggcctcattaagatacccggctagtctctctgaaataaaaaa

SEQ ID NO: 1715 - DNA, 2030 bp, Toxoplasma gondii
  source 1..2030: mol_type = genomic DNA
gcagacggaagatccgatttttaggcagggaaaaagcgaaaagacgagaggaacaccagagacaagaggagaaaaagacgagaggaacagacggacgagattgtcacatagttcaggcgtagcagcagggtgaaaattgggctgctcgtttcagaagaggctcatgaatgacgcaggctaggacgagtgagagcagcgcgaggaacggcgccacagaggaaaggcaggagggagagacgcgaactgagagcgacgcggagtccaagaagcgaggaagaagacactgaaggaaagaacagaggtcgaccagaggtagatagacacaggaagagcagccaagtgtagcaagagaggaggaagagagaagaagagtcgaagagaagagggggaaatcagaatgtgaagtggatcggagacagatatcgctggccagaggagagagacgagtttcgaggaagtgtgtgaggctgcgacgccgccttatacgagaagaaagctgtgtgagcgacgtatccaagggtccttgcaagggaacgcaattctgttggattcgctgcatggagttccccaaaaaagcgaaatgttttgagagtttcaggagcctgaacttcttacgcgtgggcggctggttaaacgcttcttcagggatcgccgcgtctacggagcgagccagaggactaactccagctgtcgctgcggctggagctgcgctgaagaagccgcgagactggagagaagaagagaaggaagcgcgcaggcgcctctgagaaacgctcagggacgaggccccagaggcgacccgcggcaggaagcggaacatcatggagaagaaggggagagagatcagcaagtcgccggtggagacgagagaagacagaaagaaaccgagcaggagtgagagaagaaggaagagatcgggagaggaggcactctgggtagtttttattcgtttgtatggatgtccttgagtacccaagcagcgcgctagggtgaccgcatgcaccggctgcgagagcgacgggaggtgggagagggcagaaaaagaagagaggagaaggagagaaaagaagagaaatgtcggagacagacgaggagaaacgcacaagagcagagcctgttttccctagagagggaacgactctggattcgcacagcaggcgcgcagagccgcgtttgcggaggcggagtggaggtggaatcctcgagctcgcagcgcgttctcccggctgtcgttcgaaccaaaaaagaccaagtccgcgaaaagtaaaagttcgggccctctcctcgagccgaaactcgcccccccctgtcgccctctcccgggtgtacatacaccccagcgctcgcgcgccgcggatcccagcggctctgcgcgcttcgtacatacgccgcggacgcgcggctgagagacagagaaagttgcacgtcggctgcatgttcctccgcgtacgcggactgcgctcttttcctgctcgtcgcgtatcgctggaccggcttttcgtgaggatccggcgactgacgagtcggaaaaacgtcggcaaccagcagagagactgtccggatacgcatgtcttctccctggtgaggcgggagaagacttctctgggcgagagcgaagaaaagtcggccgccacgggagacgactcgccgccagtcgaaaaggctccggaaatcgcagctgcctcgtctgtctcgaggctgcgcaacttccgcgagtcgggaggcgctcgttttctttcgctggaccgcccgagcctgcaaagactcccccgttgcgaccgacagctctgcctgctcagcctggggacgcacggtttacgtccacctctcccttccgcagagacagagaggaagagaggaagaatcacgagacagaacgaagaagagctcgcgggacagaagtccgcaaggagagacgagagcgaacgagaaggaaaaaggacaacaagaaggagaaggaaatcaagaaggagaaggaaaacaagcaggacaaggacaacaagaagagaggagacatctggaggaagcca

SEQ ID NO: 1716 - DNA, 2360 bp, Toxoplasma gondii
  source 1..2360: mol_type = genomic DNA
ttttcagaaggaagcagacagcgttcgtctgcagttcgctcttcagccggaaagactttgtagggaggaaacggcgtcctcgccatcgaggctgcggcagcgtccttgtgcagcgaagagagactcggagacccgtgagccggcgcagaggagagacgcggagaagacagatgtcgagaagcagagaggccaccggaagaagagtgaacagacgacggatccgaggaacttctgtctccacgcctggagagagagacgtcgcaggcgaagggcgcaaacggactcgcgtcgtagaccgaaggagacagggaagagagggaagaagaggagacgagaggcgaggcaatcgaagggacgagagaagaggaaggagagaggcgagaaggggagaggtctgcgctctcggatgtctctacagcgcctctttttccgttcgagttgtttccttcctcagacacagaggaagacaccactcgcgagtcatctgcgtcggcctgcgcttcatccgcctcgtctccgtctgctttctctgtgttctcccctgagtctcggccgcgaagagaggacacaagaggagagcgcttctccgacctgttgctcgcgccctctctcgccagacctcgttctgtctcctctgctccagagtctctgttcctcgccgctcctttctcctccacctcgcccggggctcgacggcgtgccattcggcaagcgacagacgcaggcccgggaaccgagaggacagacagaagagagaagaagaaagaagaggagagacagaagagagaagaagagagagaagagagaagaagagagagaagaagagagagaagagaggagaggagagagaagagagaagagagaagaagagagagaagagagaagaagagagagaagagagaagaagagagagaagagaggagaggagagagaagagagaagagagaagaagagagagaagagaggagaggagagagaagagagaagagagaagagagaagaagagagagaagagagaagagagaagaagagagagaagagagaagagagaagaagagagaagagagcgaaaggagagacggacggccgaggagggatgacgttgcagactgaaggcgaggagaccgtgagaatgatgagacgcaaggatgtccagcgcataggataggaggaaagcgcgttcgaaacaaacgagaaacaaacgaggggcggtactcaaagaagaaaaagacagagaagaacttggtgacagcgccacggttctcaggagatcatggcatcacacggcgacctgtcgcagcgaaggtcgcgaagccagccgacagagactttttcacctttccgcgaggaaagaagaaacgccctgtccgtcgcctccggtcttcaactcactaatggaagccgcaaatctcttctctgcgttccaaagaagaatcgtcgcgaaagttccatctccgagtcgcagaggttgtctcggcatccaccaggcacaccactccctgatttgtctcgctcctgatcttgtctctctctcagcacagcgaaagagaactccggatctgcgcctcttttccccgagctctccgcaggacagaggtcatggagaagaaggaaactgcggatttcctgtttgcttttcggcatccgtcagcgaatctccctttcttccccgttctttttcgtacctttttcgcgtgtctggtggtctggcgcgcggaagaaccagcgcgtcgacccgacggcgttccgcatgcatctcttctcgcttgttctctcctctcttctcgtttcttctctgtcttccttctctctctcctctccttcttttctctcttttgccctgtcctgccgtctcttctcgtcgttctctctaagcttcttcggctcgcagggactcgctcaaatggccgcgctcccagagggtcgcggagagggtgcaaggccgtcgcggcgcgcggtgaccgcgacaccgcagctgtgtcgttctttcttttggaatttacgctcatctgcggcaagacgcgtcccatgagttcagcaacgcatcgccgaaaatcctctgcttcttcgcggcacgactgtcctcgtttttctgcctcctcatcctcctctcctgtgccgttccccttctagggcaagacagagcatccaggaaaagatctcctctcggccctgcagggaccaagaacttgtttcactgactccttctccctcctctcgactactcagcgtctctctgtacagacatccgtcatccttctcctcttctccgctctccagagctttacactttctctgagttttgtgcctctcttcccctcccgttctttctttctctgtatcaggcgaactgcagacga

SEQ ID NO: 1717 - DNA, 3342 bp, Toxoplasma gondii
  source 1..3342: mol_type = genomic DNA
gaacaagtgatcagttttctcgagagagaattcccagtgaagatgccggcctccggtggctgacaggggaagaaggacatgcaagaactgggggctgcacaggaatggcggattcttgtgggagaggcatgcacgagagaggaagttgtgaggaagctgggatggtgccgcgaggattttcgtgcctgtgggctctgtggaaacgcgggacaggtatgtggacgcggctagctgccgctgtcaggggacgaacggcggagaaggagtgtcagcaacttcaaagcgagattgctgcactcgaaaatttgtccagggaattgttcgtcggtttaaatgatttggtccagtctcgtgctcaggctatttttagcaagacattactcggacgacttaacaatttgatgggatggtgcatgacggtggtgtgtgtctaccggataatgacggctgccattaatgtgctgttcgaccgagtaagcacaacagatccggctaccagagtgttagagatcgcgctgtattacctaaacattcctcttaacgttgcggtcgtttctccgtacctgtctctgctcttactcggatggattatcgcgctgacaattcgagggttcattgagaaattgcttgctgtgtttcgctacgtctccacatcggtgtcgagcaatgtatttgccttggttatgtctgaaatcatgggtttctacttctcagcatgcgtcttactgactcgcgtgtacctgccccagtcgtatcgagatgcggtgactgagattattgctccatcccttgatttcagagtcttccaccttcactttgaccgcgtgtttctcctctcttcgttgacttctttgggaattgttatgctttctcataagcacactcttgaaaagttcaaaagtctttgatgcatgtgtgaaacacttgttttttaagcgatggttttggacgcggtgcgttccgccttgttctttactgtggggaggtgtctggcatcaactgcggcttgtggtgaccttttatcggatgtgtccatgccaaatggagaagatctatgttataaaagactgttgtcttcattcagcgaaaagacagtgacaggtaccaacggtgcaggcacaggttttgagaccgaaggtggcgactgcgatacctgtacacctattttgggcctcctcccctcaatcggtttattgatacatgtttaattgtatggattgctcagcacaatttctagttagagctgcgtgttgagaggttctggtagctctagcctagctttctttacggaggacattatccttccacttcttcagcagctgtgttgcacatccaaaaccagcggactatcgtttttcccctgcacgcatacagtccaacagcatgctggagactgcgcgtcactgaaaacctttaagctactcagtggtgggagtcctcaaactgcttttagctgctgagacggcgtggcgttccttgtgctggcgcagcccgcctacacacctcatcagaaaaggactttgtcctgcgtcacccacgacttgtggtgcacccctgcggtccaaccaactgcgctctgtgagaaaatggaaaatgtttctgaactgcgtagttcaggcagcactgcttcctcctaccaagatttgcattgcccgtacagagttgacataacagtgaacacctaaaagcttccaagcacgaacaattccgtcaagtaatttgatcactcatgcgcccgcttgtgcgaaatcgagtcaagtacttgtcgggaggcactacggatacacttggaataccgcacactggttgatccgatacagtaagcgcatatactcagctgttgagtgtgatagttgacgcagtgatatgaattatcgtcgagctgagggcacacgctaccctacctagctgtcagatgctgcacaacgactcagtatcacgtgtgtttaagcgctaaatgcctatcctggcttcctccaacatcccagaagggcctcacgaacgcctgaccctcacgattgttgcttgccacagtactgacacgaggtcggtgacagagaaggcaatttgcatatgcaacagacgttcggtacaccatataggaagcatggtgttgattccagtttatggagtcactaaaaagtaacgctggaagttcgcaccatctacattcttctcgcgcccggggtgtaactgtcacagacattagcgtgacaaatgtcgaatgatccgttggtggcagatagagacagctgctttccaagtggctgcaagtcgttttttgtgtgtcactcgcatacggacagcaatgttgacacaccactcctttctggtagttccagcttcttgtttcacactctttactctcgcagttcattgagagaagacctctcgccaagattgtgtgtcactctctatatgtaacatccattttgctcgaacatggcgtgtaagtagcttgttctccgaagcacttacggatttcccggacaccatcatcgtccacgcgcgtccaatttttgtctggttgtggattgcgtatacctggacgatggttaccaccgcggcagacaccttgcgtagtttcgctgaacaaaacacgctagatataaaaagttggctctacatgggcgaatcgcgatattctatactttttaatatacatgcacatatattgtggttctggatcagctactgctgccgttggttctggacttgaagtcgcaccggacctcgctgaagtcgacgtggacggcgtggccgggaaagatttttcttcgacactcggtctgtaactgtactagacgccgcattttccggagattttccctttttcacagggaatgggaacgtgcctcatctgcctgatgacatatttgtggcgcggaattgactttcttccgtatttcgtgtgcctacagtgccacgcggttgacacctccttacaacggcgcgcacgctgtgctttctgggtgcgaagccgtccggtttctgctgggacgttgcgccaggcagagcctgtattgtggtggagagtgacgcctccttactcggtccgcgttgaagccgctgcatgcgggtgagacgcctccctgcggtgaacttctgtcccctgcacgtacttcagtggttttctgcgcccttcgttaaagcgcaacgttggtcttcgctgggggggtcggattgcctggccggcgtcactttctctttctgtagcaggacgcttgcgaaaacgatggtggggatgtcctcgtctcttactactcaccagccagaatcgagggacgcaagcgaaaagcttggttgatggatctcaaggcaacgtgtttttctctgtgttta

SEQ ID NO: 1718 - DNA, 4992 bp, Toxoplasma gondii
  source 1..4992: mol_type = genomic DNA
ggactcaccttatcggctgcatgtccacgaggagttgctgctcgttgggaggaatgcgcgtctccgcttcgatgagcgccttcagcgcgtcgacggttgtccccgcgctgacttccagagaaaagacgacgcccgaatctgtcggagggagacacaatcgtcgaaatgtcaaagaacgactcatctccagtgcatacaaaaccacgcgcaggccgccacatacatacatacacatatatctatatctatctatctatctatatatatatatatatatagatttatgtatatttatgtatatatatatatataaatttatgtatatttatgtatatatatatatatatatataaatttatgtatatttatatatatgcatattcttagttggatgaagagatggccggagagtcaggagaagacagagatgcacgcactggcagacgcacaatttcgacaacctcaccaacgtgtagagctaaacagagaaagagagaagttgaagctgggggtgtcggcgttggagatatttctgtacaaagacgttgcggacgagagtatttgcatgtgtgtgggtgtcgtccgcggaagattagtttccttgagccgaagtcaacgcaaatgcgcaagagacagtgtgccgggcgaggagacatatcaacgtggatggggagaagccaggcgaagacacaggcagagtgtgtctcggaagaaaagagccgagacaagaggcgtaccgtcgtctgcaatggatatctgcatcttggagaacgccgcgacgaaatttctcaggccttcgcggaaaagaaaaggcgtcacggggacgaaggacgaacactgcgatggcagcagcctccgaagaacgggagagagacagacagaaaggttaggaccaggagaagagccgacgacgacgagacacgagagaaggtaagagcacaaacagagagatggaagagaaagagaagacaccagaaaggatgcagaaaagctgcgaggctgccggcgggcgggaggagggggggtcgagtgcccgtaataacaaaaagggatgtccttgtggagatgttgtgttatccggaagagacagaagccgtcgatgtgctttgagaaattgcagagaaatccaaaaaactagacggcccgtgtcttgctcagcagctgcctgtgcgtatacagatgtgcgaatatcttccttgagctgaggacttgtcaatctccaatctttggaaatctgtggagatgagaaggcgtctagaacacccatggacaacgaaggaaacgacagtggaagcctcgttcttttttccttccttgctctttctcgtggagttccaggaagagaaaccaagacacaaaggcgaaagaaggctcgcaagcgctttgctgagaacaacgcggaagttccagaagatcgcgagaaatggaaacgcagacgttgagaagagggtcctgcggaagaagccgagcgaaacaagtcttccaagaaacacgctgaaattcgaaaagagaaaaaccaagaccttggcacgagagaaacctttgtttcttgcgtctttgccatggcgtagcactgcaacgttgcgcgctttttcgcagccaaagcctcccgacggcattcttctcgtcttgtgttcgaagtactggcctctcaacaaacgcgctctctttcgttcctcgttttatcttttattctctttcctgtatcgtcagcgtcaccactctctactgcttcgttccgccctaaccctgcccagaccttctcctccggctgtcctgtaaacgtcttgtttcgactatttctccttctttctctttttctccttactctcttgtactttctgtctctctttgtgtctcatcgaactcctcttgctgtctgagacttccacgggcggctggtgcccctccacatcaggattgcacatcacctcaaataggacaggtgacacacacctgcacgcaactgtccgttatttttactcgcggcgacgggtggagtataatggagtgtgaaaatcggttctcctggaccgtgaggctgagggaaaggaaacatatcttttgtcctgccgtttcatgcgtttatcacagcgtttgcagatgcacgcagacatctgggcttcctgtcggtctgcgtttccacgccttttgtgttatcaaggaaggactggggatccagacgcggcgtctatgcggtggcgttgtttcagagaactgggagtctctgtatcggtgtgctggcgagcagttccctttgcgacataactctctccgaaccgacgccgcaactgcataggttctccagcgtcgttgataggcataggcagacagactcgttcgaacagacttgaatgaggaaggagactaccacagttaatataccaatgctttacagccttcttcacgcccacataaactccgagagcagcggcagcgtgagaggatgggagctgaccgatagactgcagcttacctgcagcggaagagagaccgaacctcctgaggcaaattaggatttggtttctcaacgaaaatgtccggtcaccgaccgcacctcgacggtgttggttgtttgcagccgtcacccccgctcggctttcgtatggaaagcagatgtcccggagaattggcaatgatttgcagcgaaaagaaatgcagagtgtgttcggaggtgaaagaagtggggaactggactgcggttcagtttttgcgaagctttatgactcggttcagtccatttgacttctgcagttctggatcgcatccatagattgcatctggaacatacgcgaaagaaccttagtttcgtcaagtatcgaaatccagaactttacagcagatcgagtgtcgaggaaccttctgtcggacgatattcatttccactactttttgctgccttcagcaatctacaaaaaaagttgtcgcccgtgctgaacgctcgcgctccgcctggcaactctgagttacatccgagaaacagtctgagagttggtgtgtgtctctgtgtgtaacgtaaagccatcctgctctacagtcctgttgtcttggttgtctacacacccctatgtacaactcttgtgttatctgccaaattctttcgcatcttgtgagctcaatgctccctcgccggaaagcgccgtgaaacgtctgactaagaggcccccactcccagcacgacggcgctgatcgaagctgtcgcatctcacggctctctctagccgacgcgaagggatgctgtgcctgcaaaagagaagagggggaaccgcggaaacagaaaagacacagaaacgggagaagttggcgtttactgagagtgctgaagttccccaaaattcctgaaaaaaacggtgtcgatcttacattcttctatgcccatcgtgtctatttctgatgcactctcctgcttcctagaaccacgccaacacccgttttgtaatgtccattcttttcttcttcagagaggtaattctctccatgcgcccgcgcctccgacgggaacttagcactggtgaggtctcgaatgtggaggcgcttttgaggaaggagactaccacagatgttattgtggcatctattcacagcttgcatcctcatgtgaaaaacgcagtctaactgggttccgacaaaaaaaaacagactttccagatctccaagacagctgcaacaaaccatgacagcctcccacaaaaaaaagacgacgagagaatacgcggcggagagagagggagcaaggaacagagacagctcgtgaaacatagagaaacgtggagagggaaggaaacgatgcagagagagacgagcaagagtgaagaaaacagaagctgcaagacttgtgaagatgtgcacagatgaggggtgagagacgaagaagtccaggccaccaacgatgtcgattgtggtcggcagaagtaccgaaaataaaagagaggaagggggactcgggtagtcgaaagtgagatactgtctaaaggtaggaaccgagttcacagctgtgcgtttgatctgtcagcagccaccatgcgctttctttaaaagttggggagggagttctgagacgaactcacggtgaatagcaagcaagtctacgaaaagaaagagagaaaacgcagagaaggaaacgaagcacacaccaaggctgccaccaagcgaaacgcctcggggtacagcggttcgctgcatgcgcacatatatatcggcttgactgcatgcgaagcctttttctgtctcgtcgtctgcgaggcttgtttttacttcttttccttcctcagttcaaatcttttgtattccagcctgctttcaagcgtctgcacgctgtcgcacaggtcgcgtggatgaaaagcctcgggaagcagagaaacgccatgtccgggggtgtctcctcgcgaaataccaagggtcgcctctttttctctgttcgtgaccttcctccttggtcttctttgcttgcctggttctccgttcctgttccctttcctctgcacctctcttttcgctttctttccccttgttccctcccctttctcccctgggtccatcttgtacgtcgttttctccgtctcgcccagacttcgctgttctatccgttcttaatcttcgcgtttgccgtaaacgcgtcgacagctcctgtgtagattcacggaacctgccgcatgcatccgtgctcactcgcgtctctctgccgatttacctgtattttttgcctctgcatgcatgcttgtccggcacacacggctaccgaggcgcgttgggtcgtccgagactctcagcagagttttcttttgagccgaaggtcgaggagagagaggagatgctgcatgttgtctgactgattcactgaggtcccttcaaaaacgggagtttctttaggagctagaaagtgcgagagagaaattttcaaaaaacgcgcccctggtggcacagtcagcaaacgccgtctggacactatgtgcatgcaccgtcgataggcggagcatttcaagtccgccggga

SEQ ID NO: 1719 - DNA, 4358 bp, Toxoplasma gondii
  source 1..4358: mol_type = genomic DNA
attccaatcgctgcagcagagctgcaaagtccctcagcatcatcgccgcatcttcttgagcgagagccgggagctcccggccgtcgaactccggcactgacaagcgccgggtctcgatcgggggcgaaaaagcgggcgcggggagacaaacaggcgagaaggtgggcgccgcagcgagcggggccgcagccctgcggcgagaagaagaggagacacgctctgattctaggcaggaaggtggcgaactcgtcagaggcttcacaagggaagagagaggcttcttctgagggggcccagaagcggacgtgtgggtggagggtggagggaaaaaagaatctaaagacgcgttgtcagaggcgagactcccagcctgtcttggaggtgcggttgttgatgccgcttgagaccgaaaaaggcaacccgacagtcgaggagattgctgtgaagaagctgacaggttctgtggggctggaggaactgtggctcgtgtctgcggagcagacttctgcagagacaaggcgacggactttgcgtcttgatcggtttcatgacttgatttgggaagggaacctggaacacttgactgtttcacattctcagtgcacccatagtctttctcttttcgccattgttcgccacgcgactgcgctctttcttccgtaacgcctgtcgtcgtcagcctcgctgaacagcactcctgggacgaggaagcgagaggagatgagacatccccacaccacgttttaacgcgttctcctccatcgtcgacggctctgccgatcagcgctgcagactcggagacaggaggcgcgacggcgcccgtggagcccgaaaggggcgaaggcctccgcccgactctgatagtaaccgctgagggtcgcgtggcatccgctatgctacttggaccttcgatttgtgtggaaaatctggaaaagatcagagcggatgacgtgggcgaagtggctgctcccgaaagcgacggagaatcagcgccagggagagaagaaagaacgtcggaggagacggcgctgggagaaagcgtgacaaacgtgtacgtggggcgagacatcgaaaggctcttctcgaggctctccacaggcgaagagtaggcacggagagggacacggaaagaaccttcttctggcctctcaaggtctctcagcaaaccgaagaaaaacggaacaaaaaacgagaaaaaacacaaagaggaacagactcgcaggcaggacctgggctacagtgaagaagcagtcgcagccttcgctgtggaaaaagaggcctcctccttgtttcaagtgtccgctgcagttctcctctctttccggagtgatgtggccaacacaaccgacagaaaagtgtagtggaaaaggcacacacgaacaccagatttatggcgccagttttcgaaagaatggagcaaaaacatgaatggcgggtgtcgacagcggctgtacacgcgagggctgccttcgtcgattgactaaatacaggaaaaggagttcgtttgatcgtgtgaaacgacagtctggagaaactaaaaataccggcatcaacagtgcaaccagatataacaaatacttttatgggggatctgtggacagaggtaacgagaaatggagagtttcaaagcttcttccagctctggcacttcctgaggggaggaaactcccaggcacactcccatcccttccagagaaaaaactcgcgctcctctccctctctcagtaacggagtttcatagtttcgaagaggggggtttgaatgccagaagagggaaggggtgaaggcgaatataaaattaaacttgcccagaaggggcaataactgcgcggccagtcacgcgcaatgccgaagaggcactgcggaggagaatgttcgtcagttgacctaaccctctacgaggaacgaccgagccgtcttcgaggcagacgagtgggcaaacaaagggcagattcgactgacaaaccgagaaggcctagtggaaaatcaagggcagaacgcgcgtcagcggcgtggatatccggacgtgacagacggcgacgcacgaacgtctcggacacagccccgccccagtatttagtcgttgtcgccagaaagaaaaggaaggaaatagacctaaacacgttttacgtcaaaaaccgccaaaaaacctcacaggatatccaggaactcaccatgaggggacagaagaactgcgtagtagaggcgtatgcttgtggatccaggacggattccgcgtctctcccggtgatcagcagctacctacactttctgctaaagcaaggcttttctccaaattatttgtgtttctcatccacttactccaggtgcgttactccgggcgagtctgctcgattccccgtatcttcagctttccagtatctgagccatggctctacttcgcgatttttcgcgtctctcgagccttgtgaacgggggagggtgagcgtgggttctctgtgcacgtcgccccgtccacagctcccgtgtgccacttacttggttttgtggcagcagaaaagcaagtgagcttcagtggtggcattcagaatcgccggacagcagtccttcagtggttgtggtgtacggacacccccttaaaacggtttcctgcacaacgcaaggtcagcactcaaacccgcggtggcacgcgatactgcgaggctgcagtggccatccacggggttgacagctgatagcctcgttcgttgccagatagccggcacacacatccaactgcccagcattttcgctttttcctccagggaacaatcattcgttccagtacgcgcgttgcaaacgtgtcactaggaaaagtgaatttgtgcaggtgacgccctgtcattgcttcgcgctggctgtccgtgaccgagagagtctttggtttccggatcttagcgtagcgcagggagctggcgcccgcagtgaggcacgaggctcaaagcagtcctcagattctcagcacagaagtcattatatcgaagaacgtcgtcagcaaggccaatgcagcgcctgtgttcaacggaaaaaggcgagcgtgcctcgtcttgcgcgcggacactgcgctcagtaaatccctggcgccccgtttcggggacgtcgtggcaacgagcggtccggggtcgattggaaaccccgggggtccttaagaagaaccctgtgtcggaacttctgtattaaatgcggtattttttcttccacagtgtttgctgttaccacacccaacagacaatgcgtacggagacccaaacccgtctcactcggtcttttgcccccagtgagaggtgacagctcgacggcgcacaccggtcttgagtttgggttggagctctctcgcgaaaccgccgcagttgccgtcggcaaaaccccgcgtcattctcacgttgccgttgctgtgtcaacatctttgccagactctcatactccgttttctgcactcttctcctcttgcttgcctggggtttcctgggtgcctgggaaacaggaacgagagatgcagagccgagcctccgttattgcacctgccttctcgccttcatcccctctccatttctcgagtacctacaggtgtgcaggttcggtgttgtcttccatgaattgaatcaggtgtcaaatgcttatgttcatgttcgaattaaagaccgcagtgccccttgattgccgctagggattctcatccccttcgctcttacatcttccagcgacgaagcgttctttcacgcagccttcagtgtagacactgcagtgcccgacgcggttacacaggtgtcgcttacttttttggtgagctgttgtgtgaatgtcggcgagaaaccggcggcgtgtggtatgtgcttttccgggacattcttagccgttgccactggtgcattgcatcttccacgtccgccgtctggtatccccattaatttttctcagtgagttactcatttcaaggattcgttcctctatagcgctctctccatcttgaaagcgcgccgcgcctttcgcttgacgcagtttattcgtgcgctcttggagcctcgtgctctccagggcggctatgcgtctcgcctcactgcaaaatatagaggattcgcggaacaggaagagctctgatatgtctgtgggtgataggcatctgttcccgccccaactctctccgtttcttggtctgaacacgatacgagattccattctctccgcaactaagaacttcaccgcatgcaattggggatcgacaccggctctgctagaagatcgttgcccctgtgggctttttctcttctgtgaatcgtgtttcttcagaagcagaggcgagttaatacttctgggggtttctgagtcttagaagttttctcctgtcgtgtatctgccca

SEQ ID NO: 1720 - DNA, 3388 bp, Toxoplasma gondii
  source 1..3388: mol_type = genomic DNA
ccggcgaagcggacgctgcattggacgtctctgaaggagaaagacacgcctcgacttcgtccccaccgctctgcatcggtctggcgatctctcttgagcaggttgccctttttgtggggactgcacgccttcgactcactcgacctgggcgtctcgcatgcaggcaagagccggccgagttcgcgctcttccctctgccctcccggccgcttcgagatctcttctctcgctggctgtctccacagccagccgcggaagcgcgagagaagcgcgtcccctcgcctcccgcaagtctctgcgccgctgaaggcgcggccgtctcttcgttctgcaagcgaggcagaggaaggatccccagcctccccgtcctccttcttgccggcttcggaagagccaccacccgagggggaagcgacagagtccgacgaccaacgagctccccgcctcatgtccggagcgtccatcctcgagggacccgaggagaagaaggaagagaagaaggaagagaagaaggagaagaagaagagggaggagaagaaggaagagaagaaggaagagaagaaggaagagaagaaggaagagaagaagaagagggaggagaagaaggaagagaagaagaagaaagagaaggagaagaatgaaagaacgaaggagacgaagagaaggaagaacagaggaagaaaacgagtagaacggggggaaaacagtgaagaaagacgccgacactgtgaggtcgcaatgtgcgcttagaaaacaggagagaagcacaccgacaactgcacttgattcgtggaatcgaagcctgctttgtcttggcctctttctgttccagcgccttttgaacgcaagaggaaactcgccgtgtccgttcacctgcaagttctctactttgttcacggggtcgtctttgttttcttcgccttccgagccttcttcgcagacactctattcctttgggggctgtcgctctccctaacggaatcttggaggtctttgttcaccgcatccacgttctcgcaaaggcggcgcttccgtcgatctctctcgctttccccggcgacttcatggtccctggagaacgactcatccagaagacttggctccgcacactgaaatgcccgaaaaatctgtagaaaacattacttgctttctagaagcagctgaaaacgaggtgcctagagtgccaacgaggaaagtcacggagcagcgagagacacaacgtcctcgatcggctgttgcgccggtttaaaaatacccgcaaagaacagaggggtcctcccccacagcttccttcgagaaatgcgaggcgactttgttctagaagaggaaaagaattccccagaaatgcttgcgattgccactgtcccgtctcaggaaaaatcctcgcggccggggaggacgttgcaggagatcggtgtgctcggcaggtcgcgcagagagtaactctgtgaccccctagatgctctcctaaccctgttgaagagtaaagaccataaacagcgaaaaaaggttttcctcgcttggcgggatctccgcggaacgcgaactgaacacctgtagctgatcggggaaaaaagacggcctttctcccgcagaacgaaggaaaagcatgcgagtgtgcgccagcccagcttcacgagcgctggcgacaagcgaactcgcaaacgaggtcgcaagagagcgtcgcgagttgcgaggttcttgaattctgccgcgacgctctgtttcgtctgtacttctaaagaacagttcagaggaaaagacactcgaaaaacccacgcatgcgatcagaactgaatctggaaggtccggaaaaccgtatccatgacgcgctgctgcggccgcgaggacgagactcgtcgaccctggaaacgcagtggcctcgaagcgcagagacacccgaagaacttcggtggactccgtgtcttcgcctcgcgttcttcgtgaggaaaaaagcctttcgaaacgacttgggggggggaagaggggcgaataacgcggactgtgcgcagaagtgtgtgcggtatacaaagctcaggcggcctgatctagcgtacgaggtactatacggacggaacttttgggtggagagcaagtgcctggggagactggacgaaagagcgacctaaggaactgcagaaagcatgggagcagaagagacggggaagacaaaggagtcaatcgagggcggattccacgcatttcttacgccttctctggatacggccggggtgtatggaggaacgtcgtgagtccagtactcgacagatcaggtagacacttccctgcttcgttctgcatacgagagcgagtctggttttttgtggagctgtcgcgtcgtttatgtcacactcgccagttctgtcacgtctttttatacgataaagagcacttttgagagcgcttcgctgtagtcaacatcaacacaacttttagggtccgcgaagagggaggccagaagactttggaaagaaggactcgcgcacttcattcttccgttgcctgtcacatttccctgttctctaatgtaaacggtcctacgactggagtagactctgcaggtcaagttaccgcctggaaaaaagcattcgcggccgcggggtcgacgcacgatgagtaagagtcttgggaacgtgggttctatttgaatgcgaaaaaaggctttctgctctccctgcggacggagtttcacgctatgtcacaagttttagatggagaacgtcaagtcgaacttgtggagtgaagaagctatatctgtttcggtgtggcggtgtctttgttaggtcctcacacttggcagagcggagaaccggagttctctggacggcttcgccgtgttctttcactccgcaaaagtttggggtgtcagtttctgagtcgaatctttggacctctgcagctgctttatgggtttctgtccgtgaaacgcatcagaagagacattttcctgtgtcactgcatctgtgacggcttccgcgctcctctgagagtcgctttcaagacgcggacgccttagattccaagtgcgtatgcgcatctcgttcgcacccgtcgactgcagaacagtggcttctgttctgtcttgaacattttgcgaggacaccccccccagatcacggccctcctgttccgtcagaagtctgcgcccctgctggtgcgcgcgttcgcgtctctgaagacagaacgtgatcttcagtccccctctctcctgctgcgcgttctagactgagccgcctcttttttccagctgggggctgaactgtctgtctgcctggagtattacttttttcttttgcgtcttcgtttctctcgcagtctgccagcttgtctctgcaagtacacgcaaccgccactgttcgcaggattccagcattccagccaagcacca

SEQ ID NO: 1721 - DNA, 2288 bp, Toxoplasma gondii
  source 1..2288: mol_type = genomic DNA
gaagcactcgtgaccctcgagcgcacagaaccaggagatccaggtctccccctcttcttcgtcttcctcgtcctcctcctcagaggcccgcgtgaagacgggtgtacctaccgctgccgcacgcacattggaagtcgcgtcttctcgcaggcgaccttctgtctcgcggcgtcccagctgcctcgcctcctcgcgctcttccaccgctggaagcagagaggaagcgatctccgaaccgaagtgggcgcctgagcggcccggagccccgccacgggaagccgaagaagtgagagtcatcttggacacagcggaaacgcgcgctgtggagaacagacacacgcgacgcagagagagtggaccgcggagagggtggagagcggggtaagaggggaggagatgaaaggcggaaggggagaaggcggccgtctaccacgaggtgagagcgctgtcagggggattatcgactaaaagagctgttgacggagggacgaggaaacggcttcgtttgctgaagaggagcgtgtgtgtagccttgacgctgacgagttgagaagaacgggtcctcggtctgttgtgggcagagagacgggcgttgacggaactgagcgacaagtcacagcttcgacgcaagagagaagacatgccccggaggctgatgaaacgattgaaactcgaggggaagaatcaagacagcggttgaaagacaactgagtcttgtggatgaggaaaggaaaaacggcaaacgaaagtgtgcggcctcgcgaggcaagaggcgggaagctcgaagggcttccaacagtgaacagacgaacaggcaataaaacgatgatagaaccaaccgaggaagaaccagatggaacaggcgagacgccgagtgacacaaatcgaaggcaggtcgaaagtgaaaaacgacgggggcattcacagcaaattccacgatgcttttctatcctgggcaggaactgcacacgggcttcttgacgtcggtttccagtctcctcaccgcggcctcagccgcacgcaacgacgataaaatcccggagaaaacgattagatgggaactcaaagaaggcagtgaaggaaacccgagcagataagcgaggattggctgcggacgcgcgaaaggccgcccccagagaagcgagacaaggaagcggaccggatttgaggaagttgcgaaactcgcctcgcggcgcccctgaagtgtccgtacagatggagaaacagaaacagggaaaacggcttttttaggggcgtcgcgaggattcaaacggaaagcggaaacatctgtggcagcgccggccagagcggatgcctctctgtgaaagtggaaaattcgaaaaagacagagcacggggacaaccgcacccgacagcggctttttccagtttctctgcacggggcctgaaaccgaaaaaacgacagtttcttcgccgaacacgcacattccaaaactctcaactggtattttcccctccccttttattcccgcctctcccgctttgaagactcgtccctctcagcgcacgcagagatcagccacctgcgcgacgtcacacaccttttctccatttctccgaccggcgtatacccgaaagcgtcctccctcggctatcgctctccctcgagacctctcaggcatttctcgattctgctgtacgatcgactgccgcagaagagccgggaaaataggaaaagagcctgctctttgctccaagttgccgccatgagcctagccgcctctcggcttcctggaaaaaaccaagcgttctcatcgtcatgcacacgtgagacagcgcgtttaagactagcccgtccaaaagctggtggggagagtcgaacggtgggacgaagccgagagccgctggcagctgagtccatctcatttcttcactttttaacagacgcattctccgttgcgggcctgttggcaacaaccgaaggtaccttgaaccataaaggcggtgattcgtttacggtatgtgcacgagtttcttgttcacccttacgcccttagagggacccacacgtggcgcgaaacgaggagggaatgaaaacggtgacattggaaagaatggtggcccttcctttcttctatgactaaaaagacggtgattgttcagttgatttgtccatccgcctcctctgtagctttcggctctagggtgtacgcacacctgagccgggacaagtcgccataaaacgggcggacacggagccttccgtggaatatccgtcgcgttcgtttagctcccatttcagaccgggattgcatttcccccggtaaa

SEQ ID NO: 1722 - DNA, 2616 bp, Toxoplasma gondii
  source 1..2616: mol_type = genomic DNA
gcgacgactggcatggatagagtccacggtgcgatgaaggtggaaagacgcacggcggtttacggggattctgcgaatgacgaaactgctcacttgatgcgcgatgagcgaaccagcgcatctgaccgcgggccagatgcgctggcacagaaatcatatttagcacgggtaacagagaatacttttgatgaacagggttcgcgcagcgaggaggtcagttttggcgacagtgacagcgtatgcaacacgcgaaaacccgctggctctaggcgttcggaaactgtggagtttagtcgagtttccgattcagaaagggaatcgaaaaatgagctggaattgcggccagcagatgcaactcaaccagtgcggagacgagacgcggtagttcatgcgcaccagtacagtccagatggcgaatacaccacacggccagtgactctggacaagcacgtcaaaaaaaagaatcgagcaactgggggagtgaagccaggggcagaacaagagtagtcgtaagtccctgacgagggaaagatacttctgctgcgcttgcggtcaactgtcagctacagtctcaggtgtctgcgatgggtaggggtgaaaatttcgagcaatagactggaaaggaatgcttcaggggcgccggcgtgactgctggataggcgaggggcatgcttagttctgtgcttgcgtttgcgagacaatatgaaggcgtccaaatctgcaggggacctccagaaactccttttcaaagtgaattgacgtccttaagtctaggttcgctggaaactgcagcgccttctctactgggccggcgtattgctacagtcggcacttggcaaaactcccaccgttccggatgtcggcgagaaacaacctttcccttttggcacttcacgtgtttgcggcgaacgtttatcatgcaattccagcggaagtggtagtagcgtttcagatgctcgttcgtccatatttatgtccttggagagggctattacccctatgctatgcatatacctcttcagccaacgaagaaaggctgaacggtagccgacatgccgattgttagtggcggcaaatgaaagaaacagaagttacaccagggcggttgccatcgagacaacatatcttgggctctgtgcgaaatacttggatcgggtttttggtggctacccggagtacggcgtgagctgacgagaagaagaaacctcatacctttcagcagaaaccatacggaacgcagcgtcaatagttttctctggaggcgttctaggcacaggcctggaggagtgggagggaactttttttccttccgcctgactcttgctttcaagtttgtgtattggcccacatgcctgcaccctttcgacgctgcctactgatcggctgagatagatctaccagcgccggcaagctttcgccggtactagcagataaaccaacattgagatgggcgcgtgaagccagtgtcacaccagcttctcctgaggagcggttctcgtgacacatggccattgagatcgtgttaacgcataccgcagctgggatcgtaccctcacagatgctgttgaacaacgttatattttctcgtttccccttcgcagatagcagagagtgggggattagttttcaggttctgaggggggctggaatggttcgaaagcgactgttcacgcggtctgacggcgaactgtgacacgccaaagggtttgtgggccgatagacaaggaagaagttgctcgagcgtttcgctagcagctcccgaaactgaaggatctggccaagatggtacactgaaacagtagccagccttgccggttgagaggagatgatcgatggcacgactggagacgagtgataacccctcctgcttttccgccagcctttcatcgaagctggaacacctcagatcgacaacagtacgtgagactgaaggttgttccgcttgtagacccgtgtttggcaataaacctcacgtgtactctggttcctctccatgatttcttctcctgggcaactgctaaatcggctaacaggcagacaatccccaaccaaaacgagacgtgacgcatttggaagaaaagtacaaattgctaccacgatgtacaaccgagctgcgagaaaattgatctttcttgcccaatggaggtgcgtagatccagaagcggcaagcatgagactggctcttgtctggcccctatcgctgctgagactttttttggcgcctatcgagcccaaaatctttgtcgggaactatcgccatagccttgctaggtgtctcacccagcggggctgaacgttttctctgggataggctccggagcgagcgctaccaccccgtccgctgtctctatctcgccgttcagacccactcggcgttgtcatgctgccagcgcgatgaaacacattttgttcttccgcatttttaaacacagaacctttcgaatttccagctggtggcttcccgaagccgaaaaccgtttgcatctggaaccccgcttctctggcgacattgtttttgcctcccagagagcccggagcgagcgacttgtgtgcccgttcttcccattttgtcgtcctggcggtataaatgtttatattttccgttgtgtgagtgaa

SEQ ID NO: 1723 - DNA, 2344 bp, Toxoplasma gondii
  source 1..2344: mol_type = genomic DNA
gcgcagacgatcgccttcgaagcgagaaccttgtaacatttctatccccttctacacgcagaacaccattcagttctaccgcccgccccctccccccacgtatgtcaatgacgtctttgtcaaccaactccaagaaacacaccctatgtgcctgtacgttcgcggatgtttggggatatacttttccattctctacgtgtacaagagcgaagggcgtagtcgaagtgaatctgtatcatcttatcgaacgtcgtccttcggccacattgctggaaacggttacactccaaagggacatttcccccagttctcctgagatgaaatctcaccttgggcgcttggtgaagtgatcaagaggaaggtagacatcccggacgcgaccgaacttctcgaaaatctgacgcactctgtccggcgaggtctcgaaacagaggtttcggatcaacagcgaacagcccgtcgccatttcggctcctttcctctcggaaaagctgtcctcttcgcacagagcagaaaccacttcagcacggccctcaaatctcgcgttgtcacgctgttccagctgtccagcacaaggtgcttttcaccagttccacttggtgccgtcgcggagcccgggacagcgaagctggggcggcttccaggaattccacgagctgccacagcaggacgtcgccttggtaggttcacgtttaaaatgccaaggtaggcaaacgacgacacatcacaccagcgaggggtttaactccgtcgtggacccaagccaggcaatgcacagggagaagtttgcacgagcggcgcctcgagtcatggagggagcgtattcgacgaaatcgaaacaatttagttcccaacacacattcacagcactgcagaatgtcgccacaggaaatgaccgccgaatttgcttcacagcgaccttcgtcggtgactgttctccggtgatggggaagaagtggtagtcgtggggaagagcctgtaacgctagctgcacaaatcggtacaaaccgttttctgcagctggactcgcttttccagatttgaagcagctcctgtggaacccgggggaatcgtccgccctcttgggcttgaaaaacttgacggcagtttctgtggcggcagcggcaaatcggccgaccgccgtcagaagtaatcgagtttggtcgaagaggagcttcaaacatgcaggcaaaaaacaatgggtgccccaaaattcaagcccaggaaaatgcaagaggcgtgtgcaaacctgggagaaaaaacgggatgagtgttcctttacgagatacacgggaaagcggacggtcgtctaccctcgtcgaccagcagtagcagcgagaagcgaactcgcgaacagacaggaaaaaatggaatctacagttttggacgcaagaaaagctccccagaccatcatccaccaagcgcaaaattaccgtaaagtcagacatcagtggaaagtctctgagtctatttcagacaggaccagctaatacggactgttgtctgtgcggttctcaccattccgccgttccgtccctagaaggcgttgccgcctcgttctttggtgataagccgaggctcctattcacgtacaacccggggtcatgttgccgccctccaaggtcttgtttagtacagttctcgtccacgaaagcacagagaggcagaaatggtgaaagttgagtcctctacaacatgcagggaagacctttgtggggtttcacgctccaaacggaaagcgcacccttcagacccgagacagaggcttgaaatttagtcttgcctctccatcgcgtgcaatttttctcagcgaccccggaatagctggcccgattcccagggtcaccgtgcgacccgcagaaagcatatgtctactcttgtcggcgataatctgttgaaggacgccaagatgcgtcatctgccaccttatctgttcagaggcatcttttcctacacgaatgccacacctggatggtcgagcggcgattctgtggcagctcgagttgacgatcatgtttgcaaattcagcatgacagtacgctggcgagctaactgctcctgggtacgacggggggggggaagggcgactgacgtgttgctgcattttcgtttgccggaaagctaattgcttttcggagtctgtgtgaatcgttttaacggacaacccttcaacaacggcagtgcctgcgattcactgggcaacgacccaactagtcgatgatacactcatacttacatcattgttcctcaaaggtatccgtacgctgtaaatgcggcgttttgcgccgcgctttaatgtttgtgcacagaacacgggagtcctgctttaacttggtgtagagga

SEQ ID NO: 1724 - DNA, 2315 bp, Toxoplasma gondii
  source 1..2315: mol_type = genomic DNA
cctgaaacgcacgaatgagagacatggcaagttcagctttccaagcagcgccgaccagagcacgcatacacgcttttcaaagtgtctcgacggggggagttcttggaggcagattcgctttgcgagttgttttgcctgtactaccgatgaagagactcacttggctacttgggctatcaggcttgaagcgtgaggccttgtccacggatatgcgatctggacttcgctgtacacgcgttccacgagacggcctcaagggtgcggctgatcggcgttccctgcgtttcttctgagagacagatctttcgagcgtcatggtctgcgactcctcgatgcaaagccctctggaggtcacgctgaccagtcaaaacctgagtccaggaaacgaggaacagaggactgtgcgccttcgtcggaagttcagtctttcacctgtcaaagcgacacaggctcgctcgagaaaaggaagcgaacgtgactttcattcccccggtaaggtgattgcggacctccctgtgaggttgaggaccgcaggagatgctgccgacgtcgaatggccctgcagaagccgcagaacaaagcggtacctctctctccgccgtgcagggatttcgagagtgttttgctttctcgcagcttctggaagtccgccctttttgtcggttgtcagaaggaatttccaagaaacaaagaagcaacggagaaaaagcaggcaaggaacgcgggagctgaccggttctcagtggactgaaaaaaactgtctggcttttagtgtcctatggcattgaggtgcctcaacgttggctctgtttgttggcgcacagccctcgcaatccaacaagaacagagaaactgtagccttcaggtcggcttcgaaagcatctctgcatgtgctcgcggcgatcgtctagttgaaaaacgaggagagtctctgcacggcggtgtctggaagaaagtccaagaacgacgtctctcggtgtctcggagcgcgcgtcgttgacacacacagccggaatggcacgttttgccgctttgtttcgactggtgttccggaaaaagactctggaaaagttccctttctctagcaactctgtgcttcgctactctcaacctgttctcgacttgcagaggtctgaagcgttcgcgtcgttttttgctgccgggatgaacgagaaagcttctgaaaacgcctcgctccttccactcgcaaatcgaatgaacctcgacaggatcctctcaaagatcctgcgcgtttttctacttctttcaaagaggaccacaggtgtaatctgtgtgctgtcgcctaaatacgatagctacatcctctgttgctgcccagttgtcttccggacagtctcgtatacctcactacgcgttgtccttcccctttcgtcgttccccggaggaaccaccccttcgttttattcgtcgttctctggactttcaagaaagatgtggaatttgtgaggaagcttccgcgactgtcgcagtggaaaactctggaaaatcgaagcgtgcatgcgttctggtccgcaggcgtccgagcctcccctcccgtcctcttcaggaagtcagattgaagctctgtttcccgtggaatctgccacttttgtctcctccttgaaagaacctttccttttttcttattggaccggcgaaaatctactttccgccgtccagaaacgtgtgtgtttctgacagaaatacgccgtggtcacctggcacccggtttttctcccgtggagggcgttccttgtctggttcctctgtaaccaacaagatgtttatcatgcagatcttcgtgtgactttgagatttatggctgacttccgcgctcaacttgtctccgctctaaacgaggaaggcgctcgccggcgactttcgaggaaaactctctcgacgggtgcttgaatttcttcgttttcctcgtggaatacaacgaacttcctctctccttttcaacctctttcaaagacagccgaaaccacaacgtccgaatcccctttgtcttccaagcgcctctctgcattctctttcacacccccgtcgttcctgacaggcaagactccgacgctcccaagatgtgtggttgtctcctgtaacttccgctacctctgtctgacgatttttttcggcctctcgagcgccagccaattgcttttcttcttttcggcagttgaggaacgaagaagcgaggtgcctacgccctgtgccgacttcagcggcgctctcctccttcctggaggtataagattcgagcctcctttctacgaaagagaggcctgcggctctgcaactctggacgtcctctcaca

SEQ ID NO: 1725 - DNA, 1516 bp, Toxoplasma gondii
  source 1..1516: mol_type = genomic DNA
aggaggtgacgggcagaacggatcctctgctttctccacttctctggacccccgaaactcgacgtcgttctcgtaccttcaacgagagtgtgcggaaaacggcgtttgactgattcgtctcgacgcaagacgagcttgggagtgaggagcggcccgctggaagcggagcctcctcctggctttgttggcgaggaagcagtcgagaagaaacatcggtggaatggacgtgtaaggttaatctgcctactgcggtcgcaagttcgaggccgcaagggcttgacaaacagctggctcctgcaagcttgggcaggttcgagagaatttgtgcggagttgtttcctcgcaatgccgccttcgctgatcaagcagctggagggtggaggacgagcggcggggacgggctttctagctgtcgaaacacgcgactgttgagttcttcgtggtacggttgctcgtgaaccgaatgccgacgaaacggaacttcctgagggctctgacttgctcggaaacggcgaaacgattctcgaagcggaggaaagcgaagcagaccacgcggacaacagccgcagtgaagggtttgcacggggctctgccacgctgctgcgatgaaaagattcggataaggacgaacggacggaccgtccagacgctctggtaaagctccacatcgtgggcaactaagtcgtctcatagaaggaaggaccgcaaaagaaggaagcaaacacgccagcacaaagcaaacgaggtcgcgaatatcgagaaaaagataggaatagttttcttctccaggattggagatgcgtgctcgccccgccagcgctccttcccaacaagacggaaaaaaagcccactccgtcacgatgccacagcgtcccggacgttccgcctgaaaggaaacccgaggggcgcctggccctgcgtgtgtggaaaagaaaacaaagtgtgttcagatgcacgacgccgcctctcgtgtctcctgttgctgcgcagtgtgcatctgcctgagcagtccgcgcgcttgacaattctctcaaagctacctgaatttggcttgctgtgcgtccactctagcctattctcggcgatactgcccggttttaagccgtctgtggcgtgactttttgcacagtaagttcgtcggctcgtgaccagccccggcaccctgttctgtgtcagcatgcatgcaactgagggcccaagtcctgttgccctttccggtggtctcttctgtcttgggtctgaaggactgctggaatggcgtgatagcattttgattctgatcgtgtttcctagacgttgaaggttctgtcgtgtgaattacttattcgaggatcttcgggcagtgactcatcctcactcacccacacccgacgtgattaaatctccgtgcatgcctttccctggaccttttgcgcgtttcgtgtcgaagcgggaaggaacatacgcgcaccgcccagttgaattgcgatcagctcagacacagaacggtcagttactgtggcacgctgatgctcca

SEQ ID NO: 1726 - DNA, 2941 bp, Toxoplasma gondii
  source 1..2941: mol_type = genomic DNA
ttgaaaggaagaaagacgcgacgcactctctcctgttcgaagttcgcgttctccgttgacgcactcaggagtcgaagggggcgcgagagcgtctcccttttctcgctcctggggggcaggactcctcgcttcgacggaaatcccccacgagagaagaaacgacgcaaaaatggaaagagaaagacttgccaacacccgacagacctctttgttcgcgtggagtcctctgacagagaacaggtgaaggcatgctcggcactgggtccgtttattcaccgctgctcctgatcttcttcgtggaaagacctatctgacgactgagactcgaatccggcaatctctcttccctttcgcctgtttcttcgtgcccttccaggtcttcacctcccttcttccttcagtgtcttttctcattcttctttccgaagcgttttttcttctttcagtgtcttcttcgtcacaactgtcttcagttttcctccctacctcctccagagaatccaccgcgtccgccgccgcgtccgccacctcgtccgccgaagcctccccgtcctcccctgcctcctccacggccgccaaaagagcctcttccgcgtccactcattttttacgagtcgcgcaatctgatggatacgaactgcagaagtgcaacgcgggcgagacgagccaatgacagcggcttgggaacctgctgcagaaaaccacgggatatgcgctcacgcgctgaaaaaagaaagagacgatctgcgttttccctgagtgaagcgttgctctacattcttccttctggacgcgagtttctcgaggagttccgatggagagacaaaaaagaaccggaacagattcgcctctttccttgacagggaatgcgcgtttgaatcggaccgtggttcagagaggctgcagatataagacctccaggacacgagtaggaaaacccccgccacaggatctctctggacgaagcgacggtttggcttttaggagaagaaattacaagcgcatggaaaaggaggagagaaacagtcggagagttagcgaaaagctccaatcagcaagcgagagcgtttagagaaacgcaagtgggctagacagcacaacaggcacggcgaccgcagtgagaaaaacggaggatgcggagctcaggtagcggctgaaaacgcttcacgaaaagatagtcgaaacgagagaacggcgaaggaaaacagaaaactcgtgaagaaggactgcagatacagcagcgttgaaaaacggggatggtatatcgacaagaggccccacacgtggcgtgcggcaagaagggaacttccctctctatttctgcgcagaatcagctccggaacgcgagggaccggagaaatggaactggcagtagagtagcggaacatgaaaaggaaagaaaagatgagagaagacgcaaacaacctagcgcaatcgagtttctgaagcgctcagagaaaacggaagatcgcatgcacacgggactgaagagctcgccgaatcgattggacgcttcttctggggttccactctgagcacggacacagccagacgacagagaaagcgagaaactctggcgtttcaggggcgaagcaaccttttgctgagtctgctccctctacaaggagcacaccgcgaaattatggagtcgagaacgcctgaggatctcctgtttgcctgcgaaaagaattccggatagcggcggcaaaaggccagcacgagcgtgtcgacatactttttctgggatgtcgttttccagttctgccgactgaagtgtttctggaaactgcgaaccgctaactgggatgaaatgatgtgcatatccacactcgcggcctagttccaggctttcgagtgcgtctgagaaccccgagagcgacgtttctgtcaaaaatcgcgggccacccgctgacggcggcgacagagcccagggagcatgtaccggaacagggaacgaaaccgggaaaaaactgaaacaaaagagagggcagaaggcaaatatcaacgacagggaactcgaggcctgggagttctaaggtggccgtgacctgctttgttccgaccctctgtctcaccgtacttctttcttttaccgataataagagttggagaaaggactagatgggtgcctatttcacgatagtatccgcggatggaggcgtcactcttccatgccgcgatacgtttttcatgcctcgctttttcgatacacagcggtgttcttgatagtcgttggcgatcgagttttcccgctaaaactgcgcagttcagccgataggccgctatcgttttccgagggtcacaccaccagacttagctgtacgtagaattcaacatgacatctttcgccgaaccctattactctcagagttcttcagtgccaacttctccgaggggattacggataagtttcacgacacgatgcttgggcgtttgttgctccttgccggttgaaatccgcagttcagatgctacagagtggtatccgccggtctgggtaccacttttagaatggaaaggacgtaagctgtttgggcactggaacatctgccttgacaaaactaagcgactggtaaattcggcgcacgatttcatgcggaactgctttcttccgatcgacgaaggacgagcgctgctggcgtttaagagagtttcctgcgtcgaagcgagaaaaattcgcactcgtcatgccgtcaggtccactcagcgacgctgcagttgtgactctgttcacccttacaaaaccaaacatgcacatacgaggtgtcatagcaaacctggggacccgctgtctaccgtccacgtatgaatcatgtcggaggaagaatctgtttccctctattgttcgatatctttaccgcgtcgccgtctcttcgcgcgccccaaggaattcttcagaccttcacatcagacagtaacacaaaaaccggctcccgattca

SEQ ID NO: 1727 - DNA, 2855 bp, Toxoplasma gondii
  source 1..2855: mol_type = genomic DNA
gtactcaattcttctcgcttttgtcgtctcctgtcaccatctctcctttctttcctgtctcgcgtcttctcaactttcgcgtttgctcgttccgtcggtcgcgtctgtcgagtcggattcgtctgagtcccgtttcgctccctccgacttcctccttcgttttctgctgcgcctcgtttcgtggaggcgtgcgtctgcactctcgctttctggctttctgcctcctgcccagccctctcgagctctgcgacttttcctcgtctgctgggaccggcgtctccgcgaggaagaatcttctgggacagagtcgcgtgtgaccttcagcacgatgccttcgagtttgattttagtttctgccaagaaagaaaactttcgtctgtgtcaagagacccgaaaaggcactttagagcagtcgccttgcctagcaagctgaacgcagagctcgcaacgcccctcttggatggctggatcagttcttctttccatttcctattcctcgtcagacaactgtcagatttgatccctcccattccgaaagctccgccctctccgtatgggcctcgcacgagagcctcatatggctttttttccggagaactctcaagaaagtgaacacaactccgttggggcgtcggccttctcagtcagagaagcccacgcgctgcttgtctgggtcgtgacggtcggagtaaaaaacgcctctttctaaaaacggtttgcccttctctgtgccggaaaatcctctctcgccttcgcactgcatacgcacgctccaagatggccgaaaaaccgtcttgcagagtccgagcttcaccggcgagagcggggggtccacagatttaggaaagcgcatcttttgctttttctgcgttttttcatgtctaggaagcaccgctgacagacacagcttgacagcattcacaaaagggtccttatcgcagtccgcttcgctctctcgaatcgccacatgctggagcttcctcgttggtggacttgggcggaactctacacagaaaacatgaaacacacgaccatcaacgtttgatgccaccgctctgtctgtctgtctgtgaacatccgcgtgaagacagaactacaaatgtataaatatccgcgcgttggtgaagagatatgtgtcttttgaggagccttctgttcgtgtacaaagtactccctggtttgaacaggcactgcgtctctgtgcatatacgcaggtccgctgtgtagaggacgcgtgtatcctcgtgcgatcagacggtttgcgccgccatcgttctgttttcttctgtgcttggtatcttcctttctccagaaggcctgagctcccctctctgaggaaactgcacctttcaggagttctgtctcggcagtcttttccctacacatgctggctcttcacacgttctcgacgcatgacactctcaactgatgcggaaccggcgcgttcggctcgacggcaccgtgcgaacctcgattttttcagtgtgccatttagcttcttcgacgggtctgctcaggaaggacggagaaacgttcacaaaaaaactcagacctgcagacagacagcagtacgaaactcctattcaactcgcaagcagtgctccgtctttgcgttttcatctgagccttgccaacgcgcaccagtaggttgaaaggatatccgcgttttcaaaggttccgaggtacttcgatttcaaagagtgtttgagaaacgccgtgtgaaaaggcggacctgacagtgtggcggcaccagctgcaaaaaatggcctccttcacaggaaatgaggagtcgaaaggcaagtacgcacgcacaagactcatttcattatctctgtttcgaaaaaagctgttgagcagcatcgacgcgctgcgccccatgcgggtcacctgggggtcgaggaaaatcgaatcttggggatggaaatttgcttccctttctgatgaaaaaacgtcttgattctgcgaagcaacaggaaatctcccctctctactcgccaaagctgattcttcgaaaaaacctttcttccctcatacaaaaaaggagaaaaagagacaacggagacagcgaagattccggcgatacacgcggccgcgcgccccagaccacacgtcgagctacggatttccacatttctttcttcgtgcttctcttctgtctccgtcctacgttgttgctgttgcttccttcttctggagttctcgagcaatccttgattcttcgccgcgaggtcggccaccgcgtatcctcccagcttctggcgagtccttggcttcctcgtatttctccgtcctttctcgcgcttctcgcgactcgtcttctcgcaggtttccttcttctcgcctctgcctctttctgctgccgcgtctgcgctcttccctgtccagcgcgattgaaaaacgcatgctccatcatgcagcgccgcgcttcacttcgcaccttgcgatctgtgcgaggagtgcgtgttgtcgaccttctgcgcgtctccctttctgcgactctctctttctggagctctttctcacctagtggacctcgctctcttcgtcggtctctccttgtcgatgtctttctggttctcgccgctgccattttgattctctgagtcttgttgtctccgtcggaatctctcggcgccgtccagaagcgccgcgcagaagaaaggcgcgtggatgcgtcggcgcgcacaggcgcgcgtaggtctctcgcagccgcagattatttttggagagcgcgtcgactggacagccggtctcggtcgtaaatctctgcactcctccatcacggctgggagacgcctgggggcctcaacttcggcatgcacccgcaagcccccgtctctctgcgcgcggaaaaa

SEQ ID NO: 1728 - DNA, 3170 bp, Toxoplasma gondii
  source 1..3170: mol_type = genomic DNA
tgtgcaagtctagaaggacactcaggattcaggcgttttacgaacttgaatttctctcgcaaagtccgtagccgtctcccgtggttttgctcagaaccagcgacgaggagaaccgagcccactccgtgttcgcgttttccttctcgcaaaaagcaatgtctttttcgtgagagtgcaaactatcgcagctgaggtgctcaaaactatcggggagatccgctccgagttccttctctgcttcgacaagggaaacggtctgctgtagcccgggaggtttgtggagtacaccattcatagcgaacatggtggtccggcctcataacagaagccctacccagatgtctcgggcctcgaatggctctgtctatacagtttgagttatgcagcttcggatctcgcatagatgggtgaaagcgcgtgtctctcaccttgtgcgtatcttgccttgaagaggtgtatggaacttttgtgagtgtgtgacccgattagagaggcagattgagagaggcaagacgctaggaatccatggttcgagaagtcacgttcatccggagacagtccgtctttgattttcactgagaagcgttaggggaattttaacggctgtaaaaggagtgaaccatccacgactctatcaaatggacacaacagtagagagcagcagttaaccttgcatccagcgatctgctacgaggacacagaaacacagaaaacctactccgtgggtggtcgagggtggaatgctcctgcgtcgcccgaatgcggattcgtcatctgtttataactcaactatttgtggaaaacactcttcttctagtgagtgtgacaccgaggtgacgaggcatcgtatcctccttgcttataaaaaatgctccggtaggtatcgcttggcattcttttcagatgcctctctttcgcacccacgggtatcgacatcttttgtcttctaggcaagagaaaacatgcaggacgacctaggaagaaagccgcaagatgaaaagtcgtcgtctgtgccacagagagtcgattctctgcattctctcagaaaagaggaccagcctgaagatgtctggcaaagacaatctttctttccaacgagagaggctggcgcgttgattcgtgaatcctcaacacagtcatgaagcgaccatgcgtctgtgaaaaggacagtttgtcgaaatgtgtactttacagtcctacataaacgaacggcttcttcgttacctatcatacccacctaccctgcattcctctgctctcctgccagctctctgtctcgtcttcggcatcgcgcactccctctctctacctcttccagtgttttgtgtttctctctctctgcttcttccgctacgctgcaacttctttcgccagagccaggctgcggatttttcatcgacgcagacaggtccagggcccgagtttcttttgtgctgttcgcaggatggagaaaccttcttggctgtagaaagcctctctgtgcgtgtggaggatttgcgcctctttcgcgaactctcacttccgggcccccaatgtgggctggaacgaaaaagttaccacaccctgtgaacaaaccctgcattttctgaccgtaagaatcgaagctccacgagtttgcgtaagctgttcgttttaaaaacggtaaagggcggttatggcgctcgctgtcgagaccctcacgttttccggcgtttgttctagttttttcgcaatgtgtcggctgcaaaggaaaaggaaatcgccgtctcctcattgcgcgatttatgaagtcagaacaacgggcccgtgtcgttccagtcgcgctgcggtacgcgtgttccacccgctgcttttcacacacactcttttagaaagcgtgtggaaaaggcgccgtctcggaggtttctcgcgagtgtttttcgcatttccacaaactggtgtgtgccccggcgaagcaacactggctgttcttccccattttcccccaaaaatccgtcgtcgaagaacgggggaaacgactgggttcgcacacagcgcgtgtcttgcctgaatgcggaccggcactcctccctttacacgcttgtcttccggagaactttctcgagttcgcgggtgtcctcctttcttcagaagattcaaggtccatggagaggaaagtgaaaaagtcgctcgcacactcagccgagagcgccgcggcggttccggcattctggagggtcccgagggctagcgcgtttcgttgaggaaatccgttgtttgaggaggcagctgtagtgtttgccaccggatttttataagggaatcggagagcggagtaaaacatgtagagggaaaacctcggtcggttgccaccggggcttccacggaaggctcgcgtcgccgtagcctctttcccgtcgtaccccatatttcagtttttttctcctttgctctgtctgctgcagcgaaggtagacgggaaataaccaacgggagggatcgaaccttctgtcggaagtccgaggaaagaaggaaagcctttgttcaccgttcgtaccaccgccgccggcgctacgagctcaccgtgtctgagcgcgtgaacggacgatcacggcaactatcaggttgaacgtgggcctttgtggagtgttttgtctctattgcattcttttttaatcgcctgtgaaaagcgcgtgttcttctctcttgacttgctgtgatttcctctcggacgtcttgaatatatagtcggcaggcacgaattgctcacggtccagtcagaagatttcggcggctgtgaaaacgactcggtcttcttatttttttttctttgaagccctcagccacactccctccagatcttgctctggactcgcgcctcgagaaggttttttttcgttctgagtggaaacaactcgttctctttttcttctgtgaaggaccgttttccgagaggaggctgtctcacgcaaaccctctctctgtcttcagacctcgcacctctcattccagctcgtctgtgtttggttttttctttcggtctcggctttccgcccgcaggcttgtctctcggcaaaacgccgtccatgcatctgttctcttccttcccgacagtgctcgcagaagcgcctgcctgctcctcgctgtccagtctgtcgtagcttgcccccttgggtgccaagacgcctttcgtttttcttttgccaacgaaga

SEQ ID NO: 1729 - DNA, 4653 bp, Toxoplasma gondii
  source 1..4653: mol_type = genomic DNA
gcatttcctcatcacgccagaagatatccgtacagtacagtgagtaacgatttctctgtacatacacgtacaactacagatacacggctaactacagacacttttgtggacggcgtgtcgcgcataccgtcaaggccgaacgatccctgcttggtgattattttgttgacggatttcgcagcgagtttgatcgaggtgaagatctgggaaatctcgtggacactgacgccacgttctctcagcagcggagcctgttgtaccacgtattctccgagttccagttgaatgctagtcttgaacaagggcggctgccgggggggatcgggaatgaagattgacccctttgaattcaaaggaattctgagtacgctgtctgatctctccatggtgccgaggatacaaagacggggagagccgcagaatatgaatcgtgagaggccggccgacgcttttaacacaacacctgacaactgacgaacgacgcttcctgcacaaaagtacaagtcacctcgtgagacagtcacatgcgccgcgtgaggcaggtgcggtgtagggctggagtggtgcgctacggttgacggcaactgtattaacaacacggcaccacacgcggctgcagctacatcggccaagcatctgttaccacgtctgcagtatcagcctaagaagtgcatgcacggcttcagaaataagacacccgatgaagtcttcccgccactcttcgatcgttgacctgcgtgcacgttcttatgaatctacgtggaaatgaatgcaacgttgccttcagagttcagagaggccccacaaaacagcaattggaagtccaggaccgcactcagtccagagagccgggattctgaggaaccacatcaacgatcagaagccaccggctgaaagaaatattcactggaggataacagtgagcggacgcaccgctgacgctcggaccacctgaccgaggaacattcaggttcctcgacgtacctgacggttaagcaccgcagcgtgcagccttttatcgatcaacgggatgctcacggttcacaacttggagaaatgtgcgttggcagatgtcccccaacaccaacagcgctcctagacggaaaaatttaaacctcaagggatggccgagcaaaaacttgtcctgtgtttcctttcggacgacttaggcagggcggaagcgaaagacgacgtgctgagaggaggcgcagcttcaaaaagacagcgatatctcttcccctcgacataaaagccaccccggagatttcgttgttggcaaacagcaaagtccacaatggcacgaaagtttcgaaagaagggtcaactgcgaacccaagcatccgtcggtctcctaatgaagaggagacagcccaacagtcgcaaagtcgtccatcaccccgcctgcagtgacaggctgtcccggccggtgcggcaactgacggggcggcacttaaccgttgtgtttttcggtatataaggagaaaaaaaacgtgcatgcaggacagacgaacatgctcgaataggtcaaaagactccagtggataaacggtacgtgtatgttctctgcaaatgtcacgaattcataagcgagcctattccgaagatctgcttcactatgtcgccgcaaagcacgaaagaggcacacccttctgctccggagtcacttgtttaggctggcagcggctgtgttgattattgcatgtacatccggcaaatactgttgtacgcatttttgaaaacattgattgggaaaccaactgaatgcgcgaggatggctcggccttctcggtggcatggcctttcctgttcttagtttctttttctcgtcctggtggtaacgaaacagcaccacgtcgcaaaaattgtacgtcagggacgctggtcaactgctctcattgtgaaagtcgcggtaaaggccactccggatgggtaacttttactgggatctctttgcaagttgggatcctatcggcgggttattgcgactgacaaccaggggtgcctgaccgcagacacggcaaaacgaagggaattctgcctcaaaacgaagagttaaatcgacggtactggtgctgaagggttattcataagttctttcggcggagtatggatggacgaaaaaagaggccgaggctggtaccccgacgtgccggaatgctactatgaaaacgctcaccgtgtaccaagagcatccagtatgttggaaacaaagatacagctgtacacggcaggccgaatgtttcttaatgaaaatggtgacttctttagtacgcgactatgtgggactaatcaagcgtacattatgtactattcaggaaagccaaaagcaaatcttccgttcgaggtgtgcggcatatatatatatatatatatacatttatatgcatcgacttcgagccactgctgaaagctattgcaatctcgtcagttttgctcgctttgttttgtggaactggaatgatagatgcgaaatacagatcttatacagaaccgcctaacggtgcaaataagaacgaacaaagggttctgacgcagacaacggagcaaaaaaggcctgactttatgcagggcaggctttcctctcactgccaatcccccagattcacgtcagctgtaagtcaacgctttgtttggtatcacatttcatcgcgaactgcggattcaacaccagttgcgtagataggtgtgacatttgaagtagcttgcttgtatacttctgtttgtagagcctctacagaaagcagggtcgaaagtaatactgcagcgcccagagagcgactttgcttggcaaattgttgaacctcggaacgttgtctcgggactaatttacgaaaaacgagcataccgcacaggaagaccgagtacatgtgcagcaccaaaaccagcgaacccaaaccgtagttgcctttatgagtccgtgcatagaactcttctggaagtatatggatatcttgaaaatgcacgttaaaacactaatcgagcgcccagaaaagctgcagttggccagaaactgaccctcttgcattgaattgcagacaaaggtagtatgcattctccgggaactaaaatgggcgcgtaaaaacacttcattcgcgatgataagtatgggattacttcttactggcaatcggacggctcggggcgagttcttaagccttaactcttaaaacagaatctcgaacgacatcaaaaaaaactactgagcgtccctcattgggcaaccgaagagcagtgcaatcacggggtgtccaagaagctaagagtttccaacaaattaccaacacttgatgaccacaaaacctcgctctggttgtcacgaaaggagagatacctgttgaaaaagagctgtacaaacatgacgaattatgctcgtcctcggcactgtggaggcgctccgcctccagtcggaggcttgtccttgaaacagttggctatttctttcgcggccgcctgcttccgcattttatgagtcttttgattccttagcctgttcaactgctcctgtcgcatccttctctccgcggtagcattcctagcttgtgacgtatcgtttcccactgtgccacgctcgaaggcggccgccattttggtgaccttgggcccctgcttgcgcttttttttcgagtgcgcacaccccatcttgaaccggcccaatccacgtaccgacacgccttcgttttctcgaggatagggtacgtgtgtctaccaagaaggaacggctatacagtggagacaggccagaaaccgttagctgcaacggcagtcggcgaagcttgttcccacatcgaagataacagagggcggttatgttgtacacctcatgaaagagaagtgacgccacgcacacgtttttctcttgcccggcagaatcaacaccaaagtgtcttctgcaaagccaatcaggagcagcttttcttgcagcggacctaaaacatggagagacagcagtcgacgtggtggtgtcgagttcagggcctcggcacggacgccctcaggcttaacagccgcatagaatacatatcatgcaattggcctctccggacgggcggacacgcattttggtgcctccattatcgttttctctttgtagctcggcgtgcaaaaagatgtgcatgcgaacggtgagtggtagcgtgtgttgcttatacgaccttttcgcaacgggcagcgagctggaggggtgagtgcgctggctgaccgctgcacgatacatctcccaaacgcaaaatggagacgtatttgtgcatcgttgcaacccgggttgctgccactcgcggcaggtgccctcggtacttagatgaacagggggaagtgagtttctttacgccattttccggacacggtgttcgtgattttgggcatatgacacttttctggctataggtggcgccgactcaaacttcgctcctcgccgttgctgtcggacaggagacggctagagttgagcaagatttctgttgatgcagtactgcatcgagcggcacgtttcatgcctctgaaagtgtttgcgctcgccttcacagctgtttattggaggagaggaagcccaacattttacaggtgacatttagattttgacggtgaacgaacaagaagcgcctggagacgaggaattgaggcagcccgacgatgtgtggcctgccaaacgacgaa

SEQ ID NO: 1730 - DNA, 2839 bp, Toxoplasma gondii
  source 1..2839: mol_type = genomic DNA
cgtacgaaacgtctctgcagttctctctgtcgcgttggtcttcctgggcgttgaacaccgagcgttcctcccagaactctgaaatccctgcggcgccaggcagacgaggagagagagattctcgccgatagctttccgcgaaagaccgacaggcagacgcggcgacaaaagatgacctgggcgcgaggtagtgacaagccgtcgttgcgaacggcgcgtctgctggccccggagactccagtgtacatacaccgtggcctgcgactgcatgcgagggctcgacccatcgattcagcgaagcgggagagggcgggagcgcgcgagagcagacgacagaggccctgtggcttgctcgcgaactcggggggcattgtgcatgcgggcgacaatgcggtgcggggagagaaaaacgagacgaagagcgagttggggaagcactgttttcagagagacagtggtagtttgtagagaagcagcaagcatctcgcgcatctctgttgacgcacgaaaaggcctctctccggcgggagagagaagaagagaccgacatttcgagaggacgcagacacacacagacagcacagccggtcgcgagagtttctctgagctggcatcctccgcgacaacctgtgtccggcaactctttgacaggtgatcgagccctagactggcacggtaaacgacgaagagaagcgagcgcttctgtcgcgaaagcactggacgaggtgcgagttgaacacttcgatttctgccgtcgcgttgctttctgtgtgtacatctgtcgcgaagcacactacgactgggaggtaaagacagaggcgcgcggagaacaacgaagcaaaaaatctctcgaaaaaagcaaaaaagagaggcttgagtggtattcttgcacacgcgcgataacgacgacgatactttggggtagagaaagacgctaaaagccgcgagagaaaaggaacagatgcactgagtgaacctctatcggatgtcaagacagccaaacaaaccaaggaaacaaacggtggaccacgtttgacaagcatcaggagtcttggactttttatccgcaagacacgggaagcctcctccctttcaaaagccagacgatccgtcccccgggcggtttccttcttgctttcgacgaccctctgttggcgacgaacacgatggacgaaagagtggcaagaaacgcgtctttcactctcttcatccctcgcgaaagtcggtggacagctactgaaaaaaagagacggagtgcggaggaggacgctcgcgaccggcaaaggaagtctgtctctctgggacggcggaaacccaactagaaataaaaagaagaaacccgtctggggatgccaggcttagatggccgtggaaggttcccccttgttctgcagccgagaccctgtgccaggccggagttaaccggctgtgaggtccagcgctttacacgttgcagagacttggtgaaaagagagggactttcacacacagttgaatggcggggaaaacgcggcatctgcaccgcaccgaaagactttcggcaaacgctctcctcaacgatgcgcgctgccttcgtcgatagcgtgcgacgaaaggccagtgtcgcgtggaacagaagtctgcagccggaaaaactcttcgaaggggttcgacacactcgtgatagaagcatctgtgaaaaagagaaaagtctatagagaaacgagagggaatcgtgttcagacgtgacggaaggaggctgcacatgctcgagaggaaagacagcacggaaaagagggggggcgcttgccgtgtcttctgcgactgctcaagggcgggcaggaaaaaccacgccgttgcgactcggtcttcagaaggacgaaaaaatgtaagcagaggaacgaaaagcaagagttcctcccgtctgctgaagaagtatggccggtttctgtcaagaaaacccgcgaaaaaagtcaaagaaaagccgaagggcgctgccagcgagcgcagtggtcggtccgcatgttcggtctggacgccggtgtgtgatttacgaaaggtaccgcgcggcgccgttgcgaaaaaacttacgcggaggacgtgtgcaggggatttccagtgaaaaatgtcgtcgagagagtctcggtgaaagacctggctccgaatacaaatgccgttcgacagaacccctccgactgcttaggctggtcgtccgcaaacaaacctgccgcgaccctggattatcgggcacacgacaaacctatggagcaagacctaaactggggaattctgcgaggaattgaggtcaacagaactcgagaaaggatactgccaggtggatggacgcggacctttccaacattgacggcggggggggacacagccataatcatcactctcctgaggggtacggatctcgtcaccctctactaaaggaaagaccaaggttcggaagtcgttcgcccaagaactaacatgaccttgtcatgtgctttgtgtctgtgtaactcacaacgaagttaggactgtcgcaactcacattgtggattggtacaagcaagttactgtgtgcatcgtagagagccggtggttgcaagggtcatttagacgaaaacagcatatttgcagaacttttgagatgcagcctagaaaaggcagtgcgtatgcaaatgctggcctttcaaatataaactctcaagatctcctccgtatgaatacgggttcttcaccgttatcggggcttgccagtttgagtgaaagcgtcgcttgtgaacagcttgtaccgaagaggcgaatcatggcatactccggtcaaaagagtagcattcactgcacggctacttcaggtgaaacgggagca

SEQ ID NO: 1731 - DNA, 1476 bp, Toxoplasma gondii
  source 1..1476: mol_type = genomic DNA
aaaaaggcgaaagatccaggcaaactctgcattctccgtccttcttgaatttacctggtgctggaacttaccccggcgaagcgtcgtgtcgtgcattttggcgacaggatggggagcgagcagacggaagggaacagaactgaagacgacggaaggtgtctatagaccccaacaaacagtttagcagtccgagactttgaccaggaacgtgaaggttcgcaaatcctcagcgggggctccagaaagagtaatgctgagagtggcttgtcgcagtgaagcgcgacacctgaacgcaccctggagttctcgcccggtgagactcggactggggtagtaacagatacgaagctctcgatggaaacggtttgggaacaaagcaaagtttgtcgacgcgcgccgactgcggcgacaatgtgtaaaaaagatagagaagtcaagactgccgaggggttctgcgaaaacggaaaagaaagtgaggctctcagaactccgtggacgtcctcgtcgcggcggactttgttgaaggagcgacgctaaaccaggaagttttctcagaggcgatcaacagttgagactcgaaaaacgcaaattcctcatgtgcaaacgaaatactgagcagatgtgaaaggcctgttctgtctgcggctagggaaagacgagggcacgggtgagcagttgtattgacacaaatccgtcttctgctcagcaaaccaacaagcaaaagaagacgacgcacacagagaaaagtgctattttgtacgcgggaaagatagtcagctgaaacaggcaagcggagcttgcaagcgcgggtggacagaaaggcttttttcactgcgaaaacagaaggttcgcgtgcggaaaaacacagagggcaacgaagaaagtgaccagccaaatgcaactccaaaccacagaacttccagttttagctcctaggcagaaagacgagagacaagcgaaagccttggggttcgaaaatcaattaataaaacacgctagtcctcgcgctgttcgaccctctcttcagaaagcaaggaacaggatctcgtccgccaagaagccgctttttctccacgtcgctacgaaacgctgtacacataaatgtgcggcatgcatgtggcatgtgcttttctttttggctttctaccgcgacaaccgccttccttcgctcacgactctgtgagcggccgtggacttttttaacctcagctcgcctaaagaaaacacaagttcggcatatattcggagtcttcgcgtcgcagcacacaacaaaagaccctcggcattgtgtctcggggctgtgtagccgtccggctaatatggtgaagctttagggccggctgcgagaagttaagatcgtcgtctggtttctggtgcccgtgtatttgtggggcagcgcctcgccgtgcatgttttgctgtgctttctttctttctcacttttttctccaaaaagtctgaaaaagaaagataaaaa

SEQ ID NO: 1732 - DNA, 2501 bp, Toxoplasma gondii
  source 1..2501: mol_type = genomic DNA
atgaaccgtcccggaacagctggtggtttcgccggtttcctgctttcttctcaggctctgcgaagactcgattacttcccccttccccccgtcaacctcccggcaaatgtcggcgcctcgttgcacccgcctccacccctgacaatgaagattgtcggttcgcatggcttttctcactgtcatgagaacattccagtgaaagagtcgaaccccctgacaggcgaaacgagtgctccacgccttgaagacgaatggtgcgactatacagattcagaaaacgtttgatcctggctggcgatgaaattcgtggagctgaaaagcggggacagaagcgggcgagggggaaggaagggcggcgccagtgtgaaggtcggatctttcgacacacacttccacaacttaacttgcagtaactctcaattttcataagactatcaaacacaagggaagcaaatttgaaatacccaacagcaaaaagggaattctgtgtttaaaaaccctcagcgaatcttggcgaccatgaactgtctcacgaagacttagcgaacagcagtagaactctcgacgttccaacagtcgcagcaggaatcacaaatcggaatcaagtaggagcctgctatgctccgaaattgaacttctccacttttgtcgggtggccgtgtattcactgccttaaccacggcagttgctccgcttttccttctctcgcgctggcgtgaaactaacggggctgttgctttgttcgaccatggaatcacgcagccgagtacaatggcttacttgtcaaacactctttatggcactgagaaccacactgcgccggatacggcccacactacgatagagaggcatacctgtagtccgcaagctagaccgttggagtttggaaagcggaccacatacacggagtcgaatgtggtggcagcaccacgcagatgctttcacttttttgtggtcaagcattgtgttgtgtggccacgtgtgtcgctctttgtagatgtggcgcgtccgtgcagaggcgactggtgcgggcggcgaacacgctagccgtgacattttttccttcgttttgtgtgtctactgatcgatgagctctaagtcttcactaccatgacgcgtgtgtccaaagcaaatgtgtactccttgtgtccgcggtgacgctacgtgttgtcaaagctgcttcccgtctctggatccatcctcggtgacattccgatgctcgtggttgcccactggagttacagagcgcagcgccatatcttaccacgcttctcaaatcatcggcatgatttctcccggactgtccaaatttgttacccagatggcacatgcgcttcgaaaggagtagatattttaagtgcatcatacaagggttatcaatttctgtatcatgcagaaacgactacacaacataaagggtgatccgtagatatcgaagggatctgctggacattatactctcaacacgtatcgatgatgtatcatgctaacctgtagctcctgttggagcgctcatacagcgacaggctaacgcgggatgctgccgcctccgtgtcaacatcctgcgactggacctggtctgccatgatgttgcttctacaacataaaatgtgttactggtgcttactcctcgtttttaattacacggtgaacggagctgtgttctactttataagagatgtgaatcaagttccccttacctcttcttgccctcctgcctctcactgtacgcgatgtcgagtttctgcacacggcgatccgtcacatccgaatgctggcggcactgcgggaaaaaaaagcgtaaacgcagcgtggaatgtagtgcggacttgtgtcactgtgatgcaacaactccataaatctcgcttttcaggaatcgaaaatggagactcgtgtctgcttctgttgatggtgtcgacgacgaacgctggccagctcaccgtttcttgttgtgtctggccaaccgagtgagcagcccagaatgcatgcaaaactgtcccgaaactcagagaacctcgaacatactattcacatttagagctggtttgacgaatgcttttcacatcgcaacttacctgctggactgtttcagttgtgtgtgtggtcttcagctggcactcggttagctacagttttcgactgccgaaggatcttcatcggagggtcctgtaaacgctcgcggagaacctttgttccatctggtcagcttggaagtaggactcttcctattgacttagtggtttgttttggccgtaaccgtgtaatctggaaccaaaaacgtgcaaggactgcggacgttaggagccctgctactcaaaaaattcatgacgcgttgaattcgtcaggcatctcggatgtcttgagagtgaccggcttgaaatcttcttgcccgcggaggatcgtctgcctctgacttactggcaggttctaacgcctccctggggcttagaaaggaaagtccctatcaaagcgcaaacggggcacaggcttgtccacgacca

SEQ ID NO: 1733 - DNA, 4573 bp, Toxoplasma gondii
  source 1..4573: mol_type = genomic DNA
cataaacgagcgcgctaacatgcgtttcctgaggtcgatttctgtcgacgcgttttctcgtgtagtctgtgtgtgcacagctcttcgttctgtgacgcattaaggagactagcctttgcatgccttttgtgaatgctgtggcggttatcatctgagagggtacgcatggacggcttttctttttttcgcttcgcaagagtctgacctcgacacggtctccgacttgtttcgaccacgtgacgactttgccctccttcatcgtgctggagagcgcaggcatcgagatttcctggacagctccgcggaggcttgagcccacagctgtctcctgtctcctgactgtcccctcagccgcgcagaggagcgacgacgtgagcctcgatccacatcttcgctcccgagtctgaagagaagaccccgccgacagaggtctctgtcctgcgttcgtcgaggaaacagaagacgctgaggatgcagaaggagacgcgaagaaacgggggcgcgtggagtggacgccagagccggaagagacagctggagcgacaaacgcgggcgccgaggagcctgagaaggaggtagaggaagccgaaggagcgggcgaggaagaggggacgagctggagcccaaaggcagaggagacggccgctaggaagagagagacatggacgagaataccgggtgaaggcagcgccatcttggagaggagagcggtgcgcaagtgagaagaagaagcgcgcgcgtctaagagacagatctcaaggtgagggaacagaggaggagatcctaggttgacttggccaaaaagaaaagactcagctgcctgctctgtgtaggatatagccttcctcgtcaatgcggtttattcgaatgcacaatctcgaggtgagaatgaaacagagagaggttgccttttgcagaagcgaaggtcgcgaggacttttctcgcttcctccgaagcggtttttctcctcgtttgtttcgtcctcgtccagttctccgctgtgcctccgtcctgctctcacaactagaaatgtctgaagcttcgtcgcagggtcttctcgctgtgtttgcgagcgcactgaagtgtcaccgcaaaacgccgcagaaaacgaatggtgtgcgctgagagaatggacctcaatttttcctcaatttttgggctgcttgtgtgcagcggcacagaggaacggacggaaacggcgttttttccccgcaagcacatcggccgagaagcgacccaagacgaacggtgagagaagggcagcgcgagaaaaggagacagcaggagacaaaaggagaccgacgaaggagacggcgtgaactcggggcagaaagagggccgaaaggtgaagaaagagtcgaggcacgagaggcgatcaagggcagaaaggcagacaacgcgagagacaaagacagacgcgcacagagagacggtgacagatgaagaggaaacgcaagcacgaagacagaaagaaaaaggagcgtggcggtgcgaacacacactcagcgagacttattcaacgagccaagacgaccggaccgaccggggccaatccagaacgggagacaggacgaaaagagccggggaaaggatgcagacgagaagaaagaacggggactcacgacgttgtttgactctgcaagaagacacacacgtaacaaccgtcgacgggagaaacaagcgaggcggaacatgagaacccgcttgtctcttctgcatgctctcacctctcagtcgccggtgtctccggtgttcgctccgtcagacgcgggtggctcggagacaggcccatggcgccagtctcccgaagtctctgaagacggaggaaacacgatattcctgcgaaagaaaaaaaacacagagggaaaacgaaggatcctggagggacaaagtgaagggcactacacagggaaagcacctggagagaacaagacaatacgtcaccgctgtcacacagccgcgccgttaacaggggagggggggggtacgcacccgtcacgaaaatgatcgagtttgtaaccatattattggatcttcacgctcttgaaagtgcagatggggagtcatctttgtaacttacaccagtagaagcatttcaggtgattttgtggagcagaacttacagcaaatcgaagcagacgttgaacactgcgtttgaattatgagcggacatccccgaagactgaaacgcggctggccccagttgcctctctctccttcctctctttgtgtgtgaggcacaggaatctcactcgctcttttcttcctctttcgggtcgttcctcgatagtctcgtttttatgtctcttctgtctctcttttcctctctgtctcccctgtccctctttttctcctcaccatttctgtctcttcttctttctgctgttttctctcttcttctcctcacttcttctgttctctcttcctgctgtctcaggcgctgtctcttttctcaggcgtggctaggcgagggagagcagagggcgacaagagaggccgagactggcagtgcgaatgaggaagaaacaaacgaaaggagcaacgctcttgactcgctctctctagctcagtaccgctggaggtttaccatgctcaccaagtggccaaagcgttttttggaagagcaggcagcccacagcagaggtcacacaaggatcctacgtagctcggaacccttcacaagtagctgcccataactaacagagcataaaaatatgtccgtaggtacaccgcgtggtaaggaggccgaatttcaacctcgaacactctcttcttcccgctatatcccttgttctgcgtttcactgtccgtcacattctcggcctctgtgcctctatcgtgaagtccgcttcccccctatcctctcgttgcttttggattttcactctctcgagttttcgctaaaacgcttttctgttccggcgtcttgctccgttcgcaaactacttctctctattgtcgtgtctccattgggaatctcgttgctcgtctgtatttctgtattagccgtttctttcttttgctgtgccacacgggctgcaagtgataaaagccagcgttccacatccatgcgggacagtgaaactctttttcatgccgccttctcggcgtctaagctccacgaaagaatgcaccacgattcgagatgaagaaacgaatcttagactctgaaaagcttgccacgtcgacgacctcacctgtggaatggcagacacactgcgagtgtaaaagcagcaatgaacttgtccctgccagtgacgcttaaggcgagttattgccgcttggcatagatacagatgcacatccagcatgcatttgtatgcatgtagttttgaaagtatatatatgtaattatatatatatatatatagagagagagagagagaccacacgtctggggaaactcctactttacacatttcaagattggcggcgtttctctcgctttcgcccacgagaaaacacgctggcgctgtccgcagagactacacaactacacttgtatctacgcatctgtatatctctgagcagatgctttttacagtggtatttgcctcagagattccccagtgttgaattgcacgcacggacgagaagcttgaataaccgagcacccgcgttagtcataaatccgctcgtctgtccagaatgttgaggtgctatgctcgtgtggacagagcaagagcaacgagttgacaggacacatttaatacatcagacaccgtgtatgcgtcgaaatcgcagacgctggcagagacgtcgccgtcaggaacatgaaaacaaggtagctagcgtattttatacgcgtctgtagtaccgggcatttgcatcttttaggacgatttccgtttccaagaaaataatggagtacctgaccaccatatccttcctgagtctcgtgtcttgtctcgtgttgcatgcagtaaagacattgagaaaaagctcgagactgagccggaggcaaacaaaggaaaatcgacttgagggatcgagaggctgcgctttgctccttctcgcgttttctctttcttcccttctctttcttcctctccttcagcttcacttcttcttacctcttcgtttgtggaccggcgcggaaaacgacgatcttggcccacacgccgctccttcttccacacctttgcgctcttggtgggagaggggggggggggcggccttctcgccagagcgagaacagagacagaacgagaacaatttttcttctcctttcgtcgatctacactgttttacctcgaagaggggtaaggacaattgcggaacttcggtttctttcgtgctgcgaattctacagacgcgattctccgttcaggtggtcagcgagtgaccgcgtccacgaaggagacagaaaactttcacgtggatttctccctttttctttttattgattcgctctgtctctgacactaccctgctgtatcgacgctttccgactctccgctcgtcttcgtttccgggccaccgtacaaattgcatgcgacccaggaatcgcatctttcagcctcaacagcttttctccctttatcgattatcgggagaagacagaagagcgaga

SEQ ID NO: 1734 - DNA, 4789 bp, Toxoplasma gondii
  source 1..4789: mol_type = genomic DNA
ccagggaatcgctccggctcataatcgacgtgcaactctctcagagccgcgagagcatgcagagaaattggactagagaaggtgtagctaccaaggatgtttgacactcggaaccgagtcatcgatactttgtactttgttaatggatggcgctgcagccgcctcgcgatcttcttcatcgttcgccggagctcctccactgaatttgcgcctgttcccatcatctttccgttactggagacacaacagaacagcaagagaacacagagcaaaccctatgaacggggtagctttcgcagaactatactgacgtagtcacgcagcaaacgctcctacagagcatgtacttacgcctgaatcaaggagctgtcagactcacgcagaacgcagcaagtgcggcactctctgcgtaaagtttacggaggaacaagactttcttcacacccgacagaatacgctgcagtatgtctgttctagtcgaccctcccctgtatgtgcgtggagcgtgattcaggcgtccatttgagaagcgtttctgaattttcgaacttcgatgtagccaggggcgcgagttcaccaacaggtgcaggggctcgaccacactcagtgcgacagagcaaacagccagttcagaaaagtctcgtgtgttggggacagtgcagttcagtatcagaagagtggtgcggtaccacctgaggcatacatccgtaggtgaagagtttctggtccctgtcctacctgaaaatgttgatggaagcaatgcagtttgttcggcatcggacatccacacggacactgtgaaattcctcaggattgtatacggaatttcctagagcgcggcatgcaacgtccagatcgatgttgcagttcagctggcagaaagccatgacgttgtggacgaaaaggacgcccacttcgccttcctcctcttcttgcacaggagggttggatgtcccttcatcaatgaggccttctctctcggcgattaattcgcggttctcctcgtcctccgtcgccgaccacccgcccagccccgtgggtgcgggtgcgtgcacaaacggtgcagctccgcggtgctgacgagtggtcgccatgaatagtaattctatgaagggacgacgcagagatgcgcctccgggaggaagtcctgaggagcgagtgaagtgtgaggtgccttgcacaaaccgtcggaaggatggaatggcatggtcactcctcaggcgacaagggattcacgaatcagcacgtcgcgcggtgtctcgtatccagagccaaaatgagaacctatgttttgcgatcatgaaccgacaaaacgacgacgaatagatggaaagctaaaaaaaacggccgcatgcataggagcagcagccgaaacgaagaagcggcatctgatgagccacaaggcgggattcggtgcacatacgctctgactagaccgctagaaccggcctccaactaggcgtcttgtggcgacaaacacgcgccagacaaaacacagctgaaacgcgacattcgtgagtccaattacggcacatcttgaagcgggcaacgaaggcgaaatatctacactcgattaagacgatgtagctgcacgtggcgacccgcccggttgcacacgttcccgacgcaaccacggtcccccctcacaacagatctgcttttgcgttgtaaccatttgcagcatatgaaaaggaattatgtggcacttcaaattccgccatgcaacttggtcctcacacgcccgctctttctcggaccccctggtagggttcagcttcttgaacacaagcgcatgcaggtaacagttcgaagcggtgatgacgcggaagctttttcgtcatgtgttttttaatatgacaccgctttcagttcaaacgtgtgtttctttcatttcagggggtggctaaccaaggaaatgcaacgtcacactgcacgtgttagcgtcgtgtgctactgcctcaccggacagccacacgtctcatgattactgttcgctgaaacacgcaacaatacgcggagagtaagggctgacaaacagacaagaaaacatcatgcttctcttctctccttcctcctcatcacctttgcattttttctcgtaaaagtcttcacagacctccatgtttcgtcttttagagactgtctgcagcaaagggggttcgaatcccgacgcactcgttcttcttcaaatggcgggcttttgagctgcggctgcttccacgaccttatcagtccgtcactaccgttccgcttgacacactgctcggcgaggctcaaagtcaaaacttcgaaacgggggttgttatctcacggtttgatggggatcctccacgagaagctgctgcgcgtaactccgtggcactggttgaaatgccagtgcagcattcatttaccgaaaagcgtaggtgctagtggcagagatttcactatcgaaccccgttgtgacaccacttggagtaagcgccgtgtggactttggcggcctttgcgactacgcttgccataaacatgcctgccacaggaagtgacacaggttcgatggccgaagaggtgctggcttctacagggtcgaagagtgtggcaggggtggttattcggcaacagatctagaaaagctgaaggcttttgtttgtgcatcttttgccctttcgttgccttcgctcactcggagagttggaaaattttcaccctagaaccacgactcggggttgtctagagactttgaggccggatacaaaggcatctaaacatcggagcggacggaagttgaatgcatcgctttgcagagctgtaacttttgttatataaagtccacgtctgccacaggttgtcagggctgctgcttgtgttcttgaatagttctgcaaaaggtcgcagagagctaattcgcaggacagttaacagcaatgtcatgcctcctttattcgtcgtaaacccgttccctctgaatctgtaaacagtatccatctatacaataaataggtaaaatccccgtttaccatccggcgttgcgaaaaagagcagctagtaaatcgtctctttccgtcgttccagaataaagaaaggactccttgtgttgccaccaaaatctccgcatagcaggacatttgctgatgagtagagtggagcggatttttgccgcgtttcccataagccttctctatgaacaacatggctgggacacttttgcaatcttaggcatgcggaagggttcttgcacgcatctgcatctaagaacttgtgcagagatgcacctgcttccgagtttttccaaatcagggtgccgcggaagcatgcgatccccacgctagcaaagaaatcacttcgtatgaagtttatcgattaccattgcctaaactgaacacgagcggtaccatgcgtttagattcaaaatcaaccctgaaagtatttatacatgaagtttgtttcccctgctaaggaaactctgagatcttgcaggaaactggggaataatttgtggacacaaactcggaacctgagaagtgcttcccgcagtcacttccgactgaattggctgtgagcctgtggaacacaaccgcgacttgctgtttctccgccttcgacgattctcggacacgatgcagttacacattcctttcgaaatcggtatgattcctttgtgagctgaaggcgcttctagctaggcaatgtgtgaggctttgcccttactgggcgaggatctcggaaccctgtaacagtccaaatgatgcttctcttgagaaacaggaaataattggagaactaagcccgttctttcaccccgtacatacctgtttcttcttttgcacaaagcgatatatcggggatcgtcgatcatttaaacgcaaaaacacccttaacggctttttcgtgcagggactcattcagtgcacaaaggagggtacaaggcaaagaactggctcggtagtcgaaggaactgatgaaccacgtgtgcagtaaaaaacggagacacccccatttatttttcactaagactgcatcgtcaccgatgaatttaccaattttcttaacatacacgcactcttccccagacgttgctatcgatgttgcctgactctcacaagatgacacaagcgtttcagtgcatgcacgcgttaatagaacacgtaggcgagtcgataccaagacaattcagctggttttgtctccttactcgaggaatctcctttctctttcgtatttgacttaaccgacgtcttgaaaaagttccatcttccacatgttccgtactggtgcgcttgtatctttggtgttggtcttgtggcgccagagccggccaacctccccgccagctgtgatatttcgtcgaggaaaagctcccggtgtatgcactgctaaagccacgttgattttcaattaataaatccggcagtctccttttcaaaaatgtcgcgtgaacgtttctgcagaagctttgccaaggcaggtccgatgttaccctggcaaagagggcgacgagaagctgggatctttcgctcgttgtgaaccgactatctaaatcgtttctgcttaacgcttctgatgtttactcatttccctccactgtttgacaaccccgttcttcgatgtgaaatgctcttatcagttgggtctcgcgacctctaagaacttgttgcttttcccctcctggtggtctgtaccacaaaacgcgcagttccaaccggagtgcgccttgcaaggctcttgctctcgcttcctgaaccaacagaaagaattaccgatctggtttagaactcagcgttgcctcagattctttgccggggtgaaca

SEQ ID NO: 1735 - DNA, 1407 bp, Toxoplasma gondii
  source 1..1407: mol_type = genomic DNA
ggtcgaaagcgaaaaggcaggcgtgggcaaggactcaaacagttcccccaaccggggcatcgggacttctcccgagtcctcttggcagttctcagagccggaggcaaaggccctgccgagcgcctggctagtcccgtcgctttctgtctcgtgcacgcgtgcctctccgttctttcctctctcttctctcccttcttggtttgttttctccttcggctcgagaagctcttcctcggatccgctcgctgcatgcaaaggccgccacagaggcgcccggcagcccagagaagaagacaggaggtgagcgccagacggtgggagcgaagatgaggccccaagaggagtggagaaactttctggggagctcccgacgacggggacaggcgcgaacctcccgttggaggaattcgacgccttcggcgcctccagtgaacatgcaggtaaccccatactcgctggcgggcaaaactccttcctccccttttcctttctgcttccttctcttgtcgttttctctcttttttcttcctttcgcgctctcactgcttgcctttcctttttgcttctcttgccttctctccccttgcttgtctcttcttgcttcaccgctccctctctcttcttgtatactctcccgtctctttctctctccctgatttctctcgccttctctttctctgtcctccttctctcctcctcgtctctctctcggtgtgtagatgctcgtggaggagcgcgggtgcacggtccagcggcacgagcgaaggactggaggagaacagtcgcggcacgggagaacgcggagtgagacgcagcgagttcttgtgtaccacaggccctgcgttgggatgtttgccttctctcctgaagaaaaggcgtgatgacctcttagttgagagcgaagggagaacgcaggagacttggcctgtgttttcatctcccctaaacccccgtcgtgatctcgcgagagaagtccaccagaagacgaggtctccacttcttctttctcgtctaacgcgttttctccctgcgactctaagccactgtttctacgcccggaactctgaagacaagaagcagagcagaagggggcaagatcgacggcgaatacttgacaggttcgagcggaatccttgtagcgcgcgccaccgcgagtcacgagctgtaggccattcctgttcgggcaacaagctcaagtcgcagagacgaaactcctcgactgaaccagcaagggaggagacagagacaaacatgcgttcagttcaaccagccagccccatgtttagactgtaggggggggggaacatgtccagcgtgtgaaacaggcgcagccttaacgcgtctcagtcgccgcgtcggcgcggtgtcacaatgtcgaaaacgaaggcaacagagagaaggtcttga

SEQ ID NO: 1736 - DNA, 1022 bp, Toxoplasma gondii
  source 1..1022: mol_type = genomic DNA
gtagagatgtgtgtagaggcgtggtgaagtgtgtgttttgtctttggagaaacttcgtcaatgggtttaaagagttgggggcaacctttgggatgatctcagccgacgctttcgcagttgtggctcgagggtggcgagaaaagggtctcgtagctgttcgagagaatatcgagaagtgagaattccccactttagaaagtccaagcggaaaaaggtgctcgttgtactccacagcagaagcctccggagaaaagacctttcgcctcacggaggtgttgccatgacattttattgctggggtttcgcttcgatggaagaagaggagggcaactttcgtcgtgattcttttcctgggagcagtgtcttctgtcaaaaaagaaggcatccctcggatcccagagggagagaaagagacgccttctgctgccttcccgtgtctccgctcctgactcatccgtttggaagacatgtgctcgccatacaaatcgttatgtctgtgtagtcgcgcctgcgacctctcttcatcttgctgtctcttttggcgctcgtaccatgcgcagcggtacggtttacaccaaaatttaacacgtacagtgatacgtacgttttatcgctactctactacaagagtccaagtacatcgatgtatttgttgtatatatctatctgcgcatcaaatacatatatatatatatatatacatatatatctatgttagtgcgtgcatgtgtgtctctctccacgcagatggtggcagctccgaagtttccgggaagcctcgaaatgagaggcagagagaacgttttgattccgtgcatattttttttcgacggggcacctctctctctcgacaaaaggacggggatgtgcgtcgctttgaatcgctttttcaagattgcgtttggaaagaaaagcataaatgcctctgtgctgtgtagggtatatatgtccgttgacacggtaattcgacagaggcatgggcgtccatgggagtcgctttgctggagcaagttgaaagaaca

SEQ ID NO: 1737 - DNA, 4526 bp, Toxoplasma gondii
  source 1..4526: mol_type = genomic DNA
atagaagcgtaaatctatcgatgagctgtcggctgtatgaacctcctccgaaacgccactgaagcgaaaaataagagtttgtgtcttttgcagggtgtgagtttgatattgcacatgaactgcagtcagatttttacggaacccaattccactgatcaggtggtgaccttgactccaccttttgtttgtcgacagctgcccttgaacagatagggggggtgcttcgttgcgtaatgtacggcgtgcgagggacttaccttcgctaatagggtacttgtgttaacggcgctctcaacgtatgctgcacaaaatgtagctcatgtgctcgtaatccaattgtttgtcttaactactcggagaagatagtgttgaaagtccatcggattcacgcaggcgtaactctccgtttgacactcctggtgtttttgtggagaatgaccctctgaaagtgatcgtcttggcgtatgtggtatcattcgtgcttttgggtgcagtgtcgattctcagcatgaaggaagtaccccggtgctcttggaaaccttcagtgatgcctcggtttccgtggctccttgagtgctggcccgttcaaaagacgcgtgacaacacgtttcaaagagaaacacgtgggtatacatctggagatttaagaggcagcagagatgtcgttctaatgtgtcgacatccacgataaactgccatgcctcttccaaatgaaactaaaagctgttcctagcctccatgtgtgtcgttagcttctgttgtaggaactgttgtggcacaccatggccgaaattcacacaacaccatattccgcagatgttatttccgttgccgcacgtctctgaaacgcaagacgggtcatccaacacgctcgtggaatcgtgctccggctttctgaggccatagcgaagactcctacagccagtacacgggcaacgtgcgtaggtgactgtgtctgccagacccgctgcttcacccggctcatcattataaaggctctgccagctagtgttttcgaaaaatacttccagtgactatgactgaacgcactgatcagaagagacttaaagcaggatcaagttctgagcacccactccattatttttccgttcatcaactacgcaaacagatcagttttccagtttatgttcccgcgcgtggcgctctagtcccccaacgaaactgaagttcatggtgccttcagtggggaaacgctgcttttccacttatgatacatcctcaaaatacatggcagtgcttatgtgggaaacaacttagctcacagatccatccacattctgtggcaaagacaggcacaggccgcgctcgagaaaaccactggttccgctggacaagccggtcggtccacagaatcgctggaccgtgcaacttgactcgtcgctgcgcagtacgtcgtggtgtgcatttcctacatcgaaaagattgttgagcccatgtggcctttgcgcttgctcgcaagtttttgcagtctgtccttgtggttagcgtatggcttgctactggcggctctcgcaagtgtctacgttacattccctcatgcattccagcgacactggctttcagaacgcggtcttagtacgtgtatctgccattaatgcaacaacttgaggtggtcacagtaattctcaccggatgattgctatcatgaaccaccgctgttttttgagaagtccgcgtgcgtgtggcgggttcaccctcctctagcacagcggcatccggtggcgattccgggtatggggaatctacccacgttgcccatcgaaggtacacggactcaagcatttccagtgtatagctattgctttttcttgtgacgcagttcatttttgaaccccttcagctacgtctagacatggtcgatgttgacggagaacttgtcaaggtggaggagacgaggaggaaggtggagaaagaattggaggagatcagggatttggagaaacgaattcgaaacaggcaattagagtattcagaacgacagaaaaagtcggaagatgacaaaaacttgaacgagacaaggacgaatcgtggtagacttctggcagacgctttaagtctgtacgaaggcggcgacttgagatttgatcagagccttctgattgatgcgttcagagattcggagatacaaatttcacaaagtgccatcagcaacctcttccggtggttggagaggacagatatcaacaacgatgaagacgcgaaggacgtgaacttgcaacttttgagagcaaccttagcggttatgagtggcctccgaaagcacaaatgggtggaactggtggagttgcacaaacaggtttgtgattcgttaccagcccgagatgacagtgggaaagaacccacggagaaacgaaatcgactcttgaaccatatcgatgattaccttgttatgctggagcgattgcgacgcttacattggaaggaggtcgaatatctggataatttcggcttgcagctgcagaggggagctttctctcttgacaaagcgctgcaggactacatgcacacgacactgctcaaccgcggaaagacatatagtggtcggtacggatttcacaaccggagtatttcgaccttggatcagctccgtcggtactacgtcgatcttcgagcgagtcagcacactaaaacgaatgtgagactctgggaggacctgcgaattgtgctttcagcgtacgacgggtacaaagctttcacctacgtgtcggagctggaaggtggcgtagccgctgggttgtggcctgtgcatgcgctgccactcttcttgtactaaagctgcgagaatgtagatgatgcttttcactgggcagctgtggagtgctgtcgcaccgctctgtggcctctccatgtgaaagggcgtatgccagttggtagaattcatccggtatatgttcgacatttgctgactaacttaacttgcgtgtcgacaaagggttcgcatttagaccaaggtacacgtgcagtatgtgccagagccgctgaaaatgtgaggcccctgtagatttcactacgctttgtactttacttcggatatccctaccgactctgcagcttacggaaggattcggaagattttaatgccttccacgatgttttcatgcaccactacgggacgacctgctgcattgatacgccagatgtgcgtatgcagaaccactaataatcaacaaacacgtgaaatcggtagggcccggaagacgaagcctcgctgaagacttccgaagactgttgtacaccgtgcaatagaccttcatcggcagagttataccttcgcagaagttatgggacaatcgcgtggggcgtaacatgcctgctcgctgaatcgatatatggggacggtcatagaggaggacgttgctgcatacatctaaagacgtgataactacacagtagaaggaaatttatcatttatgccaaacaagaaatcacattcatccgcaactgtaagctttcacgcgactccacaggcggcccttcagttaccgcacaccagaactatcagctcgtcgccccgaccacggctggaacggcgggttaatcttttcatactcaatctggaagcgtgagcgtcgtccaagttccgggagggacgagctgccaatttcgcggcgtccactgaacagcttcgacttatcgctcaatgtcggatattgcagtgatcttcctcccgaagtgtgttttgacaaccacacaggaaacgaagtgacgtcaagcaacacgcatcagccaaccgcctggcgacagcctttaggtatagccgtacttctagttcgctctgcagcccccgcacggttcccacatcttccagaaaaaacggtacagtggcctgttactgtcacaggaacatctactgggaggtccatacgacgtaacgaaccggttgcgccgtggcgaccgtcccaccacgcgaggagtggtggcgtagcgctttagagacactggtacgttaactggccgtttttatcggcttccggtgtgcgtctcggtacaataaggtcccgagcagttttcgtctatattcgcctgctgaactctagaaaagctatagcttgtgttggatgcagaatgttcttacgtagcttcgacgatttccaatatagtgggtgcagggagcttcaggtgaattggaaagtgctgtcacactcctcatgatacattaccgtggcgtgttccaagccagtgcattttatgagtccacagttgacgcgctagtatatatgagctaatgaagaggatcaacagtctgaagggattccaagttcccttggacttgatgtggtcgggagcttcgtttatcggtgatatacgtatgggcttcggctgtgggtgccaaagcgcgtaacagctagtgatcgtcactgaatgaaaacccccagctgcgttgtggagtgcatatgcgtctgactttgaaattgacagaattgtctcgcctcacgcgcggcaggattgtggagaaacggatgccagaaggtcctatcagctgggtgaagaattgtgaggcacga

SEQ ID NO: 1738 - DNA, 4963 bp, Toxoplasma gondii
  source 1..4963: mol_type = genomic DNA
atggccgtcgaatacagcgaagagagcgagctttacgtctccggtttcgacgtcctccggaatcgcgtcttcctcctccgcgatccccttctcctcctcgcctgcagacgaccggcgcctccggcggaagcttctgcgcgcggcgcctcctcgacagactccgttcttacgtttctcttcctcttctcctctgaagacagccttctcctcctcctcagcgttcacctccactgaggctccgacaggaatgccgcccacagttccgctggagcgtctctgggcgcgaccgagtcgcttcaccatcgtcgcctcgccccactggaagtagatcttctcgtcgggccccaccgccagggcgctggagcccagaaggcccgaagcggaggcggaggcgcccgtggggccttcggcggaggggctccggggctgggaggcgcgcgagctggcgcggacgggcgactccgcgggtgtctccgtttcgggcccgaggcgcttggggcccgaagaggcgcgcgggggcgactccgcgggtgtctccgcttcgagcccgaggcgcttggggcccgaagagtcgcggacgggcgcttcgcggtcggcgccgagggaggcttgggcgagacgagggcaagtcttcgcgtagagaaccaagtgcgagtcctccatgctgacgcgccagccctgcatgctgcatgtgctccatcggagattcatcgctgtacacacaccactcgtcgtctccttcgaggagtccgcagcggacaagtacgcccccatcttcagtgcaagaagagatctggaggagagaccgactcaacttctgcgggagaaacgcgacctcaggcgagaccagactccagcagaggcagacaccgcgcgagcaacagagcagaaaagagaaagaaagagagaaaagagaagaggaggagaagagaaaagagaagaggaagagaagagaaagagaagaggaagagaagaagaaagcgaggatcgacttcgtggcgtctgttgtctctgcgatccgcctcgagcgcatctccgttgcagacacacccgtgcgagatgagcgcgagaagatgcgtcagaactcgttcttccctgaagtcccgatccacttcagaaaaaagaacagcaggtgaaaggccagacgttcccgcagcctcgcgctgacgcttcggtgtacgtacacacgaggcggtgtgttcaacgcactcacggccacagacgacgcttctcggtgcgtctttgcgagagacacgagagacggacaggaaagaaaggagtacggaagaccgagagagaacgaagaaaaaggaaaggacggtcctcacggcttccctggggaacgcccccgaggtcggccctgtctcccgtcgtccatcgatgcgacaggaagcagccgaacctgaacaaagcagaggaaacggggacggagacgaccagagaagagaagcgcggaaggagaccaagaaaaacgcagaagcacagagggggaggaggtccggcaagacgtctggcagctcagaggaagaaagcagagacgaacaaaactttctttccttcgtactcgcgaaaggaaaaagacggatgctcctccctcgcatccaactggccaccaagaagcagcagcgcagagagcagacacgccgcaggacgcgaaaaaacgcgcagagaaacgaacgactgcacggaggaaactagatcaggagacgaagcgagggaaacaagagagaaagcagtcgaaacagagaggagagcaaggcgagagcccagaaatcaaagaaagagacgggagttcgcagagaagtccgcgccccaccgggaagagcaaacgcagctggctttttctgtctggcacctcacagttttgccacaaaacgaggaaggaggcctgagagtctcgggggaaaaagaactcaatgggcaagagcgattccgcccacgaaaacgagaaacgcgcttgctcgcagacggcgcaggtgcgcggggcgttgcgtcgtgtcgtctcgagtgacttggctgcaggtcgacttcctcgaaattcaagttccaacgacgcagcgagaaccgtgcgcttttgaaaaagaaaacgcgagaaaaaaaaggcacacaaagagcgcgagaaacggaggcgaacaaagactcaacagcgtctcccaggggaaaacacggttggagtgtacagacaccgcgtcaaggcaggccgcccgcctcagttgcgcctgtggctcgcgaaagcagctttttcgcgagagaagacgcgcgagactcgccagaattgtttcgcgaaggctccgctttctcttcgacgagaacctgcactttcttctccgcgacacaggccgtctgctccacgcgaatgcacaccgcagcagggtacgcgaaagcacacggtggcgcgcgctgtcttcgaaggccgcgacccgtcttcgcgtttctcctgttccccgttttttgacttccgtgttttctctccaaacgtggagacccacctctcgtccataccgagtgcctcgcctcagagcgtcaaagttctaaacattttccacggagaaacctggagcatcccggaaggccggcaacaggggaagctcagtgtttcgtttgacgtaaagaacagggtctttgctcttgtgcaagggcaggacagaagagaaggagaaacgcgggagacaatcctcagctccgagcagcctcgccagagctgcagtcgacagaagctcgcgcttcaccgaaacgctcgcagtgaagtcgaggaagcggggaaacacattcgcatcaagcatacatacgcgtacgcaggccctgcacaagtttagacgcatgcatggaacacagaacagaggaagctgctgccaatttgtgtatgcatgcgtagatgcatacctgtgccctgtagacagagaaagctactgttcattgtgtgttttcatacatgcatatgtataaaaatatcgatatatatatgtatagatggacgaatgtgtagatgcaccatggtagctgaaaaaaactgtatttcgtgtatatgtatgtatatgagcatgcgtagttatatgtatgatatatatgtagactcatgaaacagcgttgtgtagatatatatatatatatatatgtctgtttccttgaaggccgcagagctatatgaataacggtggcggcgcagtcgcaagtctgtacaggtgtgtcagtccactgtgcgactcgagaaacggtgcttttctaggtacagatttgcgtggtgtcgcgccctgtcacgatgcaaagaataaattcttctcgccgccgcgttgagggaagaaatgagaaacgcagaggtctctctgcaagcaggcagtggaaacacagatggggtggcaagataaaatccattaattcaaggattcgtttgtttctgtggagcgtgtgtggggaaatgtggagacaaagaaatcttgattcgaatcgcaacatgtgcgtatccgactgtgcagcgttgctcagatcttccctaaacaccataggacctcgctgtgtttccccagtccccttccttttttttggaaaacatcacgtacaaaaggaaatccacgtcaatgtacatgcgaggcatcagttctcgtcccccctcctgcttctctcttgagatgctctcgtctccgtactcccctacttccgccgatggtggtgccgtcacatataagtaactctgtattcatgaacctctacatatatatattatatatatatatatattatatacatatgcgcgcatgcaactaaacacatctttgactcaagacatccttttctgtgtatcaatgtgccatctgcattgatgcatcgctataggcatacaacacacctgcatgtctttctccttgagatacctccatatttcttatttaagcatatacatatgtatatatgtatatgtatgtatatatatgtatatgtatgtatatatatgcatatgtatgtatatgtatatatatatatgtcattatttacctgtatgtatgaataaaatatgtatacatgcctaaatgaggatttctgaccgcttgctgtctttctgaagaggagacagttgctgcgagtcgacactgcaaccccttgcccacgaattgtctgtgcctgcgacttttcctttcttcctttttctctgcagtttttctccgtgtgttgtctctccacgtcgtctctcgttctcctgtcttcttctccgtcccttctttcttcttcgtttcaattccagggggttgtctcgttattcttcctgtctttgcagctcttctttctccttttttctccttcttcgtcgtttccctcctgccttctgaaagaaagaacggactctcgagcgactctgcgcatcggcgtccgctgcttcgcgcaagtcgcgggatgagagagagacagacggagacagagggagacagagagagacagagagaaggtatttcggcgttctttcgtttttcgagagggagaaacgaagtgggggaccaagaacatgttgaagagagaagcagaaaggtatgtttctttcagaaagaggaggccgaggcgactagaaaactgaaagacgacgagagaagtcgcggctctccagtcggacagctcatctcttgtgggcgctctctgcctgcgggtccatgtacatccagctgactctcgagagaaaacggagaaaaagcgtccgcgttttccctcttctcgtttctccttctcttcctctctctaagacagtccgtcatttggcttcttcaccgagtttcttctctctccttcctcccttcttctctccctctgtgtgctgtgtcctcggctgtctcgccaccctgcttttcgccttttccttcgtcgcttcctccctccattcgtccgtctttctccctccctgttctttgtctgcgcgtctgtctccttctccgctttcgctgtccttttcgaccgtgcaacctctgccttttttcgaaga

SEQ ID NO: 1739 - DNA, 1237 bp, Toxoplasma gondii
  source 1..1237: mol_type = genomic DNA
gaaatctgaacaggctaggcctgaggaagagcgtcaaatgaaaagggtcgctctcctcgtccggagagagaagctgagagaggagaggaaacgaactggagagaagagagagagcagagaggaggaagagggagagattgaagatccagagaatttaggggatctgcggcgagaggaggtgagaagaaaagcctcgctgcggcgcgcaggagactgggcaaaggagttcggcggttgcattcgagaaggaaaggaaagagaaagaagtcagaggaaagctgagagaataagaaaaggaagacagcgaaaaggtcgcaagagaggtacgcaacgagggagagacagagggtcgtgaaacagtaggacactgaaagaaagaaaaggtcaaaaagaaaggagaagaatgaccgcccggacggccgaagcacggagacgagacacacgagaatctgcgacgaaacgcgtctcaattttgtgcgggtgaaatctgtaaatttggaaagaagaaaagtcggagacgccgccaaggtcgcgggggccaagcacagtccagtttttgtgaggacactcggcggaaggcgaaatgaaaatgagaaaactgagggattccggcttagcctcaggaagaggacagagcgaggaaacgaaggaagaagcagacgagagacagagaggcgaggagaaagaagcacgcgcgcaagagaaggatggggctctttccgcgagagacaggagacatcagtgaggtttccctgaaacgccgcgcaagcaatggaagatgcaaaaaaagacaaaaaaggagaaaaaaagagaaaaaaggaggacaaaaaggagacagagcagagaaagcagaagaaaagaagaaagactctgttgaaggcacacacagcgaacaaaagaggcggcggatgtctgtggcgctctggagaaacaactcgaggaagcaacgcaaagagaaaacgaagaaacgcaaaaaacgggtgaaagacacacggaagagttgcaagaggaaaagggagactttgctgtggaaggaaaagaatccggcgagcgcgcgctttcagcggttcgagcgatgctgaaaggaaaggagacttgcgacgaatgtccctgccagacacatcccattcaccttccttcctttgggagatatcggcgcggctttgcgaagagcaaaggagagaaaagaaagagaagcagagaaaaggagaaaaagaacttccgacaacctgcgcaa

SEQ ID NO: 1740 - DNA, 4317 bp, Toxoplasma gondii
  source 1..4317: mol_type = genomic DNA
aacttctttcttccggtgtctctacagctcgctccgttctgggtgcctccacctgcctcactgcgcctcgcctcatcgtccgcgccagcctccgagtcttcttccttgcatgcagaggccgcagacgacccttgacggacgttgtacgcgacctcttgtgttgccgcctctggtcgctgaccgcttgtggccggcgcgttagtttccgcacctgcccgcgggactaacgccgttgtttttatgcgcttcgttgcttcctccgccgcgtcgccttctccagtggaggttcccggagcctcgccatttctgtctcggtcggccgccccggatccgcctgcgctggcaagcgacaaggcgcacattttcacagcgtctgtttcctccctccgcgcgttctgcgtgaggcgctggaggatctcctgacgctcttcgtgagagtgcaggtcccgaaacatgaaggggaagagtcgattgcagggcgagtcccgcgaaagaggacgccgtttttgtcctcccgttctttgactgcgcgccttctgcgtagactccacactggtcctcggaggcggaagaagcttgaacataactgtgtctggagggccggaacgctctcccgacggaagcggcgcgacgcctcgacgcagacaccattccggagaaaacggggtgttgtacgtacacccgagggaaggctgcggaggcggcgcatgcgcaaccgccgattgggtttctgagggagcgcgactccgggagttcgcgcgtggaagaataccatcggccaccatgctcgtgaacgcgtgcgtcgagatccgagaaaagtgacaaatgcagacggaaaactctcaagaatccatcggtgcggaagggaagatgtgaggcagctggagcgctgtaaatcaactgcggccgcgcgcgcgcacacaaacgctgaggaaaaggacggcttcaaagaggaaatcgagcccacattcagaacagagagatcacagatagagatgaactgtgataaactccatacgtgatcctgcgtctgtgcagacgattcgagttccagaattgcacaactcaaaacgagccttcacgcctagatgcaggaagtcgtatcggcacacaacgcaacagagaggcgaacagttcgtaaaattcgttccgttgcagatacgcggagtcgaaacaagtgatgagcaaactgcacagacagggtcgacagtttttccacgccgattttcggatagaagcgttagacgaaaaagcgcgagagggtgcggacgccacgagctggtgtggtccgcagatcgcagaagaataagcctccagggacttttacttcacttcttgtcttctgaaattaggctcgaaaggcacgagaaacttcactttcgtggttcagtgcctgacagggaagcctcggttttgaggagacaccatcccagagtcgcatgcgcagaagatgtgcatgcccggagggtacctgccgacaccggatctccgtcgtgtcggaacttccttcttttctgagatcagaaacgagggaaaacgaaaaaggagaagacgcaagtatggacctctccatctcctgaatatccccggtcctttcctgagaaggcggtcagtcaactctgtgcactgctctggagttcggcatgcacgcgatgaaagggaagccggacgcacacagtttctcacggaaaagataaacgccgcggcgtctactttcgtggaagtttacgactggaaacaccgtcagatgaagattgtcttctccgctacgtcttttctttcttttcgtgtgcggcatgtacgacagactctcttcagtggcacccgtctagtaacgagcactgtttctaacccaggtcaccgcattgagtctgcgattttctcgggaatgtgttcaccgaagatggttttcgcagttcctttccacaaaagacgttcacgcagactgaaatggatgaataaaaaatccggagatgatgacaaaggtgagtatgcagggtcttctgtgctgtagaaattccctgcagagcgactgccttctgcagatactgtcgaattctccaacgccgaggatattccacatcggtgacggtatagacgtagtaagccggttgctgttatcccttgtatcacttgctactgggatatcgtacgacttttttctgagatggtcacagtaaaaagtagcacctcttcggaaagcctaaaacgaacaaacagctacgttgcgtgaagctcccacatgaatacgtctccacatccaactgaatcctcttaagtagatctgtgaaaatccagcgataggcgagtcactgttgatgcccatcgctcaaaggacgatccactatcagagcctgttcccgggagtgtttgcttcatgttggttcaaagtggatgtagaggtgctctctcggtaagctcgactatttccacggattatcgggtcttcgccttgtcgttgagactcgtctgcgttgcgccctcgctgaaaatgctctcgtatttgcagcggacaaaaagtctcggcacaaatgcagctatatcacacccctgacgacacgtgactgatacacgcgaagctccacttcttgttgaaaaatctggcaccgtcccccctctatcctccgtttgcagttccatctaccgaatgagttccacccacggaaaagatggacagacacaaatccgtttcgcgatttgactggatttgtgctggggttccgtcttaattcaaatgacctcactgcagctgtccccccgaactcatctttgtctgtcggggaaacgcggtcgcttgtctacttcttggaaagggcgcagctttccgagaatcgcgttcctccaccacatccactctgctgtagtgagcacctctttggctagtctctgcgaatccgagttaccacaatctggtgcagaacgagaaacaacatccgagtagggtcgtctgctctctattcagcctacttcaatgacggaagtccagagcacaaccttgtcctcaatcttcagtaccaacagtgaaatgtgcactcacggctgcctgaaaacatggatgttcacacccacatatttatatgtatatgtgtgtgtataagtccgcatgcatgtatctacgtttacagacgtaagtgaacactcattttcgtgcgaagtctgctttgccatggaagggacagtctgccgctaacatggcagcttacatcggcttagagtacgggatgtgtgtgaagtcagtgccgcctcatgtacgttgtgccagttgcacctctgaaggcattgtattgtcgagtaattcggagagttcccgtcgggcagaagagcacttgagctcttttctgtatcggcgccgcaccagattcaagtgacccaaaagacgaaaatccctcaactctgcaccgcaggcgtgaagcaacgattgaatcggttttcggagaagtgtggaagagacggctctttcttcctctctgcaccagagtctagctcgcgtgggtttcgttacagatgaacaccacgcggcgagttgcagcttttggagcagacgctggagtttcgagggtccgtccgcataccctcttcccctcaacatgtctgcagactcacgattgacgcagtcacagctcgtggaaaaacaacggaagtttccacttttccccgctccgaagactccagaccttcaggaaacgactccaggtgcaccagttctgcagatttccttctctcgtagatgccgaaatcccattcactgcggcatctggtacacgtctagacgtctagcgatttcttacaacggtgggccgcatgcacggtagcgtgtgtcgagtctggcgtgagtaatgtaactgctctagcggcgacgttctcccgaaaaaagacgcctttctccgtgaggaaagagtctcacagaagactcgaaccaccttccatcgccttcttaaacacaaggggtcgattcattgctcgtgacttaccattcttgtctctgcgcgtgtgggatactctttccgggttgcgctgcacgcgattgtattttctgtgcaccgtatttctcgtcgagtttgtattcgctgttagagacgggtttttttgtcgttccgaaaggtcttcttccggccgctgtatgctctgacatccgaaacgcgaagtttctccgcgttttccccagtcctccgttctgctgggtcgagttcgctggactgcgtttcttccccgttctcctgataactctgcggcgttttcctggagaattcctttctttcaaggacatcagtggattctgttgcgtctggctcgcgcattttcttttgtctgccaaca

SEQ ID NO: 1741 - DNA, 2775 bp, Toxoplasma gondii
  source 1..2775: mol_type = genomic DNA
ctcaggctgctcacgtcgatattttcaataggtgaccttgtgccagtgctgcgttcattggatatccagcatggtcatgcgatatgaaaactgcaggagcagttttggctgcttagtagtattcttgctgtgaaacaggtcgcctccttgttccgtaaaacacggtaccagagtacgaggcaggcgcctgcctgtttgaaagtgaaaacatcttgaatttgcggtccatgcagcgtttgtgcaacggccaattcgaattctttgtatttgtatagttcgtcctctttcgtttcaattgagaagaattttacaaaacacaggcacaagagccgttgtacaaaagcgatcaacctttaatcttgtgcttgcggctgcagaggtcatgtttcatgagacgatgtcgatacgtgagcttgcaagttatctttttttatgacaaccgaacccacgaattacatatttacccgagtttgagttgttgactgacgactatgggaacagtctcggtgtcgatcatgtgcctttacgcacctgctgaccacgcgcacgtgttttcgtatactcacccgtttgtagtaatattatcgttgcggaacgagtcgcctccttgtatacctatccacacttcggcttaaagcaatttgcctgcccccctttcactcttcacattcatgcacagatgcacaaaaataacgtttcgaccagatgtcaatcggttcatgcccccttttaatagacagtgactcgactgtgttcggcggcaattcagccgacagggcacagaatggtagacgagagatgcttcggcggatctgaagcgaagcaaacaccgttgttacttccctgactttttatttgtgctcactatcttctaactcagcaagcagaaaggaaaacattcatgactgagaggtttagccatactgacgacagctatgcaggtgtgtcatctgtctgtaccagtgtggtcgaggaggggggaccctgcaaaataactatactcgaaaattctggttccgatattaacaagaaactgaaagggcatttcgcactctgagagactgttgctcgtcagtttgagaccagactttctcccaatcatggccacccgttcttctgtagttgtgaggcttgtaatgatacacgcaaagcgcattctatgcagagaacaaacagctgacggagtgagcttggcacgttgctaaaaaccaccagtaacacaaacgcacgctggcaattactgaaatacgaggacttcaattttcagcggtgtcgtaccgtctttggcccttacatgaatcaggttttccggaagaaccgaagcaacagctagtctaccctacggggttacagcaagccgactgcgcatgtttcagatgctttcgtttccttagtaaactcccagtttcgttttgttggggtcttttggcgaggcgaaggaaggctataaaatgaggggcaagcgatggcgcatgcgagttcgtgggcgtcttactactcaactctccgcttttttcatcgtcctcaatcagcctgattcagcggcatggaacgggatcgtcagtgcgcaaatgcagctacacacgtgcgtacgttcgggttttcttgcacgtttcgaccttcctatacgccgctggggttgactgtacccctcttgcctttctagcagcctgctgccactgtaatatatgttaacgaaaacatacttgttgcctcagagcttgttggtgtttatcgtgtgatgaacgcctgttgccccccgctggcagactccaggttttcgcagcgaagaaagaatacagagcaaagtttttatacatctgaacgtaaagcttgtcagtgggttagctgctgtcacgcaataacttgcgcatccataaccagtcgtttcactgtcacttactacagcatttgaagataacaccacttcctgttgcagctaccatgcttctacacagcgctcaacacccttctacacctcaaggcagaccagcccacacctccctcccgctcaacaacgggcgtctgttggataatacaggtggtgtttgtcaggcaagcgaggagaggagcaaaaggaatttggattcgcttgcttgattaatccagttttaggaacgtgtaaatgggaatttcgcagtaagtgactcctgtatgtcgaatcgcctgggaacctaagatgaacagctggttgtgccgcggtctcctgaaaggaacctcctcgagagaaggcatctcttttgcgaggagctgacagccacaccgggcccgaattatgctgcacggctttttcgcgacgcatactattcagttgctcttccactcgacttccgcctcctgtctgcgacgtcaaaaataaattttctgcgttttttctctcttctttttggactgcgctgctgttggcgtgtcacttaccgtgccgcgtctgcctatgaggcgtccgtcccccaacccgggcgccgcagaattttccgcggcggcctcgtctgctctgtcatttcccttctgtctacgggggtagacgctccatcctttcacagacagttcactaggtcaatgttcgtttcctcttccgtggcggagacatctggtctcctttttagcgtattctgaacaggttgcgagccaactgcccgagcaacggcgtgcctgtgtcgctcatggccaccgcggagtgatttgctctctcgtgtcgcggctccctttgtcatgaagtgcttttccgcgcatttgtactccacttgtttgccgctgtatactgccacatcataa

SEQ ID NO: 1742 - DNA, 1809 bp, Toxoplasma gondii
  source 1..1809: mol_type = genomic DNA
tgagacgtcgtttctttgtgtctttgcaagtatactcatctacgatccgaggcacatcgtccgcgttgttgccggggaagaaaggcgattggtcgttctggcgaggggctcagcggcagcggagggggggtggccgatgaagcaacaattcggacttgtgcatggagtgtatttctcacaagtcctaagagaatgagaaatgagcagagctacagagctttacgcagaaccccactggaggaagcgatcacaagcggcttacagttcgacctgcgttcgcttgtcgagtctcacactggagcagctggttctttgtagagagcttcgagcgaaaacgacgaaaggagagtgtcgcctccctttgcctcactgtgctgaggaggatcggcgccgcctgaaactcgtgcggcgcatggccttcactggagtctcacggggacttcgctgacttcaagaggagcagcaaatcgctaaagacaacgaagttcctccgaggatggaggaagtaccgtagtgccgccggcactcacatggttttgggggccgggaaccaaaggaggacctgtttctcgccttctcggatagcctccctttctcgcctcgtgttctgacaaccctgccaacagccggttctccaggtaggcgaccgattctcaccgttttttttgaccccaggaggtccgcgtatgcggagagcagccaaaaaacgagacgcgagaagaagctgaggcttgaattgttttcttccgtcgcttggatcacgcgaaagccaagaaatgtgtggagtttcgagcagtcgcttctcgctgacacggccgaaagcccgacccgagacgctggagaagctcggcgggaaaaccgacagagagaggccaggaaagtggaggaccagtgggagaaaaactgaagcagcattgaaggatgaacgccggcaacacgcatgtgcactttaaatccgcggaaaaagcgtgtgcgaaaggatttgctcgaaaccgaatgcccgccacggtcaccggcttcgagctataaagccgtgaatggtacacctccctgtgagagcggtgagcgaacttgagagcgcctcggtccgcttgtccgccgctttcgccctcctttttcgcggctgttcgtggactgactttcactttcgatgtggagaggtccttctccgtccgcgtgtgtaacgacgatccagccgcaatctttgtttcgaaaaggctgcaccgggacgtcttccggcttcgcggcaacgcaaaaaactgcatgtgggcatgcgcatacccctgagacagaacacaagtggaattcgcggttggattcgcaacttcttccttgagatcgctcactgcgtgcccttggcgtttcctgactctcttcggtcgacgttcctgccggcgactcccgaggaatccggtgtccgcaaacacgatgggtgttgacccttctgcgcggcgcccgcctctgctggttcctttctccgcgcctccgtcgttttcgcctcgaatacctgcgcgtctgtccttctctcctctccagttgtttttcttccatctgttctaaagctgtgagtcgtcgaaagccgacagtctccgtcattcgcatgcactcgcgcaggctctttccccgtcttctccgggaaacgactgctgcctcgcgacacactcctcgcgcgcgctgctcacgccctttgtcttaaagcgccgttgtgattcggtcgcctcccgacttttccccggctctccatttgtttccacccacgtgtcatccgtcgcgaactccgaaacgcccaggagactcggcatttcaaga

SEQ ID NO: 1743 - DNA, 2240 bp, Toxoplasma gondii
  source 1..2240: mol_type = genomic DNA
agacagccaagtttacagggaacaaaacaacgagaaatggcgacgagtctagcgcacgaggggacaccgccgtctcgtgctcgaccccaacgaagggtcatcggcacggtgttttcccctttgaaaagcgagaaccagcgggagcggacaaaaggaaaatgacgccacccgggtgcgaaggtctctctggctcactggcgcttcgcatcctacacactcaccgatttgccgctgaggctcgtcgtcctcgtcgggagagctctcgcgccttcacttcgagagggaagagacgaaagggggcctgacgtctgcacagacgcgagactagaaaagtgcgaaggatggtctccgtgaacactggcggcggtgctgctggcagagccgtgaccggaagccgccgaggagagacccctcgagtgcccgagagccgtgaatcggccgccttccattccgttcttcatgttaggagtcttgacgaaagcgaggcggagactgagagacggctgcgagacggagcgaagatggcggagtctgtgacgaaacgcaagatgcttgaagaggccgggaaggcgccaggcgcgaacgcagcaggcgggaaaaaagtagcgttagacatgcgaagcatgctgagatggcttcagaaggttgagctcttcaaacggagaggcagacacaaggcaccagtgcggagaacatggaggaaaaagagcatcccaaacacaggaaaaaaagtgggtggtgaagcgagtactcgcagaagaaggcggaaaactggagattcagaaaacaggaacaaagtagaaccacccctgtagcagccagacacagagaaaagagttaaaagagaggaaagacggaggaatacagacggataaacgaatcggagagcgggggggcactcagcggctcaggaagcgacggtagggggacatggagacaaggcgaggaaggagtcgacctttggaggtgagagcgtccattctcacggtttacgctacaaagagatttgaaagagtaaccgccaacacatgagctacaggaattgattgctcgcagaaacagaaggcagtgcggtgtcgaggaacgtgggtgcacgtgaaagaagacagtgctctcgacgaaagagcctaggaaggctgccaggaaatggctttcataaacaaaaaggacctcgcggcggtgcggaccggatcagaagagggggttggactttacccagagtagagataccgttggacacgcctgaagtctgatcaaggaatagatacagtcgaagacagcagaggaaaggcaatgtatggcgatgtccatttgcctccactgacgggaaaggcaagtgctggcaagaactgtgaagtttcgtcctgtttgcatctctgccgccgatcttgtgtacgtctgctgttaattcatggcgtccagtgcacagttgtgactttctccgaatgtctggctgttttgggatttacgaagcaaaacatggttgtttccaccgacactgctgaaagagaacaccgtaacaaagccagcactgtgtgtcttgtgaacctgcgtggcagacaaaaactccactactccaccagagaaaagccgtcccgtccacatgtgagaagagggacaccgttaacgctgaggccggggaaacagaaaacagaggagctcgggtcctattcaaaaataagcgttcagacggacaagacaatataacacgcgtcaactgccccggaaaatgcgttcgtgctggcgttgctggaacactatcgaactgaacagtggccggcagtgtgcggaggttagcgtcgccaactacagcgtggtggcagctcgctctgccgctcgcgagtgtgctgctcaagcggctcggcagagaaagggacctgaaatagacaagccaagctgtgtagctccatttgcacaccgttctccgggtcacgccgaaagacctctttgaaaggggacgtcttccaccacgtgatggacgcaacagtctgtaattcgtcttccgtgcgggcggcggcggaaatcggagtttcgtgctctgttttgttttgtaaatgtgcccagaagctgtatttcgcagagtccggcagtctatcgccgacgctggtctcaaccaaattggtgagatcaggacacactggttggtgacggtccagtggctcactgtatcgtcattcggcctgctcaaagagtggcccgttgacaaagcatcttcggtgaggtctcaacgtgttgaaaga

SEQ ID NO: 1744 - DNA, 2646 bp, Toxoplasma gondii
  source 1..2646: mol_type = genomic DNA
gcaatggacatcagtagggatgtagacatgtagaggcagaaatcgtggagacaaagagcggcgtaggtccataggtgttcttgtgttagttgtttattctgttttttaagcgccgagatttttttccttctgggtgttgttccttctcttgtccactttacgcgataactggcatcgtgactctggaaagacaagaagtctctggtacaagagtgaccgcctctgcttgtgactgtctttgcctcggtccaagcaacatgacgattgtggtcaaacgggtaaactgcggcccccctctctgtctgctttctgcgtggtgcgaactctctctccctcttcggcactgccctccggctgaggacccgcagctggggatacgcatgcaccactgacgaggtgtgttgcttttgtaacagaatgaatgcggcaatcggagatctgcgtctctcctattcacagctggtgtctctcctttctgtctctgctacgttgtgctgccggagaacgtacactgaactgctggacagagaatgatttgttgcttaaagactaaaacgcgcagtgcctgtaacgaacactgtacctacacagatctcgtgtaggcatttccttccgcagttcacacgacgactggtcttgtgtttgatgccgctttctctctcactcttttgcgagattcttctttccccccaaagcaggtagcagcggacgtggacatggaacagacctgtgcttcatggaggcagacccaacaaggaagcgatggcaaatcactcggatgacggtgatccatcgctccttcttgatgtctgaagagttcacctcggctctcacgtctctcggcgagcgtctaaaccgacttgcgactcagatgctcacgtggaaagaactattccttgctcggctagttcttcactgaacagtgacattcacacctctcctgtgtttgaaacgcaatacatacatgcatacgtatgtatatagatatatactgtatgcatgtctttagaaacaaatctccaaataagtagatactcgtattactaaaaattgtatacacacatgtctacacatgtctttatgtgcaagtcgcggctgcggaaggaggcaaagtggacagggtcaagaagaagaagcggagcggaaatggcagagtttccgtatttcaaactcttgaaaatggtgaacaagaatggcagacaccggattcttccttcctgtgtgtttctccttgatcctaccaagcagaatacatagaactctcaactctcttgtctttctactttcacgagagaaaacatcgtccgtgtcagttgactggtggacatgcctaggaaaacttttttttaaattccgtccttctctgaggcccaccaagcgcggccttgtgcgcggggacccggagaaggtcggctgtcgggtgtcactttccgattttcttctgtctcggtttcttcgcagcctctgactctctgttttcgacagctgcttgtaaatctcttttctgagtttccgaggctgggccatttgccgctagcgaggactggcagcgcagccttttcttccgacagggagagagaggagtatagggctcgtttacggcgacgagctggctggaaggtgtgctctcgcgccctctcctttctgggaagtgaggacttctccgttgcatgcttcgcagtctttcgactttccaagttcttctcgttttgtctctccacgcactgtctgccgaagcaaaagcggagcgtgcatgtgttagctcaccgcaggtaacttgcaggtttcttcgcgtccccctttgcgtgtctgactggggctggagaagagggaaagctcgcgtgagcttttttcagcggtgacttcctgccagttctcccgcctttctgcgtttttcttgagcctttccaaatgcacaaattcgcctttctccgctcgagacagctgccgccgcgctcgtttctgaaggccaagaaaaagcgaagaaagttgcacagcgcctcccctttcccgcgacgcgtcgctcccgttcttgtctttttgcctctgagtttcgccttttccttttcgtcttccaaacgacgaaacgcaacactaaacctgctgtgtccagaaaccgcctagagatctacaccttcgtacacctttgtctatcagcgtcttcggaaatccccttgcgcatgtatccacgtagatgcatgtgtcttggcggcatacgtgagaaacgtctgggttttcccgcttgtcgaaaccgagttcccttcgcgcgttctttctcctgaacgcggacaactaggcaccgagacggtgcagagaggacgcgaaagaaagccaccaagccatcgccagcggccatacacagcgaccgcgaggggcggcccagaccgaggaggcggcagaaagaaaaagagaaaaggaccagcaagaaatcgcagacgaagagagcgaaaatgccatgtccctgcgccggttcttcgatgggccgacggttcatcgggtaaactgcagaggcctctcgtgcggggacgccccgtcgcgaggcttctgcgtttcttcgatttgaatccagtggtgtaaggcccagaggaggcgagcgagagaaagacacaaacaacgaaacgccggatctaaagacgtctgagacaa

SEQ ID NO: 1745 - DNA, 2142 bp, Toxoplasma gondii
  source 1..2142: mol_type = genomic DNA
cttcgctgtctccttgtcttctccactgtctcttgttcttcttgctcttctgggtccctccaccgagattttgcgttttcccccaacagcggtcttctctcaccttccaaagaagctctctctgcgtcaaaggagctgcagagtccgacgacccaggagcttcgaaagaggagcctggcgaactgcgaggagacacttggccggacgctggatgtctccccgctggggggctggttgtcctttcctcctccgtctctcgcgccccttcggcttccagacgactcagaaggtcgcgaaaagactcctgggttcgcacgcgagaagaaagagagcgagaagaagaagaagagtggggggaaggaagtcgaggcacctctgtggctgcaggaggctgaaaggaaacgccaggcgaggacctcacaggggaagaaggagggagagaagccggggaacgcggcgtgagcgcagagggtagagagtccggaaagaggggagccgaggagcgtcgagacactgaaaacgagtatacagaagaacgtcctgtcagcgaacgatgaggagacactggaagcgaagcgatgaaggaggcagaagaccggcgaaggacaggtgagaatgagcaagccgagaaggaagggaagagtgaggaagagaaggaagagaaggacgaagcggaaggtgctcgaggcccagaaaaagccttccttctgcatgcacccctcatggtctctcgtttcttatgaagataaaacgttctttcttccaacgacgagaataggacagggccaaggggcaaggcacgggtgacgaagggaagacagagggcgggacgcgaacggcgaggagagaccctgagccgaatggagacgctgcagagaacaaggagacaaggggagaacggaagacacacagaaaacgaaatcggaagaagggaaagagtcggctttgctgttgcccgcggtcgagctgcgaaaacctgtgcagggagaccggacggagagcattgaaccagggcggatttcagagtctctcgcgccactggttcgcctcctgtggggtccagaaggagacagtgagagccagaagcgaatcagcgggcaaaagaagaaaagcaaacaaagcgacgaagtggggacccagaaacgcgaactttttttttccgcggggcgatggatcgacagccgcactatcgacgctttcgaaaagtcgggagatcgagagaagacacacactgcagacaggggcacaggcgagaatcgagagcgtcaatcttctatctttagatctcttatgtttctccctgtccaccgttgtttctcttgggcgctctcgccttcttcttctctttctttcagtcctccttcctatgtgtgctggggtccccatttttacacccaggtctcctgcagctgtgtctataccagcagctggtctctctcctgggcctcctcgcgaggcgcaccggggcgagactcgtgagtcatctctgtctctctcgggttcgctgttcttctcccttcctctcctgcgtgtgcacagcttctcttctctctcttcttgctctacctctcgtttcctcgcttcttattcctgtcccatgctccatccgcggtattccctcaaagggagacctatctgttctctctccatcgtcttttccatgcgtgtacgcccctatccgtccacggtctccttacgtctgtttcgcatgcctcgcttcccgtgaaccctgaaggccttccgagtgtattcacttctcttcacctgcgtcatgaggcgaaaaggcaggtttcgtacttcgactacatttcgaggaaggccagcttcctggtctttctgaggcgcaggaacgcatcgaagagcaaggagcgctaaatgccctaaaatcccccttgaccctgagttgcatcggagagggcgaaccaggtaaagctctccggtcctgttttgctccttctcacggcggccctgtctttggtccttgaatcctcttttccccgcgctctcgactccctgtcgtgtttcctttcgccttcctcttcgcgtctcctttttctccagcggttcttctccttctgtctcccacgcgctcttctgcactgccttctcgtcccgcactctcgtcgggagcaacggcgaaga

SEQ ID NO: 1746 - DNA, 2333 bp, Toxoplasma gondii
  source 1..2333: mol_type = genomic DNA
cttacgcgacttgccgtacaccgggaagaaaccgtggatatatatatatatatatatagatatatatgcagaggggagagagagagagatgcagagacaaacacagacacgcgtctataagctgtgcttaacaagcaatatggagacgcatacagagagaaagaagacagaaaatgtatgtgtccacgtctccgcatacaaatatgaatacatatatatctatatctatatatctatatatatttgtatatacagacatacatatttatatatggatatatatatatatatatttatgtagagagagaccaaggcaggggcgatacgtgtttttcaatgcccgcatacatatatatatatatatatatgtttaagtgcatagagagaggtagatgaaaacgtgtgtatgtctgcgtttgcaggaaaaagtacgtgacaacatttgatgagagagccgaaaaagatggtatttttttgattggtgtgtccgaatgccaggcagagagagaactgaactagtctcgaggacatgcaacgcggttcgtcagttacggtcgcgagtgcggcgaagttccagctcgtccgcttcttcgtttaagaggaaacgcgagtgcgccttgttggagcagcgctccactccttcgtgtctcttcttgagcggcaacttggctgagaaagtagcttctcaaaggcacttgcatgcacgcaaacgatatctggagtttttacacacttcatttactcgagatctatgtactttagcagtgtgtctgctctgtattctttcctttctctcggaggccagacggctccggtgacgcgatggggaggtccgtcgacaatctctcgtttctcgtgttccagcgacttcctcagattatcacgctggtggacggcgcgaacagagcgcttttcgtttaagtctttctctcgcgcgttctgcttctctctcgacagagagcctcgttttctctcgcgcataaacgggtgtgcgcgacggagacgcaagccgtcgtgtttatgtgcagctctggggggtttcgcgaattcaccgacctctgaagcggcgttcgcactctagatttcttttcttggaagcatcggcgaaaaccttagtggaagacagagaagaaggcaaaaaaaaccaactacgctgcccccctggctgctggagggtcgacagcgcctcgaggccggcaggagcggcgacgcgtgaggtgcaactcggcttttcaggagatgaacaatgcggcgaagcagataaaggaactagaaaagaaaagggaaggtggagaagaaatcgttttcggatgtcaggaagaagcgtagtcacggcagaacgcgtatctcccacagcgtgcaactttgctccggttccaaaagacaacacacattgctctcagttttgctggcttgtcgcggcttctccaatgggagagttccggcgacgcagcacgaaatcaacgacagagattggtttttgtcttcgcgaaaataagagttcttctgtggacctcacggtctccgcggtggagagcggtcctccgaatgggttcagctcaggccgatcacccgcggtcagaaactctcaaatcgacggaggctggttctctggaacgaggaacaacgaagagtgcgcctgtttttctgtgcgagtgtctgcgtgggtgtcgcgaccccgaggctcgcgtcagccagagttctgttgaataagcctctggaagtgcagaactcaggcgatcccttccggctacgatacgctgaggtcgagaaggacgaacgagacgaggaaaacgacgttttcagacatctttgaggcctccttgactccgcaagctggccccgaaagtctcaaacagaaaggccgacgtgactgcgacaagacgaggctgtgcgtgctggtgaaacctgctcgacttctctcctctctctctgtggaaagagagagagctcatatttccagagcaaaagatctccgcgttccctgccttttctgctctcttcgacgctttactgaacacaccggaaagcgaccggacgaaagacgcgtctcaccgcggggtgtatgtacacctcctcctgcgcagctggcgaggcggccgcggttgcgtctcgactctccccaagactcgaggcgccgtgtgtgtgtttgtgtgtctgttcggtgcgtttgagttcgactttttgttgctttttcctctcttttcttctcgtcgccttcctggagcgccacaccgcctgcaaaagcgttcctcaacgttcttcgtctccccgatactctctgtctctctgcctctctgtctctctgccttgtcgccgtccaccctgaagca

SEQ ID NO: 1747 - DNA, 2016 bp, Toxoplasma gondii
  source 1..2016: mol_type = genomic DNA
gaatctttcctgcatgcaccagcttctgacgcgcggcaggcatgtgaggccaccgctgttccaccttttccttcacattcaggactgtctcctccgccccgacctcgagctccgcctcctcattgctcagcgtccggatgcgcagcttcattgtcgctcgctgcctctctgtagacatcaacgcaggcaagaccttctcctgagagctgcgattcgtctagccgcgagccaagtgctggacgctgtgtgaagacagttaacgacgcaaactctcgactccacacaccaacgttccaggctgcgcctcgcgctgtctagagtcgagtcatggccgccacaggctggggaacggccgacgacaacagagcgacagtgtccggagagctcaggctctcgagtccagacgcaaagtcgcgcggtggagagcgattcgcagaagctgaagcaagtcccggaaaacgaagaccctctctcgatcgccaaccccgggtagatgtttcttcacaggtgtacgcggcgttcaactaatcggtttctacagtggtcatctgaaaaaaaacacccgacagcggggactcggtggaacgaagaggttctctgtcccgacaaaacaccgccccagccgaggcggaggagtctcagttcgccgaaggctcacgcgaagtcgaagaaagcagattgaagaggaccgttttttctctggatgtgcagacacacacagagccgtggacgcgacgaggagaaacgcagggtgcacaggcacatgaaaaaacggatggagttccgtgctgtttccggacgtgcgtccaccgaaggaactgcaaccgtaacagtctggaaaacaaaagagaaacgcgaaagatgcccgcaggaacaagttttcgaacacagcaccacagccacctgaggagacagacgagtttccctggtcttctggggtggtgcggagcatagaaagccgggacgcgccacagcaggagtatctgaagaaacagctgccgccagggaaagactgtttcgttttcttacatggcgaagattcaatccacacaggccgcggatagaccgtaaggctgccgcgatctgcgaaagaagaaacggagggcttggaaaacgcagcggccgcggtagacacggagaagttaagagaagatgaggactttgttcgaaagaaaagggatgatacgaaaagacagcccagtcggctgtgaaatctttgcagcgcgtttttgactagaagccgcagagcgcatgtgaggcgaggctgtgagctttcctcagaaagtctcgaggtctttcggaagggtttatcacgaaaatctgccgccttctcggaaactttcctcgaaacgaaaagcacgagtctcagccgtcctgcttagaccccgtcgagcgaaacgaaccgcggaagtcgcccggttcactctctcgctctcctgggtgtattgccgctcgcgtgctagcgcgaaaaagtcgcatgtgcgtacgcaagccgtccgcagtagctgctgaacaagtgcatctacagagcatttttctccacttacaccacttgtccgccgcttgtaaacggtggtggcgtgagtctgaagacaaggagggcctagatcgccagcattcgcggtttttccggcgttgccacaagccatggatgcgcgccgccctgatctggtcactcgtcgcggagcataaaacggcacagtgcgacgtttcggcgcttgacggaatcgccgcgtgcgactttgcgcatttcgcgcggggatctgcactcagtcacgggaaaaaatcccgaaaaactccgggagacacgcccgtcacccaccgtggttccccagacgaacgcaccccccacacgcgcgcgaacactctcgcgcaagtgaattgccgagatcggcggacggctttttcctgcgtttcgaggcggccggcactggattcgctcttctgtttcgttgtcgttgtcgcagtcgctttccgtgtagggaaactctctgagctccacttcctcgcgcaaaa

SEQ ID NO: 1748 - DNA, 3713 bp, Toxoplasma gondii
  source 1..3713: mol_type = genomic DNA
gagagagagaagctgagggagagaggatccaacgcattgcaaggaggcgagaggctggactgctggggcaagatgcaaacgcggaagagatccacacgacggatgagaagacaaaggagggcagaggaaacaaggaaagaacgagacaaggagaggaaaacgacgaatgcgagagagaacagagacgagacagagagcagcgtcgtgccagcgagcgggtccgcggcccggctcagagaaactctcgaatcgaacgaacgagactgcacctccacgcgaggaggcgatcctcgcggactgcgagggggggagacgcctcgacaggaggcagaaaagagagacgatagtccggaataacgaaagtgatgcaagcagccgacagctgacaaggaggagaaagcaggccagagagcaaaaagacgacggccgcacacaggagaagagcggggcgatgcagttaaaggttccttcgaagaacggacaaaagaagaagaaacgttgctttccaggcaaccaatgtcgtgctgccgaagcggcgaatgcgaagaggcctgcacctcaatgaggtgtgcgtacacccgatatctcagcgagatgcgacaccaactgtcggcgttccctgccggctgtaaagttgcatctgaggaggaactcggaagctcgcggacaccgggagaagaatccaattcatggaaaataacttctgggctgcaaacgtccaccctggacggggaaaggggaacggcgagccgcggcgaattgccgctctttcggccagccgacgaacaatcaccccgaatggccagggagaagtgtaactcacgcaaaaatcctttatctgcgtgctcccgacaaacgcaaagaggcaatctgtttctcggggttactggtttcgtttttcattaaaacagtcccaaacgccgcggtggctgaggtgtcaatactccccagcctttttctttctcgtgcgaagccgggggtccggccgagagctcctcctgaggcagaagcggagaaaaggacgcaacgccttgtttgtgtcgtcggctgcctccaacgggttctgtttgttctgttgttttggttattgaaaaaaaagaaaaatctcctcgcggccctcttcgctagagagggtgtttcagtgacccaactgtccatgcgctgtccgggccgagaaagagagcaggtttcgcgtgaacttctcccgcgaacaggacgggcaagacatcggaaagtgcgagcccagtcgttcctttcttttggaaagtcggctctagttagacttcacacatttttcctgagaacggcagctgcactgtccaggcacatgctgcagggagcgcgagagcggtcctgtctcacgctctcgctttccgaggtttgcagtttccttctgcggctgtcgaaagaaggcgaagcgtgtggcaaagagacgatcgagccgcgggagagaccgacgcatgaattgaaaaaatttgctgcgtttctctgcgcgcgcgaaaagccgggaagcaagccacgacgcagaagagagggagcgcacagctcagtgggaggcgacaccgaggaggagagcctctgcggtcggccgatgtgcagctgagtctcgtccgtcacaccctcccctcgtcaggaaattctgagcatctgcctgtgtgccgcgaaggactcaaaaagactcaacgcgttcgtcgatttgctttgtgcagcgatttcgcttctccttcgttcctgagcctgttttctcgaccggtctgtacacaccgctgcccccggtctcgcgtttttccagacctcgaggcgccctgacgcttcttccttttgcctgcccgttctgcggcaaagaggagagagctgaaaacgcgaactgccgttttttgtgtaggcaggccttcctgcatctgagcgtctgtcgccgaggcgagagagactcaggcgtccgcagaagcctgcagactctcgccccccgaggccgcgcctcccttcttctgtcctcccgctcctgagtgcaccgctgctaccgctaaaaagttcgtctgtgtaaaatgcgagtgtgtctgtgtgaggctttgtgtcgcaacagaacgcgtggagtcgaggaaggcagcgacgagagaggaggacaagagagggaggaggacaagagagagagcgaggtctgagggagcatggtgtgagtgtgttgtcaaggcaagagagcgaagagctgtctacatacatttgtgcggtttcgttccgcgaactgaaagagaggggtgagacagagagagctcgcgttcgaggtaccgctttcctccagtttgccgttgtttcctcgcggagagaaagcaccccagcaaaacgctttcacccgactgtgcaagccgtttttggatttctctgccgacactgtgttcgactctcgtcgccgttcttcttttgaggacgagagcgccgcccagtcgccttcgtttttcgctgccctgcgcgcgggtgcgtgcgaggcgaagaaaagcgcgccgccgtacatttttcctacacaccccttgcgattgccgtctttatcgacagcgaggcaagggaacattgcgtttcctctcgattttcaaaatccgtaggttcttgaagagttccgacacagcagccggttcagagtttgctgcttctccgtcgcttttcctcccgaggacttgtcagtttctcaagtccgcgcctacgtccccggaggggagaagctaaggcaagaaaagacaagagcgaaagcctccgttttcttccgcgcgcgcgcggcgggccgtctttgcgcggcgcgaaggccgtttggaccgcgagaaaaaagtcggttcgcgttccaaacgccacagtggcattgaggagggacatggccttggaaagaggcactgttcactggcgacgtacgcgagaggaatgtgtgaaggaaggcgagcaaggagagagaacgcagaaggccggtttctcttcgcaggtcaagtgcttcgcttctctcgcgtcttttcttggagttgcacggaaagaaagacccgacaagaccgtcgcgaaactctttgccttttcgcaggacgccacgctgcacactctggacagctgctctcacgccaagtttacagacgccgcactgaagctttttttccaactttggggcggttgttccttgttctttcgcggacgtacacggacaagacgcgactggttcggaatttgtctctttcggccctcccttttcatgtctttcttctgtcagcgtctctcctcaagtgttcaccgcactcctttttttgcatgctccgtcttctgctctctgcctgtggtgcaccggaagcgactgctccgtcgtttcgtcctgtcttcctggccttcgaactctccgccgccgcgcggtgtctcttatcggcagacccactgactgcatccccgtctctctccgctcctgttcgcttacgtcctctctcctctctcctttctgcttcctctctctctctctcgttcttcccctcggtcgtcttctctctctccgctgctgctgcctccgcgctgcactgcgtctgccggctggagcgcgcctggagaccaagctgaaagacgcaggtcgcctgtcactccggagtcagctctcctcgctagtgaccgccagcttctcttcggtctcggcgaacggcgctcttcgctttctgccttccctctcgccttctgccttccctctcgccttctgaaaa

SEQ ID NO: 1749 - DNA, 2173 bp, Toxoplasma gondii
  source 1..2173: mol_type = genomic DNA
gaagcggcgaagcgaatcaataaatatactaaaagtgcacatctgttggaaacagctttcgcttcgtcgtcagcttctctgcgaggactgtgtgtgctttggacctctgtctcccgctcctctaaagctctgcagaaagtgatgttctgcatggaagtcttctttcgaagctcacatggtgtctgtacagtgccacgaaccgctaagtagttcgaccgcgtctgtcgcacgatagacacatttctcctcctggtttccttgagtgcgtttctcttttctccgtctgaagtgtgagagcgaggagcagaaaaaagcagagaacgagaagccgagacttcatctttctgcattgtgtactgctggcttcagacagtgcacaccgcttgctcctccgtaaatctgaagaaaggtaatcacgtgtcagaatcacctctgaaaaaaaactagttcatcggagtgtttcctccaagtctttcctgcccattcagcccagtgccgcgtcggcgcgtgctgaatctccgaaaaataaccacggcaacggcaaaatgttgtgaactgcatcatcagataattcgctcgtttctatgttcgtgacagaacacactttgcgcctgttctacagatctgcaaaaacaatagggtgcattgcttgtctcctgactctcctgtatcgacagcgtgaaggctcgaaggggcttcctcgaaagccaattcttaaagaagagtactgcgttgcctgtttagcgtaacaggtatatcagctttccattttcgtctctcagatttgggccaaccgactgtgcgggagacgcgaactagcgcaaagtctactcgggctcagcgccagtgtctctgcacacgcccaatgcttgtccgcagaaaaaactgaaaaaagtcgatttgtcgtgtggtgagccgtgagcgtgttaatctcggttgtgtcgcgacctcgctgagtggccgggagaatctgagatgctgcttggcggcgaagtgcagattctgaaggagacgatgtgcggaaacctgagcacatgatctgcatgcaagcagaagcctttcgctgattcacccctgaagatcgcgacacgatgcgccagcctctcgctcttcctcttcttcactcagtaggatgctataagggtccccttcggtgttctagggcaccgtcctgtgtgtcctaggctgaacgcaggaataacctccttctctgaaggcaacagtgagattcgcatgtgccacgagctggcgcgttcgaatggcaagctcggaatgacagtttttcttgttctgaagagctttcgagcctttcgtaaagacgaccgacacggcgttctgctacttagctcgccagacggacacacacacacgcacagccggctgttcccgcatgcaagcgggaaacgggttcgtcgtgttggcgcgctgcagaaagggaaaaagccgggatatgtccggttccgttttccaggatttccccgttctctataggtgtgtcttcccaattgtcgtgtatacagcgcctctttttgcaatggcgtgaaagccgagcgcaagttcggtgctgcgtccaagccaccggtttccgttctctgtatgtacacccgaacttttacacagcatttcacggagccggttccgttctgtgtcttctagcagcgttctgaattcgtatcggtttgcttttccgctggcttcgtgcggaagttttctctttccctctccacacgtgcggcttgtctgcgttcttgtctttccatttcttgtgccttggtggcggaaacgtcgaaccctgcgtcgtcgactgcgcggccgccccatggctcttggtcggtgtgtttcttgtctcattcattccctttcttgttgattgtcttttcccagagcaggaagaagatacgtaggggcttcttcgtgtctccgggtttctcctccgcgctccttgctcgtcgagcgtgtctcgtcccggctttgtgtgtcttggctacctgatctccggtttcttccggttctcagttacgtgaaggcggaccctcttttcttcgttccccgtcgtgttttgtatttcttagctccactaacccagatttccatcgtgttattgcagagctcgcggcttcgcgccacctccccgcccgtgctgggtcggccgtcagaaccagccccgcaaaaa

SEQ ID NO: 1750 - DNA, 1676 bp, Toxoplasma gondii
  source 1..1676: mol_type = genomic DNA
aaaaatgccgcagaacgtgcagctgtgggtgaagtcgtcgctgcgccctgcctgcgtctcgcgcttcttctctgcgcggcccggcctcgccgcctccgcagactcgcctggaccgaccgatgcgccaccgctgctgctgcacccgcatgattgtgtcgcaggggacagagacgagcagcacgaagcggctgggcgttccggcgctcccgagctcgcagaggatggagacgaggaggaaggcgcttcagcggcttcgcgcgacacgggaggctctccgtcctttcctagcagtgcctgctgggcaattctgtccatcgtccacccgtgatagagagaggcgtaggagacgacgtggagaggcaagttgtagacctcgctgtttcgcctcacagctgcgagcgcatggtctctgtaccccttgatgccttcgtcgactgcgagcaggtggagagagaggccaagatcctcccgcgcattcagcgtgtggaggacgtggagcagcaccgcagagtccttcccacccgatacgcagactgcaactttctggccccgttggaagagagaaaagcgccgaataaaggccgagacgtcgtcctcgaaggctcgcacgaaacatgctcggcaactgcgcagtcgagacgccacgcgcagcaaactgactcgcggagacccgcagaactggcaacgcgaaggcgagaaacggacagaagacgcggaagagaacgaagaagaggcggaagaagaagaagagaaaccagaggaagaagaagaggaggaagaggaggaagaggaagaagcgggaaagggagaagaggaagaagaagaggaagaagaagaggaagaagaagaggaagaagaagaggaggaagaagaggaagaagaaggggaagaagaagaaagagcagagctagcatgcaaggaatccatggtgagagaagataaggaagagacaagagggcgggagagaacagctggaggcttttgcgttcgttgtctttcttctcgtgtacctgaaaagacgggggagggagggtgtcgtagtggtttctcttgtcgactccctgtgctcacatgcgactggcctgtttatcgccttcccgggaacctgactctcaccagttccattctctgtcgccgttcgtttcgctcctcagaaaagggagcgaaaaatttcctgcttccagagatatgtggggggaaactttctgccacagtggtctgttttcttcccgagaaattcagtcgactgcagtgcatgcaggcgcagaaaatcctttttttctgaggcacatgcacaatctctcccggacgtctgagatgatttttccagtgaaggaaagccatctttttctgtttctcttgtaatccccgacttgtttttttccctctggatgcagaaagaactctcttcgcagacacgagacaaagaacgtcccctctttttcggcgacctgtgcatgctcatcattttgcctttctctcgttacgcattcggcctcctgcaacttttccccaaacattcactctctgcctggtttgctcccttaaacccggaagagattgtgttcttctgcttctcttctccttccttttccttttatctcatttgcctcgcgttgtcagctgctcggccctcttcactttctcatcgtgtcgcgtttcctccgttgcctcaa

SEQ ID NO: 1751 - DNA, 2988 bp, Toxoplasma gondii
  source 1..2988: mol_type = genomic DNA
acagtttcccggtactttcatgtcctctacacgtgatctaaatgcataatggaatacttgtctgatgtgacaaccagatggacatcatggaacggcggcttccgactaatgtctcgtacctcgttgttgtgctgctgtgcgaggcgcgcgtttgccgccgaaactgccggcgctggtaacagtgacattctgcatcatggaggtagcgatgagctctccggaaacaatcggtcccagatccttcaaaatcgcttgcagcttgcacacggccacctcatgcttgaagacgctgcaggcactccacactccaggtcgtctacctgtctcagacccttggctaggacccaacgagacggtattgtacagcgagattagatgcttcataatagacggattgaaggaaggaaggttggccgaaaaaacatgctttcgtgggcacttttggaagatttcgccgagaacaatggtctgcgaacacattgtaaaaaaggtggcattactatcaccataaaaccgatcgcctgtagtgcacgggaacacactggtgaagaaatggtggcaaagctatagtgttggatccaccaattcagtggcacctatttcttgtactatgcttggcaacacgttcgcgtggccatacaacgcgcatatgcttcaagaaaactcacatgcgagtcttcgggcagcactaggatgaatgcatcaacatcatcgcgttgcaacagagcatcgagccccgtctctcctgccccagctcgttgtacagcagaaccaggtcgcgtgccaatgccgcttaaatcgccggtcttttcccagtaagcattcaccgtgccttttccgttagcggtcaatgcctgtgcgatatcgagggattcgctcttgtcacgggaccacgcagcaaccacctcaaatgccgctgactgtagcagcattgccgcccaccaagtcgtcactgttgcagaagacaacagaaaaaactgtatcaagtactctctgctcttcaatgacttgcgagtttccgtgagacactacgtggcacgcttatgcatatccgccgcgatcgagaaatggtcaactagttggctggttggtcagcgtagcaccttggatcagttatgcctgcaacggaagaaaactgaatctgtattaatgagagtccagagaccgccccaggacaaaatcagtagcttacctgcgttgccttcaccacatagggcaagacgcagcgcaggcaacgtcttgccgtccaacttcgcaactgccatctcgagaacggtgctgaaacgtcaaatatgaacgagaggccgaaacggaggcccttcttcctgggaagttacttttcgtcaaataactcaatccccttttagcgcagttagaagtttaacgactcctgctagcccccacgagagaccgagcgcgccgtgtacagatcgaagtccgtgtcgcaggtcgagaggtgacgcagcgtattgctttgagactacggaatttgaaaggccacacgtttgctgaatacagataacccatgacgcatatttatgtctcatgggaagaaagaccgtagaagagaacgccacgacaaatggtttgcatgagttcacagcgggagcaccgagcaagacagttcctgttctctaacacacagcggtgctgcctgccttgcgagtcggctgcctagcggtgacctggctccccggaaggtcacggggaagagacacaacaaagacaccaaacaaacgagtgaaaatagtggcacgcgaacgtcttcttaaagaaagtcatccctactgcggtggcgactaaagcactcagttgaaccaccaccgctccgtgccaccccttgacacgccgactgcgcatgagacttggaggcctgccgtcaagcttccacacaacaaacgcgtcagccagcgcgccgatggaacttgttcatcacacacaaacctgtaacatgccatatgaatactcagctgaagaaaggattgacaaaatatcaccctggatgcaaaaatgccaaaggtggcagcgttgtttaaagtcaagggcgcgcacggaattgaaccatgaacctgccgatctgcagtcggccgctctaccattgagctacacaccctgcgactgtgctcctacgaaaagtccagcagttgaatgaccagtctactagcatgcaacgtaacagctggtaccgggcaaaaattgtactttgtacgtcaatgacacccacagcacatgcatctgacaaggtctgctctgtcattgtgttcaaagtggaaacgtgagatatcagggaaaattagaaaccgtgttagaggcactgctgaatcatgggtcggttcctcacgatatcaaccgaagaaggctgggtagaacacggagtttgttcgcctgctcgtgagagtgtagtcgaatacccgaataccaccactgggaccaggccgaaatgaatagtttattcgtgcgctgtatgcacggaacacacaattggcgtcgccccaattgtacccaatgtgagagtacttgattttatcagtagagattgttccgtggcgaggttctaacaagctagatggatgattctgtgagctacgctgtcgaaggtctccatcaaagcggatctttgggtacgttcacaggctggacagaggatgttttccgacttgccaaacagtgccatacgacgcatgaaacaaagtggcggaccacggaaaacaaaacaaatttcttctactgtctccctgggcataggcaccgaaagacaagacacatgccagcacgaagcataacttgcttgaacagccaacttagcttgcgtgtacatacacggcaaatactgccatgacacaccggtgctactcgccactcaacccaatcagcccaccttcccgctataccaatctagtctctgccttacaaatcagcaccactatgacgtagtccacacaattttcgcatagtggctcatggcggccctccatgcctcgtttctca

SEQ ID NO: 1752 - DNA, 1969 bp, Toxoplasma gondii
  source 1..1969: mol_type = genomic DNA
aacaagtgcatgcatcagtgcacgtccaggtggaaaggaaaaagtcgagagcaattcagatattcgcatatatgtatttacagatacgcatacaagtttctgtgcaattagctgtttacgtccgaaggaagttcctgtcctaacggtagagctgtcagggacggctttgggtgtttcatttatgcacaagggatggaacttagttgaagtggatttctttcagcaaaagtcacgttctttgttttgccaaagcggggacgtgtcatcccatgtttaacccaagagcacgtttcgctttagatttttctccactgtagatgtcttagcccatgacgctttgcagagccctaaatgacactcgcgcttctacgcgtgtataaatctacgtagatatatatttgtatataagaatattttgtgtgtgttaatttctctttaaacagacatgtgcctcggtaggcaaaggcaccgtgcgtttgtccgggcgacaggaatggtaaaagggtcatcaaggttagagaggaacgccgtgtactcaggcagtttttaagagcaataggatttttgaaatgctgtacctctctctacagtgcctttcaatcacagcagtcgctctccgcgtttccccctcctggttctgtttccttgtgcctttgaaggaaactgagaaagccgggacagggcactattttatgcaacatgaagttccgccactgcttcttacttgcagggaaacacacgaccgccttaaaagatgaacttgtttcggtgcgaaaacgttcacagttctgtttgagtgacaacggagctccgtgtgaaatcgaagaagacgagctgaaactttccgtgcaaacgtctatttggcggctgggaaggcggcagtgcggtgttgtggaaaagtctgtcaaaatgtatctaggaaattcctcaggatacgggttctactctgcggtggctccccgtggtttgacgttgataaggaagagtcccgagttagggaaggtcaccaactctgcttcacaaggcgtttcgtttccagaacttggataaaggttatttcggagtgacagcgggtcattttctttaattgttcaacaaaaattgatcccgaaaaagccgtgaacgcgtcccacagtctgtgcatgaagccccgacttcgagggttcaccagggctgcctgacgtcggtcacgtaacttgaaagtcgttttctttgctttgtaaagtgaaatgcagggatcggcacacgcgggatagcgaggattgaagcaagcattggctgtgtgcttcttttgtctcgaaaggaaatgcagcagagcatctcgtcttcttactttgcgacaggaagcattccgcatgttgtgtgtgcataataatgatcccctacaaacaggaaacttacttgtttgcagaaaaaccaccgggcgactcgaccatgcccaatcgtgtggggaaatgaagtgggtcttttgccttacagaaccgaaacgcggcattttcgcccttttagaccggtagagacctcgaagtgatccaaggtgaaagagcactcttccagcgtttgcggtgagctgtttcaccggaaagtaacggatgtccaggctcgatatttgacattcactatcgttgcacactgctgtccaggcgaagtggacggtatacgggtttttcgagtcgtagcaaatggcaattgcgagaagaacattccgatcaatgatactacaagcttaggagccgttattaccacccgaggataaaaggcaactttaagcagagcgcggtacctagtttctccagggttgctagatccatttaaatgcaagttttattacataaaactacttctatgcagcttgcagaagaaaaaaggatggactgacacctttcagtggacacgcggatctcgaagtagttgcccggcaactctgccgatccctactctttgcggaatttgccttctttgctcgaga

SEQ ID NO: 1753 - DNA, 4927 bp, Toxoplasma gondii
  source 1..4927: mol_type = genomic DNA
agtttctgtagagatgtggatatttatagacctaccagtatacgtaaaggacgctcctacgtgagtgtatatacactgaggcgtgcgtgcggagtttgggttgcggtagtggggcgtcgtcgtctttttcactttttctgtcttcagctctccgaagagttgaaagctgtcgtgacggatgcgctggcgaagcgaatcgtctactccgaaaagtatcaggactctgcttacgagtacaggtggggttgtgcgaacctacggaaagccgcggaatacgatggaaagtgaaaaacgacagtttgttgtgtctagcagggcagagcgcagttctacaggcgggatgacaacgaaatcaagacgcgggggcgacaggcaatcaccggaaagtaaattctttgctgggattaatgaaccgaagcgtgtacctggatattaggaatatatatatatatatatgtataatttgtatatgaaagcgtgtggccttgcggaaaggaggtaagaggagaggaagcgtcgagaatctgtcaattcaaactgatcagttttctgcatttgccctctttctgcctcagagcggtgactctgcccctacagcacccttttctctctcacagtctctctcccctcgccgacgccatccgaagagaacggagaagaatgtcggagaaagtctggagggcgttgggagtacgtgtttgattgctgacgaaaactctgcaagctgccagccgataaatggagtctaatacgcgcatgcataagtgtagggtgcatgggtgcataggcacgcaggtcctcgtttttcctcgaagggatcggacatgtgctggcagactccgcacgtgaaaacggtgtgtgtccgctgggagttcagtaggtctgcactgggataagtggaccagacatttggatgtgaatactacgaagatacatatatatatatatatatgcagatgtgttgttatagccccaaaggatttgttttcaatcttcctttccgcagaatacttttgtttctgtgtacgtgagtctgtgcatttatacgtatctctgtatgtgaacctgtgagtgcgcagccaccttcgtggtccacttttgcacgcgacagactgggcatttgcttccgtttctttacagattagaatgagttgcgggtggcggcactggggttggagtatgtacgagccgaacgtcctctttttcgcgcggtgagacgctcgaaagcacagtcgctctccactgggagtcgagatgactttgtcgttacgcactcgagggcgagagagcactccgagttagctgtccacagatcgcgttgtaacatgacacgatgagaaaaacggcagcgtcttcgacggtctggtttccctggacggcgcgtgctgctggagggaacagacaaaagagagagggggtaacgttcatccttttcggaacggttgataattgacacgcacaaagtcaagatgtctctttttgccgtctgtctctcctcttgtttccgtctgccttgtgttcatgaatcttcctcatttctccattgtctcttgtcattcctcgtcgtatctttctccgaccgatttgagacaggccaaagtggacagacggcgttaccgggatccctccgatatctgccaccttcgccgcaaaacggcacgaccgcatgcgcgagttgctagcccaggtgaaaaatacaccggccatgtcgtctaggtcaagaactgcgtgcagcaaggcagaagtggcccatatgtgtacgtggcgttctgacatgtattcagttgtgtatgtgcaaatatttccatgctgaaaaggcccccctatgcgtgtatgtacgcacatatatctgcaaagacgcatgtgtgatgggtatgtctgcgcctacgtgtgaatgtgttgtggacgttttttttaatttaagtgtgcggatatgatttgatcgtgattatttcgagctctgcttccaagccatggggaaggggcattggcctggtaggaatcgagagcaaagtgagaacgcgccgtgtgtctgttgcaggacgtggcgaaggggatgagtgtcgtctcccagaaacttcgctcggccctcgtggccacacaagactgctgccttatgaccgacacggaagacgataagagcgcatcttcgatctgtggtgtgtaccaagactgcatacgatagtcacaaaatattccagaaatgctgccaaggaggctcttcacgcgacagatcactcaatgaagcaaacatgtgatgttcgcgtgttatgagagtcccaccgactcaggtagacaaaaaatgtaaattgaagtggaaacatatcgaacatggtcttgggagaatgcccgacagacacacgtttccgcagaagggattagaaagcggatcgaacatcacggtattataactcgagacggctcaaaatgggcctgaaaaagactacgtctattttccatctgttttttcgtaatcacgcgttataccaccaacgtaggaatatgcggaatcgacagattgtctttggaagcgaactcgaaatgtctgtattcgaggtctgctgagaataagctggtcagctggtgcatattgcgcgcacagcagagcaccggtacagacacaatatctatctataatgtgataattgcaatacaaggtttacctatgggctttttgtccttaataccaactttgcacggaggatcagtgatttgtacctgatccgaaattgttttatcagtccaataatgtgttcaaatcacttatatgtcccggaaatgtctccctaaacgaagaaatgtggaaaaaatcccggcgcacatctgcgcccgtatgtgggggaatatatggtcatctatataaatggaaaacaaggaccttccaggaaattttgtcagcagaacacatatcgatcgtacttgagagtcgaagaaacctacgacgtatgcgtatttgtttctttccatgattaagctccgtctgctttctataaaagggaagcgaaaacctacgctgtgcactgactgtttgtcagcgttgaacatttacagaaatcaacctgtcaacaccttgcacgatgcagtgtattccctgaattaagaatggcattgtatttgcaatggagtgaagcgaaacatagccgaataagatagcctctcttcatgatagaccgtcatcccgcacagggacatttcgtacaatgaggaagtagcccgtcacgaagcaacatacgggagaggaaaccccacgaaagactcataattggtagctagcaggaggagcgtcaatcaggttagttattcgcatatcccgaattattccacgtcctccaagctggattagaagttaggtgtgtggccgatatttgcagccaagtctgttatccaaaacaaagcgacatctctgcggaactgcttcgtacggaagtagcaaattttgggccaccacataatggcatacaaaaggaatgcacgccttgtgcgctgctggatgcaaaggaagtaaatggtgctcataaatcgcacaagactggatccaagcgctggattcggtgtacgagttcttcgactctctagaatcgcttaaaaatctgtagtagcaattctttcgggaagttgttttctgtgaagagttatcctgtagtccgatgtacacctcatcacttttgaagacagcgcccgatctgctgtatgcgtgtgaccaggttgcatatgcagaaatagtctaggtgttagcgcagggatgagaatgcgtgtgcctgaaaacaggtttctgatgcctgtcttacaaatctgtgttcatcttactttgcacgtaggtcgcgttccgcataaggtttgcactttttcaaagcactgattttctttctgtatgcgtcatggatgttggaatttccccaaagtagtcatgttcgagtccgtgtcccgtgtgcatgcgtttctttgacagaccatgtcaaaacccagcacaacttcaggtcaccgtgacctttctcggccatgtttcgccagaaaatgtacattcagtcggacgagacactagcctgtccgttttgaggagtttgacctattttgcgtccaatgaaaaaactgccttactcaacttgtttctgcacgacacgcaacatttcatcgtatggtcgctctttgttgtatctagtgcacatactattagttacatttttcaatagcaagcatatcggactgtcgtgtgtaaattcattctgcttctggacggcacgccgaggccgatttttctgtagaacacgacgcaagtctacgtcggtggttcagcggcaatttaagtgtccgtctcctgacaacacttatgtcggttgacaaaaaaagcaccaaacccatctttggacgaattgaggttcgcatgttctgcgtgtttgttgcaagttacagctgtctcgtgtatgagtgtcctacagaggaccgaaagaagcgttgcaacgcggtgcatcagcatgagatgtgcgtaagagttgtttgtcgcctattttcgcggccgcgatttcgcataaagaacagctctttcacgaagtaacggggcacgcaaagtgtcccgaaacaccagttggatcagttagatggcccacggcgcttcttcttcggtcactcgcgtgtggaaggccacgcgagcgcggggccgcgctccactccccgtcctggcacgcggcagtgatctggcaccttttctgcactacgagtatgcccggcgtagccacaatcagatctttgacttttcactctcttctcttttatcttttgaggccaggtgggtgttggatgtgttgcttcctatgaacagtgctcttcccaaagaaaacgctctgtgtagcctgcacatcttttctcccgtatctagagaaacgcgaggccgcgaacctagaactgtcgtctgtgcgagtgcgaggcaaaa

SEQ ID NO: 1754 - DNA, 2654 bp, Toxoplasma gondii
  source 1..2654: mol_type = genomic DNA
caaggacgtagcgtttcgccttattcagcttcacgaatgggttgaatgtgggtttgacgcgaaccccgtcgatgacattctttgagtattctctccggggagttcctcggcattctgctgcatacaccggcctctcgcgctcgcgcaagatatcctgtcggctcttccaggggatctctcgaacggcgcgttgctgagaaaaaaagaaaacgggaaacgcagcggagcgagcactgagaacgcgcggtgtgaagaagtcgctccaagtctactcgagggcaaaccgtttccgtcaaatggcaccttctcctggtgtacgtgctgcgcgtcagtgcgacgcggcgattactatctgtgaagaaccaactgtcaagagcacctcgagtctccatccaagcagacgccgaagagccatgaagcgatcgtttacgatacgcaaaatgtggcgcgtgacacgtgtgaatccacttgtttggatctggatactttcgcagagacacgcacgaaagctccatacaatatacatgcacgaccacagtttatttgcatagtcgacgagaccttctgccagagcattcaaggatgaacagtcactgtgcggactcaccagagcccctgaagtgaaggaccgagacgagagcgaagggaagaaaagaagtggcgaaccaagtaaacaaaaacgacagaacggaggtgggtgacttccaggcagcggctgaggaaacgacgagaatgccgcggtggagacaccgcgacgaacgacgtgcggtgccatgttatgactctgttaactctgttaaaagagagcagcggaaaacgaaaaccacgaaggggaccgggaggcttgtcccctaagtgcgcatccaccacaggccatcttccttgtccgaccacactctgtttgttgcagaaaacacggctgttggggatcccgctcgagagcgacggaacctaaaagaaagggagcattgagggcggaagacacaagtagacagtctccagatggctgtgtgcgtgagggtggcagtgagtagaggcagggaaaaggggaagaagtcacgcagtaaacgtctgcatcggatgcaggaaagcgaccaacaaagatgcgacagaagaaatgccccagcgcggaactcgtcgctttcctctcctttctcctcctataagtgccttgtcgacaacaccgcatgcaacagcgttcaagggaaaatcgaccgagatcaaccgcaagataacacctacgaggaagagaggtctctggacagagaaatcctaggaaaagggaagatgtctgccaagggagcgaagtttctctgcagcggcacgcgcggctgcttatgcacggtttgcgcaaaatcgacctgggttttacccgtccaccacagcagcggaggcctctaccgcctcgtgacacacctttagtaataatcagcagagaagtcgaaggaacgggacagaacctgtgtcgtggatccagaagtccattaaaaccgaaaagtcaggggtgtgccctgaaactgcggcacaagccgtcgccacgtccgcaggcgttcttccgtgcttaagcatgccctcgataacgcccctcccaggacagtccgatcgagtacgtcaagaaaaccaaatttctgactccagtccggaatggcagtttgcttgtttcacaaacaagaaacgatggacctgtcgcttgcacactacgtgctgacctgagagatccgtagccgctcttgcgtggtccaggtcgcctcggaagtgttgttgagatggaaggctcttccagagcgcaggcggctgcatgcgtgaggcgagtcgattcgcgtgcgaccctttttggtggttgtgacagcgaaaaagggagacctggagggaagttttctgggcccataccaacaaggtgtcgtcttggagtcaaaaatttgcagctagctgttcccctcccccccccccttcgctgacatagagcagctactgcccctgcagagtcttcgagttcgtgcactcgattgagcggtgagtcaggctgcacgcggaattccactggttgaattaccacggtgtggaaatagagcggcagttttgcagactatgcggcaattcttgacgtgaaaaaagtggcgttcgagttaggttagggtggcgtgttgcaaggcggtctggagggtttgtggtgcagcgtgaaatggacccggagagcttttcctaaccggggtattagcggcgcggactttgttctattttctccgagccttcattagtgtgctgcgaagcgtggcatcgcagaggggcgacctgtgatagaaattatcgtgtggctcagacaacaaaaaagcagtttctgacggtgtacacagttctgtggcccagcgctctaattcactgcgctgccgggagtgaccggctgttcgtcttcgtcgtacctctttcgtgtaggtttcgctaatttccctccgacgcccagtaagaggaattatgatgggcttagatcagtagatgacttcgaaggcttgtgggtcgcagatggcgacagtgtttaataaaaccttaaacacttggtgaggcctgcctcaaagcaagtttttttttgcgggccgggtcatttcagagttagaaaaaagttttcatgtacatctctcgccgtatttgacttctca

SEQ ID NO: 1755 - DNA, 1563 bp, Toxoplasma gondii
  source 1..1563: mol_type = genomic DNA
ttcaaataccgacgtgagcactttgtaagagcaagtgttgacacagatgagaggaaaggagaaacgcacttagaaggaaaaagagccggggatacatttgtcccagttggcagtgatgctctgaagagaaggaacggtctgggaagcatagtttctgtgtttccgagaggagcccggcgtcgtctctgccacgcgaatcacatgttctttctgacagtttccagctgcctcttttcgctgttttctcagctcatcgaggaagtaacaaagacttccgggcaaaagtccgtggcggtggagagcagctgcagcgctaagagcgatggcgtcgatgtgctgcttcccacaatttgtgtactcaacaaatgaagtgttccctgtgaaggcactgacgcaagcggcttctgtgctatagttgctgctgcgagtttctcccccagcgtgtcgggagcgcgtaacggagaagttcgctacgcttgttttgtcggcgcgcatccaccagtgaaaaccccaggaggtttcgtgcctctcttgctttcaaagaaccagtgatcaacggacagacatatgccgctatttagcctttctcggactaaggggaccgagtcgccgtgtcaaatccagaagtccgaactcgcatctttcactcggttacaacaaacgccgcaaacgacgtcacatagcgagctcacatgtgctgccttccactgtcaccctctgctactttcgagcgcatgcggcggaggcgttgccctttcggcaccaacagagccgtttctcgttctgcctcgctgtgcacgatcaagtgcacttcactcgagatgtatgcttacacatgtgtatatcgtgagcagaactcgaggaagaaaagctgaacggagtcacagtgcgtgtcgcgtaggcaggcaccttgttgccctagccagcacatgtatcgagacagcacggaaaaggatttagcgctccccgaaatttgcccggcgtacctttggtatttcagcctgcaaacagtccatgcgacacgcagaagattgtggcggcaagacggggagggaaatcagaaaagaatacggcaaattccatgcagaccagtggagaaatcacggagagctgtagggaacattctggattaccctcggccgcgcggcgaaactaacgtcgacgtccagtccgcgcatgcacacgcacagcggatcttggggggggaagtacgctgtttagctggacagctgccgttctccaggtgtcatccgcagacccggtgagctgcgtttctgggttttcactggcaggctggggcgcgagcttcttttcgaaccgaccttgcgatctgggacgtcgtttggttaggaagcaccgacaaaaacatcaaaacgtcgctgctgctcgggtgtacgtacacgtcgacactttgtgtgcaccgggagttgttcggacgcagctggcccttggagtggacggcaacagcttctcttccgtatctttgctgttcagcttgtgtccgtgtcaatgtcgcggggacatcgcccctcgagttcccatctttcttttggttagcgtgta

SEQ ID NO: 1756 - DNA, 1681 bp, Toxoplasma gondii
  source 1..1681: mol_type = genomic DNA
tgttttgcagctgtcagtgcacacggataaggaaaaggcactctggccgccggcgaacccctgcagtccccaaggtatgcaacctgcacattcagatattgctcgtaccgcatctggagggtttcttacacagggaaaggggaaatgcaaggcccgtaccttcggcagttgtgcagaagtgctggttcattgctgcagggaagcgccgcgagctttcagaggttggacgagaaagtcgagaaacgaaagtgggcgcgcctgttgccgcatctgtaagttgttgagcgtagtagtgaacggaaatgtcaacttcagttgtggaatccaacaagaaggagacaaatagacggtcggggtaggaggggtcctgcacgcgaacacagcaacatctgcaatcgagaacggcttcagcggcaaaaactacgaccaaaacaacattccttgggcctcggttatgtatcgcccgtagacgttcgtctagatagctgtgcaaaagaaaattcagggaaaatcaaaaagctacgtcaacggagaattcatggatagctctggagtgccaacctctcaacaccgccggcttagtcttgcattccttctctggggacatgtattcgagtctcgaattcatgcaaaaacagggcgggcagaggcctgccattactgaaacagtacatgaaggaattgaggccggttccctgagacgtgcattggtctgtcggattcgtcgagacccgacagagtatactgccatgcaagaatgtctctgtatacacatgtacatatattttcgagaagtcactgggtggccaccggccacctgcgcaatatagaatagaaacctgcagcggttttgttccccctcgcgtacgtggaagcattttagggagtgcttgtgcaagttgactgggttcttgaccacgcaagtctgctgtacactgagccgcggaacagcttccggattcggtacaggaacttcactttgcgggtcgaatcgagggtctgttggctgctgaagaggaacgttggaagttccagctcggccccccacgttcggattctggctggcaggaatgaaaacaacctgctgagggccgtaactcagtcggctagagggctcttgccggtcccggctgactcctccacccatcgcgagggcgattctggggaatgacgcaggagggagaaaaaccaggttggagcacccgaagtggacgaaattgtcaaaatatcagtaaaaaaaaggaaacaaaaggacccgcttaccttccgcttacgaaaacaaaagaaattaccggagaccggcaagacaacgaaggcaacagctacaactactcgcttcgttccagagaccttgaaaattccgtgcaattctctgtttaggaacagtcgtgtctcgtgcaaaagcggaaagctgagactgtctattgtgtcttgccgccaacactttttggtgttcactattttagagagcgaagaatattctccgggggaagaggtgatgcaggaaaaaaatcgaatcacgcacaaggtaaatgcatgacgtcagtgcgagttgtcgcagcgcacatcggagggcgagacggtaaagaagccgccgcgagtttgctactttctttcactgttgaaaagaaaccgattagtcgtgttgttttctttaggttggttgtcttcgttctccgta

SEQ ID NO: 1757 - DNA, 3052 bp, Toxoplasma gondii
  source 1..3052: mol_type = genomic DNA
cgaatgtatacgtgagcgtggatcgctggaatgatgtcgcaaaactggcttttgaaaatgttatacaaaaaggctttcagagtctgagatacggcgcggggtcgtcgccgttcgtctgttgcgaaatcgtgtattttgcctttgtcggccaccaaggcaggtagaagacgtggagcaggctctgacaatgattttgtccttgtggtaatctgctagaaaggaactaatgtggaagtttcatcgctccaggttgtgggtgttgatgatatccatgtgactagcagttttgtacgaggtagtggtgggggatcggtcactcatgttcgcgcagattgagtgtcccaggcggtggtttctctgactgcactgcttcttcaggtttttctacgtttccagctgtatgcggcgaggacaaagacaacatattccccgcaactcaacgagagcgtcaggggtgcggtactcgggtgcagagatacctgagttttgtttccaagccatctggactgtttgcttcagcaatctgctgatatattagcgacggaagtcagcgtgtcatccgtggtcttgaattctaccttggcgtcgtctagcgctaatgttagcacttcttctgaggcttccgcctacgtgctggtcgtcaatgaactgccacaagacaggggcgaactacttctctatcagtgtagcccacatccaggcactcaaaatgaacgagagccacaagaagctgacttatccaagacaaaggtgtctaacgttcttattgaggcaaagcagtctggttaagccgccggggcagcagtgtgacagttttgggggatgttgtggcacccgtgtcaagtctggggctgagggttcaatcatccaatggcgacagtggagactgatggagggacagttaagggaaattgagaaagctggggttgacgcgatttcaggggattgatgcggttggtgaagagccagcctggtagtacaacaacgcgatggcaggggctccgtgctagtcacgtgcttgtgaaacgcatttttgttgtttccctgttgagttttttaacaggaactctgctagtagcaaccgaatgaccgctggcggcggcacgtgtctcccctttggattgtttctacatcttccttccccaccatgttactatcgatgcctctgcagtgccactatggatatcagaggcccatcgaaaaacagatacccaagtcacctggtactggttctcgctaaattttatgtagtgggcgggagccgattttggagatcacgtggctagtcgctggtgtggagaccagctgtagtagatgtaatcgactaccgtggttgacctgatggcatctggtggacacacttgcttgccttcgtttgccatgggattctacttgacttattcaagagaacatcgctcccaatgcatcagaagaacgcatttgcaacaccactttcccggagaaactggggtgttccgagacatgcttaccaatccaatacacttatgtagatgactagtgaagaaaggagcagtccaccgtctgtatggaacgcatagcttttagagccctatggcgaggactacaccgggcgcgtttgtgtcaccactgttttggagttttgtcaacctggctaatagagatgtgacatgaacgactgagggggaagtatggaataagaggcagcatgacgaaacggaaagcagaaacacacttgcgtgtggcgtcatgcttgttttttgtcatggttactgagatcgcaacgcgacattgttccttcaacagcacaagatgcaaaaaaccaagggttgtgtaccgtcattacaggcattaaaagataaaactgcgagaaaccgggcctctccaaaacacattcgggtgctgaaacgacggcggcaggattcgaacctgcgcaggcagagcctaatggatttctagtccatctccttaaccactcggacacaccgcctgattgtacatcttctttcctttcaccgccgccgtactccctttttcctgtttcagggtttcctgtcactgtaagattagcagagagcagactgaaagacagaaaaccagtgagtgattcgtgacacactaagatacccacaaggtaaggcgatttgcagagttgttcttcctttcgtatcttgcgcacaccacccgggcaccgggtgtggcatctcccctcaaggtcccatcgcagaggcattagtatcatggacaccttcctctggttatgctgttcttctatctccttatttttctccaggaggaagaatttacatgtggcaagcatgtgaaattctggtgagtccctggaaaacgttcgttttccccgtctcagttgtcttccctctatctcagttccgtgtcgcgagatctgtctacaccagcgcccggtgggtcggtccgtttcttgggcaccgaggatcgacgactctcaagtctcttttttttgtatgctggcgggctgtgtgttacctctacttcactcctatctcgttatccgtcactcttttttgtgaagtctacgcgtctttaggcgcgatcgaaaaggcttttcttctctgcgttctaccccgccccgctaaccgtctgctctcacgtaaaactgtctcgcctccacgaaaggggaggacacacggagaaacaaagagatatcgggcgacagaatacatcgagacgtcggagagcaagaaggatcaggcgagaacgtcgacttgttttattctctgtcgggcgcgcgttcttcacaccctcagtgtggatttatatgtgtcatgcgtcctgcggttctcaggcgctcatcatcacaaaggacacaggaccggggagtgtatggcctcccttcctccatataacacccacgtttctcggtctcttgtcatgcctctctcgtgatatgccattccgcaattccacagggatacctgcaacctgtttccaacttgaccttccccgttttgtccgcgaaaccttcggcttggcggaagaaagacatatcttttcagactctccctttccgttattgtccgtgtgggagaaaaaa

SEQ ID NO: 1758 - DNA, 2406 bp, Toxoplasma gondii
  source 1..2406: mol_type = genomic DNA
caagtgtctcggcgttggctttgccgtactgcagtgacgcaaatgcagagagcgtccctaaactaatctgaaatgaacgtgtggtggtgccgtttccgaaatagacccgaggttgcggtctggtgtctcgagtgctcctggaaccatgcgacctcccaggagtctgtgatacagggttgaactgtgtaaatatcattgttatgtttacgacggtacgcttttcggctgatgagtttctctcaataactggctgagagcttttacgaaaaattatatcagtgcattaccaattaagttgtgtagcatttcctgtgctccttaacatcacatgtatctgtttacatcgtacctgaatggtatttgctaccgggagcgaagataatctaatatgtaaatcaggtcatggaaatcaaaggagctttcacgctatacctggtgccagtcgagtcgctcaaggatgtttttatcctgtttatgatttaagggatgtaaagtctctgtacaaatgaaccacgacccaggactgaataagtcaaatcgaataaacagagacattatattacctaggatagtgaatatgactccagtcatgagatacagacaaccaagcagaggaactcagggtccaacagtcgggccatctggatcctcacattcaaagataattctctgtactcatcatacacaagtccctacttgaaaatgaaaaatcacagagatagttgcaccctggactgcggttttttgtttctattgtcttgacggtatgcacctgagattaatatgttatccaatacgaggtatcttgcatggtacttccggcacagggcttgataaaaatccagcagtgaaacatcaaagtgtgcgttgctgcgtctattctttaactcttcctctacacgccatgctagcacacaagtgtagagcatcgcttacattacggaaaaatcgagtgcttttctattgggtttcgagtagagcattcgctcgactactctacttggcttctctgctttacttggcacctgcgactatatcacatcgttccccaggtcttgctgtttgttgcgcgaacgagagtcagctaattcgcttctacctcgctatccgtaccatagagtgctttgctagtttatccagctactgccttgcttgtgaccgccgaccaagaagcagcggcgacgcttcgctacgctggctctcgccgaagggttgtttcccatgcatataaaaaagtagctccctactggaggacgctgctgcagagaatgatccaaccaaataaggacgttgtcaatttcagcgtaatgagcaggaaagcgaaggtttctcttggcaacaatatgcctctgtgcggcgggaaaatacactacaggaagtgcgcaaggggacctcggctttctgcgctgctgcccgcctaccgcgcagaggtggtgtgtcgtggattgttccttcgcacgtccgaactggggagacaaagctagaggagaattcaaacaacgttacactatacggattcccattttctttcgactttcaggcgttttttaactgcatcgaattagtgtgatttgcccgtacccgctatcctaggtcattcatttcccatcgctctgcatgcaagaatcgcattcaagacatcagcagctgttctacgttccttttgttttctgggtatttccgagtttctacgtcggcagatgtagaaccgtgccggctttggccaaagacacttccctttgcttcttggggtatcaagcattccgtcagaggagcagaggcggcaatttttgggcaggttgccccgggctgacgcgtgttagaagttatttgacgctgagccgtcttctcgttttcggcgacgtttctccctgttgcttaggtctcaatcggtgtccctcgcatatttccgtccgccgaccttgctgaagtctgcgccgtgggttgccagagcgcctcagcaccgggttagaagctttttgagaacgtcgccgattcttcggcaagtaaggcttgaattcatgtggcagcgactcgggtacggcgccggcactccagtggtgtagactggcgtccgagcgactgcaagctttctcagaagcctgcgacgatgaaaattttttgccgggggggcgtggcatcacttctctccgttcgcctgcctcggtctctgccttctctggctcatcacagcaaggtcctttcccacagcagttttttgccctttccaacaggaagttttgattgcccaacagctgtttccagtggaggtgttcgtgctcttgcgggtgcccggcgggatggacgcgcgcgcggcgaagttgccacattccgactagctcgtttcgacgatcaacaaccttggtggccgcattgcccagctcgtctcatttgcttctgtgcaaa

SEQ ID NO: 1759 - DNA, 2280 bp, Toxoplasma gondii
  source 1..2280: mol_type = genomic DNA
ctcgaggtggtctcgactttctccgatcttccttcacttgtctagacccgaatcggtattcgagcaacagtttggttttgtgtgattcagcttaccaagatgcatgtttgaaacattaggggagaattgggaacaatggtttaatttaagactttttcagagcccagttacacgaaatttaaaacccacatgtgtagaaaaatgtgcggtctcctggtccgtcgtctgttggttgagttgcaacgctgacaagcaaagtcctactgggtttcactaacctgcttttccagttttttattgccagggagcaattctacacaaatggcgggcaactattgattcctgcgaaaaccgcttccgctctccgtttggggaaaatccccgtgtaccaatgaagctttaccttcccacttgctaggctcttccatcgcggcaaaactaaagctggtgacgacacccttttcttgaggaaagcaatcttttccatatcatcgttattactattgtgttgcagcaccggttgtcactactggaaaaacatttaagttctgcgttgcacagaatagccagaaatccatttctttttataagacagaaactgtcgaaggcgttttgaaagcaggtgtacctaccgatacggaaacagcggtgtcactttatttttgatgccaacatttctccaacggctccaacagtcgacacaactgttatagtggtggttcagttcgataattacaaatttgactccctaacacgtcggttggagacactggtcatagacctccatcaaggctcccttagttcgcaaacatttcatcggtgacacagtgaaacaacactgctgggacagcattccgccgttctgactcgctggaatacgccaatggtgtaatgcagggttcaggacagcttcgagcatcatcgaagcaacgttgatgctccgaagtgctcaggtgacaaggaaaactttagattcataaagaaagctttccgagaatacagtccatctacgccacaccatatgtcgtccatcaaacttacgggaatcgaatgataatcacggcaatattttctgtagcgtactactctgcgttttacagtggtgacagaaacgtttctttaccatccactacccgtacaccatgactctgcactttcaaacagcgtttcatggtgggtttgtaggcgtgtacgccttcggaacaccccggattttttgtcagtgttttgcaagacactcaacaagctatgaccaaaagggcgcagctcagtttacgctaaacgcctttgaaactgtcatccttgtttggagctgcttcttcaaaaaggtcaagagagaactaccgaggaaaactcgccggagagagcgcctaaattcatgaaaaacgcatgtcgcgtaagcaccgcgtagtgttcatcagatcggcgttcttgtgaatcactttcgcagacagagacgcctctatatcacctttgcgagtagcactccgccgacctctttggcaacgctgacgccacccgctgcgggttctgttttccggtggccgctgctcattcaaggggcggagtctaccagaaagctgtgtcgacagccagaaagtatccaattgctggccccgccctcgcatgagacggacagacttccggttgtctgtctctgagaaaaagatattatcctcaagagaagaacaccgattgatggcgacgctgaaaggcttgtcgtcagatcttgattggatcctttcggttttacggttccacaacgtgtcccaaaccttgattcaaagcgacggcaggtgcatgcacatgcgaaacaacggcgtggtaatagttcagccagctgattctagatcctctgccaacagcttcatccctgaagagtgttaagattgctgttatgtcagacttttttttcttctcgtgccttccacttttgactgaaagactccggagaaacattggtgtttctttcgttcgtctcttgtgcacgctaacacagaaagtcggctgcccatggtaactgtttcaacctccagcttttttgtctcgattttctacagtgacagtagttgaacacgcatgcaaatgacaggcctcggtgccaagctggcaaattgtacggctcttgttttttgcgaaaggggggtgtacaaactgtctacgtttttcaaagttgcggtggtcggaggcatcacattacgaactgaagcatctgtgtacgtgcactctattcacattcacaggggataacagtgtgtctttaacagcagtgatgccaaa

SEQ ID NO: 1760 - DNA, 4434 bp, Toxoplasma gondii
  source 1..4434: mol_type = genomic DNA
aagtcttcgaaacgtcaggtgggaatatgacatttgcgtgaagtggatcttgaaagtcaacaggtggagcgcgcgagtccgaagacgtacacgaaggtgcagagacaggaggagacgaaggagagactggagaagaaggagagagaggggaagaaggagagcgcagagaagaaggtgagagaggggatgaatgagagagagaggacgaagcagagaaaggcgaggaagacgggagtcgaggcctcatgatgaagaggttcccttgagaagttcacagaagttgagttcagcaaaactgcgggaaggagagaccacgacaaaagtcaatgaggttgacaagatcaggcacaggtgcgccgaggggagacaatcgcgagtcccggtttgttaagacagatgccaggaatccttcgcctcctgcaaaggggcaaaaaatcgtaacggacaagaagcactggcgaacgcacaactcgggctgtagcaaagcctgccccaagtgggaagctctggagagaacgctactttggcatgttgacgaggagacaagagcggagtaaacgcatttctgactgcctgggaaggcacacaagccgctgtgggaagccgccgaggttgccgagaacacaaatcacgcaggagcggatgttgagtgagttcatccggaaggacggaattgggaagttgtggcgatgcgtccagaacagaaaaaacggatttgacagaaaaccctgaacccaaggcagacagccggcgaaacgaagcagaacaaattgaaaaagttcgcagaagaggcgcgctagaagagcagcaatcgcttacggtgcgtcgggtctcgatacagaggggaagtaacgccgacttcctgggagagaacccagtcagcttgtcgcgaaggactggggcagagggaggtaggtgagctgcttgagtccgttaggaagcactcgatgagtgacaagacagagcatcaacggggaaaaagtttggcaaaaaaaagaaaaacctctacgagtctcggcggccgcggacagacccgccaggcagccacgcggaacaagcgaacacgggtgtcagaagcgggagaaaatcgaagcgaaagaacgagaaacccttcttttttgaggcttggcgactcatgctccatccctttttttccctctccgcaaccagcttgagagaaacgcgggcatccaacgatcagcttggatttttgtcgcacgcgaaccgtccagacaaagcgcgcgcgccacccgactctcttccctttgcgaagaggaacagaaaaaggcagcggattcagactagctctttttacgtagaaagctcgcgttttttgctggaatcaagaagaaaagccagacgcctacacaagaacttccggaagttccttttcgcgcgcttcaaccgccttctttcgaagcccttttttcccagcgcgcggcgcgaattgctctctccagctggacgtttagcgtttaggcttgaggggtcacgcgttttggttgtctgtggtttttaacaaagacgacgcgggaaatgccgccagcgtggaagcctttgatgacggagaccgtgaggacaggctttctcccttccagcttcctcggaacacgggaaagtgaaacgaaagtctcgccttgacttggctgctagcaagcgatgaagagacacggagaatggatgcaaccgcagagagtcggtcgccatagaatcgcgaggcgccagttgaaatgttcgtcgctgaaactccttccacaagttcgggatctcaaacgttttcgcagaagaagcgcaaacgcttgagttggaaacaccgcgaacgcggacgaagagcgtgtaagacacgagaggaagacagtgcgcggggaggctggggcagccccaggcggtcttggcaggggggaaaaactgaagcaagaagtggagcagtacgcttcctagaaaaaacgagactcctttttctagtcgcgtctatttctccttttaagaaaatcgaattccaccgtgagggtgacaagagcttagagggacaggtcacttactacgggtctactgggaaaggcagatctgtatatatagcgccagcagccagctctccagagagggaaacctgcacatgcacgaacctcctttggcaactgaagaaagccatagcctccttcaaatgccaacgggtttacaatgtgttggacgtggctataagtgtttatatttgtcggttaaatatctcccttagtttctacacgggctgcacgactcgcagcaaggcggaccggaagagccgttcatggaatagcgacagtgcagtagtatacagaaagtgccctgaatcacgagatgtttaggaggaaaattttcactcagacttaaacgaggaacatctgcggttagtgatccataaagtgccgaagaaatatgtatcttcctgcaaaccacaacagcgcttgtgcacatcgcgcatatcgccttcgcgatgcacaggagtcacagaaggcctctaaaaaggcgcctattagtagtgaatgcgtatatatttctctttccgctcgaattcaagagagtggggcggcgtgccctcttctcatcctggaaccgaaacgaggaaaccttgtttcggcgaggacgaacctggagaagagtaacacatgacgcgttggatgttggctttgcttctggtcatgaaaaccgaaaatacacggagaaaggacagaaatacgttacagcatccactacggaaaggcaagcctcctgagagtgctatgtcgttcctcatgtatgtctccgtagttgacaccgtcgaagatgttcaacttggcgtgtcactgtgctcaaaagcttcttaaagccttgttcaagcgaagtgacaacacgagagttattgcaaacggtgttgcagcatttcatcctgccgttctgagaaaaaacgcgacgccgcaacgctgcccgcaggtagagactgtggtatgccgtgctagttgagctacaagggaaaagggggaaagacgagcgtctgtcattcagttccccgccaaggcagaggtgtctgatgcgaaaatcaagaaataacttgtgtgctctctgtatcaagagatgtcatggaacacagaacgtctccttagaacatgggagaggctcagtgaggtcaagaaaaaacatcaaaatggtaacagcactccagcagtggtgacggcgagaaccctgggggagacagtgctgaaaaaagacaagggagttctctcagttgcttctattcccgctgcatccttttagtctccaaccatggccggggataacagtgagacacgcacgctctcacttcgtgtgatgtctcagctttagaatatgtatcttctctctttactttgtgttttcaaaccttttctggatggtattttgttttctgtggcgaggagagaagaagctgcgttcttcgcgtctctcatgtgactgctactgtgcatctgttgtctcggttgcctttctccttttctcattctctccccatccgagaccaaaggaagagtcgagcccccgacagaaaaagtgcatgtaaattgaaacacaccgctcgtgtctactcaaaggcggaagtagacgacgttgtagagacacagccagttgaactccttgcactactttagcagaggtaatcagggtgaggactcacctgtggaggttcggcaaactcggaaaaatctgcactggtctggtgggggaaatgagtgagaggacaatccactttcattctggaaaaaaagaccgtcaagatctgtaaaaagatctcaactcccgagcagtcaaagagtagcgcacggaaacacaaagacggacggaggtcgagagagacgcagatggtaccgaggcagaaggctagaacagcgactgcaaagcgacagagaacgaagcacagagatgcagggagagtaaagagacaggaggatggagagaggaatggattgtgaatacggaagggagagaacaacgatggaatcagacgggcaaaacatattcgtttgtcttcctgtaggccccatgttctctggcgtctttcagcggagctcactttccttcagggtgttgcatttgttccctttcttgtatatgcaaggcaatggcgccaccagacctgtttgtttttcgtcctttcagcccaaatgtttgcctaacacaaaagctaatgctacatcattcgcgaacgagaaccccccggcgcctgagccaagtacatctatcgcgtatgcatctctcgcttgcttttcctaaaaagaagggccgatatcttcacgaaaaaaagaatatcgttcttctcctcacacttttccatggagtcgatcccgatcctgatgtctctcctcgcctcgtctacccagagattgagagaagggaaccttttctctgcgcggtgacttttctctgacggcacacacacttgca

SEQ ID NO: 1761 - DNA, 1732 bp, Toxoplasma gondii
  source 1..1732: mol_type = genomic DNA
gtctgccctcttcgaactcgcgaaactccgcaacattccgagactgggtctgcggaggcgcagcgcgagaagcagccgaagaggaagggagagcgaaggaagcgaaccgccacggacatggagagtgagcaagcgagggagacagaaaacgaggagaaagagggtgaaggaaaccaaacgcttcgcgtctctgcgctcgactcagagaggctttttccagcttgatcacagggagcaaagaagaagatccgcggaacgcgactggaggtaccgaggagccaagaaaggcaggcgggcaaggagttgtttccccgcaaagagatggcaagtggagtcgagggacaggcgacaagcgagcaagagaagagaagaggctggagagcaaggattcggagagcgtctcagataaggacgcggcccgctgaggcgaccggagaacgctcgcttcaagagggagactcgagaaagagaatcggcgagacggaactggcgcagcgtccgacagaaaaaacgactgagaagttccagaacgcgcttctcccgccgaatgcgttcgaccgccgatctgaggaaccaaagtcggaaacgcgaggagaaacgagaggagaaacgcgaggagaaggctcgtcttcatcttggggagaagctaagatgagaacttgctcgcgagtcagaagcagcctccgaagagggtatgaggagcagcagacgcgcaagacagaggcctccctacggaccttcgcctcgtcagtctgcctcgttcatgcccttcttctctgtctcctttctcgacgtctgaattcgcctcttcgcctctgtctcctctcccttgcgatgtcggcgttctccattttcaggtgaagctggagcgaggtcgagataccttctcgcgtttgtgtcttgtgtgtgcgtcaccttcctcgcgccgcgcctgcagggagagaagacgcgcgaagagaagagacaaggctgagcctctctctccactggtgaagagaaagcgagtgagagagagaaaaaaaggaaacgcgacttatggatggccttcgaaaagcggagacgagtgctcgcctacgggcatgcgttggctttttccggggctgcatgcatgctcgaaaaaagtcgccagaccgaggacctctctccgtcttttttgctgtgcttttcaactttccgcttccaagcaaacacagtctcacgtttcatttcttctgtgtcgtttagcggagtccccgctgcctacggctctcccccggtctcttcctgccgcggcctccggtggcgagagaaaacgtcgctctcgtcgtcgatctcgtcgtcgatctcgtcgtcgctctctcgcccagcaagtcgccttcgagtgtcatgttttctttccttcattcttcgtccccttctgcctgttcgctctcgtcagtctcctcctttctgcctcctttcgcccctcccctctcttgtctctcacttctcgtcggtctcttcttcctcttcgctttctcgccttgtcttcctcaccctcttcttcgtctcctgtttctctcttcacttgctccacgcttgcggatgcctttttctgggaacaagctcgcggatttatctgcatgcgacagtcgagagaagcatgcagaggattctggagcctgtctcgactgcagcagatagccatatgcagagactcacgtacctgtagatcgcctcaacttgggcgcgttcgaggcttcttccaggagga

SEQ ID NO: 1762 - DNA, 1776 bp, Toxoplasma gondii
  source 1..1776: mol_type = genomic DNA
ctgcccacattgcctgcaagttcgctgagatcaaaaccaagatggacaagcgttctggaaagaccctcgaagaggccccgaaatgcatcaagtctggtgatgctgccatggtgaacatggagccctccaagcccatggttgtcgaggcgttcactgactaccccccccttggtcgtttcgccgtccgtgacatgaagcagacagtcgccgtcggtgtcattaagtcggttgagaaaaaggagcctggtgctggcagcaaggtcaccaagtccgctgtcaaggccgccaagaaatgagctgttattggaacaaatctaccgcttcggtgatgaaaggtagcctatgttgcatcggcctgttgttttcgtgacatgcttttggtcgttcttcaactccttggcttcttttgtcaggccggcgttgtcgcgttcaatctgtcattgatcttgcttgtttgtttccaaactcaagctttcgctcccctaccgtagcaaaactcttcccctaacgctgcgctactgactcggccacttgtcgcccactgcgggaaggtgtatcgatttatgtaggggtggttgagtcacagttccacagatttgggagtatgttgacttccctcattttatttacgccttcgtggtatttcacagggcgctgaagtagcgcatcttagtctgttcacgaaatgtgcaaaaaacaaggcaacaatgcctcccaacttccggatcacgttcttgtatttggtatcctgtaaccgccttaaacaacctagccggtacatactgtcaatgttcccagatggctactcaagtaggcaggtatgagatatcggctgctttagggacttgcgccacttaccggaaaacaggcttacggttttaacggccacatcgagtgaaagcatagctatgtgacggctcggcttggaaatacgacggaactggaattagctcaagtcgcttaatgcttcagtaaataactctgatcttgcttccgtacttccacgtcactgaaaatgcgtcgtgcagtcgctgagtggttgccagcatagcttaagtctttggtacgcagctttcgatgaacgggacggttgaagctgctcgggaaccgaaatccttcgctgctggcgaggccctgtaataactgcagagtgcggcattgtgacatttctacgtctattttcggttaatattacaatttgttccttaaactaacgcaaaaaagcatcaacagttaaaacggtcactcatagtggcatcagtttcagctgttgttgcataccacaagcctggtaagcatgcgtgtcttcttagcatgcctcacttgccggatccagctcttccttgtctgccgacgcagcgtaattttactagctttgcttttcgtgacaatgagaaaaatgcactgaatgatacctgtctaagcgctcacaagaacctacaggatgataattggtgtctcaccggaatgcaaaaatcagcctgaacgtttcagaacctcaaacaccaccgccgaaccagcgagttcttccgctgcttctgtcttgtccgcgtcgcaggatgcgctgtttgggtacttaaacaacttgcgcggaggagcgaacctcgtgaattgcttgtcaccaattttcctgtatatgttgttgcctatgctgtaattattattcgtgagcctctgtctgatggacgtttcctcccccagcgcgggccgccggagacagctagcgctgcgccatctcgcgaactctctcgctcggatgactttagtcagtctgaa

SEQ ID NO: 1763 - DNA, 1708 bp, Toxoplasma gondii
  source 1..1708: mol_type = genomic DNA
gtaacttggttactgtgaaatccgacggaaaaacgcgttgccgatagtcacgcacagctctctgaacataaaatgtgaagggtgctagaagtcgacttcatcgacagctgcatagcatttgggctcactgtcgcagttaacgaggacataccttcactgcctggattctatagagatgctctcaccgaacgatcatcacacaggaactctggccaacaatatgatggcagaacagcttctagtttccctatgtaggatctgcttgtttgtaggtcgcaagtgggtgtctttttcagtcagggatatgtgaaaacgctccctgttgtggagttcggtttggatttcggcgttttttcgatgttctggcgtctgcgcactactgtgaatctgtgatgtgccataattgagtctatacaagttgctagagtcatttacatcagccttttatatcgcgactcgcctgcgcatactcgaatacttgcaacgagcatcgttcgccaaacaaatctgcgaacagttacgtgcaactgactcctgccgtcacttttcctctgatgttattaatagatgaacggtacacagacattggtgattggaagccagcaatgataacatagaaatcatagtgatggtttggatctgaagtgtattcggtatactcaacgacgtcaagaaacttgaagactatatgatcgccaaatcgctgttgcctccttaaggccggaagccgttttccattcgaaagccccgcccagagacaagttcccagggacagctgacaagtgtaagttccagtgttttcatgcaaaccccttgagaaatgtggtgctccacaagtttgtgacccggagaggcttcactggcacctccagcagctgtctccgattctgatcgttctttttggtcccgaagaccatcccagacaatgggttcacagcgtcttttttagatatcgcaagagcgagtaacgcatggagcacgaagctgtggaacttcacctttgccttcttctaatcctgttcatctttttttggatctcttattacgcttgctaccccgagagctagtccgtcccttacttttcgcgggcagcagcctgcatgcagtcttactggggtttggcactgacgcctagcgcgtctcagagacttgctagaaggcagagaacgcattgaacagtctcctctgcgtcgtatcacattcaagtggctttcctcaggtgtaagtacacctgagacttgcgccgcattaggggatccacaacgccgtccgtcccactttgcccctgcttcggctgcaacttgaggaaagcggaagttgcgtcctcgtggcagaaacgttatcattcttcgcgaagttgaccgaaatatctaaccattcatccgaaggattgcttttcggaagttggtgccccaactttggccgtcccgttccctcgccgtcgcagtctggatccatggtgagcgctgctttggcgcctggtagttcctatggcactcgatccgggcgaagtcggcgcctctttttgtccgccaaaaggtcttctgttcccctcaattccttttcagaaccgcgtgacaatcaaagtaacccccgttcttcgctggcgttcttcggcgtctggatcccggaacgtcggctgcatgcctaaggacaagtcaagaagacgattactcgagcagctccgttctctctcactttttaccga

SEQ ID NO: 1764 - DNA, 3868 bp, Toxoplasma gondii
  source 1..3868: mol_type = genomic DNA
tctgggagacaagaaatgttctgataccagacggaaacttaccgagtgccgagggcgggagccgcttgtctatataggcatgtatgtgcatatatatgcgttcatatatatgtcaatctatacatgtggctttgtgtcgagatagagcgtagagcgagctctcgcgcgcgccaacgcaattagcgttccttcttgcggacgaaaaaacgagaaggaaaagtaggcggggagcaggaggcgtgacatttcatttctgtcctatgttcgtagacgtgggttctgcccggtgaagaatgcgttcctctgtttctagcgtcgtactttcctcgctgaaaaccctctctgcagggagctcatctgtttgtttctaaaacttctcccatagcgcagaccgagtcgctgtctccaccgggttaactctgaagcttggaacactgatgaagcacgcagatgtgcacaacttctttgcccccgaacttgaggcacaaaggaacacagttcgttgcagacacagccataagtccacgcgcggccatagggaggttcttcctcctctggaggcgatagagtgatatcttcaaagctgcgtcaaaatgtgtaaatcggtcacagagatgctcacattgtgggtgtgttggcttgcatgctgtacttcttgcccacctttccaggtatttatttcaccacatgtgggaatatctatattggtataaagacgccctttggtgcctatgcaacggaatcatccgctgcattcttcaaaggtgcccacagaaatcctgcgcatgtattcgtatgtatcggataacgtaactatcacggagctcaggttgacaccggactgcagtattcatgcgtgtgttcttgcctgtgtaagtgcataaaaatccagtgaaacacccgcaggttgccggtggtaaactgtgaaaagtaccacactatgtgtttggggcattttctcaggtgatcaccaactttgagatatcgcagtcacgcatgtgttcttcagctacagaatcagcagcttgtgcgcctgctggtttacctgcagggagagggggcgctacggggggactgaaactggactgtcgcaaagactgttgtatacgaataactgatcgtaataaatagaaccgttacttgttctttccctacgaacgttaagaaaagtaaacgaccagtcttgtacgccgtcacttacctccaaaagaaacacccttggacggatcaaccggagggtctactgctgcagttggcgttcaaaggggcggtcgtgaaagcggaagaatttgttttcaggtgaaggaaagaagtgttgttggcatttgcttcctttttgaaacggacaccggggtgacggaagattcgtcgtcgtcaaacttcttcgaccgccgcagcatatctttggatgatattggataagactaacaaagtggcacaggcaatgacgctgagagggttaaaccatcaacataaacaggttcccgtttgactacagcaaatatttagtttttgttttggaacagcgacgacggtccgacgtagtattttcctttcttaccacagagtgtccatacaatctggctgagagtgtcaacgtgagctggcttcaactgctcgtgtcaagtctccggctcaactcgtgccgccaccaatgagtgttcctgggtgcaggttcaagcagaacatagcaccggacaaacaggaggtagggtcacctcggatattcaagaggatcctcttatatgaccaataaatcgccgacaaattgaccttattttgagtcttgaaatgctgacgagttagctatatagactttgccaccggattggttctatgttcgtactgaaccagcgttgtcctcgcttggatctccaaccatcaccaatgaagtcgttacatgcaagagttcccttcataaacagcatactcaaggaacggggtgcgctatactaatccagtctagttagttccacttctgacgaaggtacaacgtcggcgttacaccagatgtgagtggaactgcagaaacctagaggggtgtctctggatctctcacgcacgggaggtctcttctcgtttgtgcgcttatgttctgaaaaaacaggtggcttttctgcgcttctccaccggcttacccattttacgtaaagttcccagctttttccgattgtcacgcatgtcccgcattcaacgcatcgcagttggcagaatactatattaggggagtggaaccacgtggcgagtttctcttgacatgtcaacactgtgtggattctctcaactggcgcccctgcctctgtgcactttaatgactcaatcgcttttccagaaggcctacagaatgacaccttcggcaacccgcctgagagctggttgtgcactgttcgctggaactccggggacaaattcaggacttctgtagccccgatcatcccccctcaccccccacctcgtttttccttgctgaactggcacaagccaagcatttccatttgacaaccgattttaaaatggtggcatcattactagaaaggcaaagttcttcgaacgcgatccacccgtgtgccgcgtgtaatgcactcatgcagtacagacaagcgagttcgagccttcggtacccttcattcgcctacggccctgctgaaaagggtctggaaagtgtttaaaaacgaagaaggcattcccttcgtccgaaacttcacggaaaagatgtggcgggagttctcaaactctagtgcaactcgcttgtcttgacagctagccagacggcatttcctcagactcaacagggcatctcttctgtgcacggagagtctagcaggtgggactgatgcagatcttggcgtgaacaagtcgacttttctttgaagcgagagtcaaagacaccgccaccagttgagctagagtgctgggaagaaaaagaaagaaacccaaactctcccttcgctgtgcccgctcctagggtcaccctgcgaccggactctgcctccgcgtaagcggcccggcctgtcacctctcgagacattttgtgtctgcaagcgatgtcagcttcaccgtaccaaaaccgttctgctaatcgcgggaggagcccaccatgtgtccactttttcgctcctttctgtgatttttctgaccacgagctgaaacctagacgtctgtgccgcactctaccgcgcctcacggtctgagcgccgccgttttcaccggctgcttctcctctttgtcgtttcagaggaaactgcgtgttcgcttacctttgttcttgagatttcctttttttaccgacgggatttttcaggaagaacgccggaatactgagaaatctccaagggtgcctgtgctcttacagctgccgcacggcctcaaacaggtctcgttcagcagtgccttcctgctgtggtatttgcaacggagtgcaattgcgtgcaaagaaacgcatgcatatgacaaggcctttcctgcttcacgagatagtcgacgcaaaaaccttcaatgccctttttccctctgtccgacccacgttctgcctcgccccttggcgcgtcgttccagagagaacgctggggccgtcaaaaggctgctcgacgtccggagcccgttactacactttgaacgcgaaattggcatctgcaagcgcgcgcgtgtatcccatacgtgtctgcatctgtgcttccccgatttttctgacgaattgccgttttctcagcgcgaccgcaactcagtgttgagttgcgccctctgtgccgcaggcaggagtctgtactccacagaccgggctgctctttcgcttcgcgatcttctcatcatgtgaagaagtcgggacccagagacagtgtcgaattccctcttgatttccatctcacca

SEQ ID NO: 1765 - DNA, 2005 bp, Toxoplasma gondii
  source 1..2005: mol_type = genomic DNA
atggagactgttgcctgcgacgaaggcgaacgatctctcctctgtctcttctgtctcctcgcgcaggtccctttcgcatgttcctggagcgtctccacttcctgcgcagtgtggggaacgctcgcgcgcgtctcgcgcattcgcctctctcctctctctctcgctgtcgcctcggaactcctggagaaacggcgcctctccaccggggcgcttctccacatccagcggctggttcgttgtgcgcggagcgagagctcttctctcaggaagaagcgagacgcatgtggaggacgcctcctctgcccgcgcctcgaggaaccgcacaggcggaaacgccgcgctgccctcgtcctgccctgtctcctccggcacaggctccaagaagcagggggcctcgcgcgcgcggcgcaccgcagagacccgtcgagcgcccagagaagcgcctgaaggcgaaggcggcgcaactgcgcacggagacgaagagaacgaaaacgttagaggagaaggggaaggaggagaaggagaaggaggagaaggagaaggaggagaaggagagggaggagaggggggaggaggagagggcagcgcatcatcgagaggagttaccggagagcgaggcgtgagtggaggggtgctgttcccgcaatcgatgagcggatggcgactgatttccttctgaattgccgagaggagaagaagcgtcgagcctgaagccatgtcttcctcatctccactccccagagaagaagactgttcgccttcctcagcgctgcttcctgccgggaggcctgaggcggactcgcccaccgcgcctgtctcgagtccggagacgaacggcgccggtagccgcgctcgagccactgcggcccacggcggggccttcggaggcgatgctcccgaaggagacatcggagacagccggagacagaagaagaagacagaggcaactctcaggtagagagaaggaaagtggacgcagcagaccgaagagtcgggctatagcgagaaggagattctccgagacaagaaaaacaggcctaaaaaaccgactgtggctaccaggccatgagagagagggacaaaaaaggtcggtgtgacgaaagagggaagagaaaggatctgcggatcgggaccgccgctctctcccccgcgaggtccccctcaacggatccgtctgcgtacgcacaccgcgccgtatttccgaggaaacgaagaagaaagctactaaaaaacctgcaattgttccggtggagaacgtcctctgaaacagggaacggctccttcaaaaggaggggaaggccaagaagaagaagaacggtggaagaagaagaacggtggaagaagaagaaaaagaacggtggagggtgcaagacacaacggggcacactagactgcaactgcgaggaggggaaggcctccagcaaagaagaagagctgcgtcgacatgggtgattaaaaaagcgtaaaaaatgaatttcccgacagaaacggtgcacactacaacggggaagccgcgagagcggcgcgctgagaacctgtacctttttttgcggctggtttctcgcctcggcgtcgaaacagagagcggtgacgccggggaggcgagtgtaaaagaggactgagacaatgaaagtggaaggaaacagcgtggagcgacgacacagaatcctcagaaactgcatgcggtttcttctgggatgaggaggctgcaagacgtgagaagacctctcgatacgagctcaggccgccggcttcttcttccacgcgaaagccgagaaaaaggtcggaaaagcgagtaaaaaacggagaaatcgacaggcaaagacgagagggacaggcaaagagaaaaacgctggggaaaagggcagaagcgaaggaagaaggccaaagacaggacagcgaggttgttcgcgctgctctgtggtgtgcgcgccactgcggcaggagaagcgggcaggtgaaagtcacaaggaatcacaaggaatcacaaggaattgtaagggaa

SEQ ID NO: 1766 - DNA, 2145 bp, Toxoplasma gondii
  source 1..2145: mol_type = genomic DNA
ttctgttgcttctcctctttccgcatccggctcctcaacatttgtcgcttgctcggctcctcctctctgtctcttcttctctctctcgaggtcttcctccgcgacctccttcgctctctcgcctcgacgcgcttcctccccgactgccgtccacttgctgcatgccctgccagaactgctctgcctctcctctgtttcgtcgatgacacccgagcagacagacgtccggacgcacgaccggaaagaaggaggagacgcgcgttcggcggccagagattccagactcgatcggagcaccgtcgccaaagggagcacgacagcggtcacctcaacttcatcggcgctctctgtatcttcttctcgtccttgttctctcacttctgtgtcgtctgggcctttgttccttgctgcgttcctcatctcactcccttcactttcgcgctcatgtccgccgccctcctcgtcttcaagcgacggccgccaacacagtctcctcttcggccgcgtctccctctccatctccctttcttgtctctctgtcttcccctgtgtgctcctcgcagcccagcttctcgcgccaagtaactgggcgcagagcacccggcggacgaagagaacagaagcgagaagaagaagcgaagaagcaacgcggacgcggagcacctggcggacgaagagaacagaagcgagaagaagaagcgaagaagcaacgcggacgaggaggactggcaggaagagggcagcaagcgaggagggagaactcctccggggcgaaggacgttggggaggacacagtggagaaacatgcgcatcgagaatggaggtgagcgagaagatcaggagaaacgaaaggccgacgtcggagaaaggcaagaccggtttcgatccgttgaggagaaaaacagacagaaaggtgaccgaaggaggacagactcgacaaccagtggacgaagacacagagcaccggcggtaaccgagaacgtccagtatttttcggaagcggaagaggacgccgagagagcaaggagaaaggcaaagaccgccgagaatgagaaggtcgaataaaaggaaagaagcaagaggcaaggaatggaggacagatgaaaagcgaacgccatctccgactatttcagctcgagaaaagccgcctcccagagtgcttaatgccttcctcccagtggacagcgaggaaacgaaaaacacccacacacacttgaaagcaaaactgcttgtccgatctgcacttcctcctcttcaggtgtacatacacctggctctgagagcacgaattttctcgatgaaagatggatgtccaagagtatctgtgtcgtctcgtctgccccagtgcttttgtctcgctggagacatccccaaggaagacactttcgtcgctctttcttcttctacgccatgagccgcggtgaagggccttcattttctcccctgcaaatagcttctttattcgctagtctccgtcggagaggtgaacgtcgcctctagctacggtccgcagcgcgtttcgccgcttgtgactctattgattcactttccttactctattttctaccttcttcaccctttgaatactctagcagaaagcaacatctgtaaagtacgcgaatgcctgcatcgtccagaagtgacgcggcgcgtcggtagaaggcggcctcgtcagctgcacatccataaaagcgccttcgtcagtctgccgctcttcgaagagcgcttgtctcgcatgcgcttcttcgttgacgaaaacgtatcgaaggcacgttgacgcggttccttctgtcttgacttggggggagcgcgcgtttcgctcgaaggtctccgtctatacgccgatcggcgaggcgcctggaattcgagttttgtgtgggggcagcgcgggtgcatgctgggattttgcggagaaacggggaaccggatcatccgaggaatttgcgttcgtttccgcgtcggcggccccgcaaatcgcttttccttccccgttgctgagacacacaacctctctttcgtttctcttgtcgcgtgtacagtcctgctcgggcgcactgtctctccttgtgtacctacaccacccgagaggttcgcgttttttccagtctctgtcctccgttttttgcgaatttcgccgagcgaaaa

SEQ ID NO: 1767 - DNA, 3008 bp, Toxoplasma gondii
  source 1..3008: mol_type = genomic DNA
catgcacagatcgagagagttatgcgcgcttgtgtgagagttgaagacgccgtcgtggacctgccatgggtccggtgcagagacgcacttccagtctcgttctcgtccgcgcatgcaaacaaatttgaatttcaacaaaacgcactatgcacacacacgaacgtatacgaagagaacacacagacgttcacttttctccacatacacctacctaacaacaatatatacatatatgtatatatatatgtatacatatgtatatatatgtatgcaaatatgtatgtgtgtatgcatgtgagtatatgtcgactgcgcacgcagagggggaactgacctcgttgggagtggcttcgtcggcgagctgaggggagaaaaggtgagactgactgcttgcctgactttcgaaaaaagtctccacagcatcagcttcggggtgggcgctggtggtgcccttggcgcacttaaagaaggacaagaaagtcatcttgaactgcggacaaaagcgattctgcagacacacacagagagaccgagtgtacagacagaggtgagcgctccagcaagcggacggtcgacagcgagatttacagagacgccccacacagacagattcagcgatctgctaccagatgaaagagcagagtgatgcgaggagaagacaaggccttttgagtgcgagaagacgaagcctgcagtcgcagctgcacctctgcacctgttttcaacttgcctacgccggtctccccagcctgcatgcatccagctctacacatgcggtgcatttacatgactgcacatgcagagattctcccacggctgtacagacagcgagagagagagagaagcgcttcttccgacgacgacgcgaaggagaaggacgctcggctgcggtgtggtgacagtgtgtgggtcgggccagcatctgtcacgagacagcgtcgaccttcgcgagacgcggaaagaagttcacgaaacagagaaatcgtttgccgggatgtgcactctcttgcgaagagccgtcacagacactgttgggcgtcgaaccgcagacagagggaccaccattggcaatcaaacggtgacaggcgacaccggggaggagcgacgacaaaagaaaacaagagagaagacgactgactggattttccccagagagacaagagacgagacaaagataacggatggagacaagtggacgaggaccaagtggagagacaggagagacagagggcccctggggaagaaaggtcgagccggcacaggtgctcggaagggagactggcgctaaacgtctttctacgagtttcgcttttccgcagatccgagttgacgcctacggtggagtttgaggttcggagcgaagctgaagcttctgcgtgttggaatgcaggaaatccgtttgcgagaggacaaacaggcgaaggcgacgcaactggaagcaggccgggtcgcgggggaaaagactggaagtcaaggagcgtggagctcgataaaaacgtcaagcaattgctgcttaaacgcagggcgttgctggctttggtctcaaaagaatttgatttgaaaagcttcctggtcccccccgtccctcagtgccgcacaggtcacgggcgggtgctggcgcgtcaagcttcggtgtacatacaccaggggtgcaggcggtcgacggcgaccttctggggaagcgagacgcgcacccgcaaagcgcaaaaccgggagctgttcgcttgtctgtctcgtggcgtgcttcctctctggagcgccggcagtggcctcggtcaccaggccgctgtctctttcgcctcgacgctggacttgcgtttcctcctgcaaaaaatcctactcgacccgccgcacgaccgctgaacggaagcgtcctgcgagactcgccacccgcgccttcttgcacattccgacactgactcctctctgctcgcttctgcgtctccgtccgctctgcttccgttgccagcagcggcgtcgcggcgagcgcttcgccttgctgcaccaggtgtacgtacatctgaggggtcgattgactgtcggttcgcaggccgcttcgcctaccgccttttcaccaccttccttcccgctattcttgttcaattctcccttttctgcacatggactcgtctcccagtcatctccctccaaggacgggaacctcactcgtccagttttgtggggtctctccgactggccgcttctttacacgtccggatccgcgattcggcgtatattcgggtgcaacgccgaaaaatcgcgcaactctcgaacgcgcttgccgaggtagaggacacacacagcctccactttgttctgttggaacgcagtaagaagagactctgcacgctgcacatacgccagagacgcgactgccggccagtctgcctttcgtgatcagctggctctttccttcgtctcagattcagaatcgacaccgggaaacgcggctccccctccgttggcttcgcgctcttgtctgcttgcacgcctatgtgatacgtgtttcgtggcgttctgccttcgttttttctctaagtcgcatttaaagagtcctctttctgcaggccccagatcgctcggacggacgcgaggccagcgctggcggttctctcccctgcgaccgcgcgtgtagtcgttttctatcgtgggtctggggaaaaggatttttttaaaaagacaagacagaggatattcgcccccccagacgatgaccaacaatgtgagagcgcagagagaccgacgggactctgtcttgaactcccgttctcgctgcgtcgagcttccgtcgcttccgctcctctctgcttgcctccgctgtctctcgcctcgtaactgcctatagaaacccatcagtacacgtcaacgtacacacagctacacacatagatgtatgcatatgtattcgctgtttcgctgtttcccgagctgtagatcgctgtagtgttcttggctgtcgagagacagaaaaggcccccctctctctgaatcgcggagcttgcaaaaaa

SEQ ID NO: 1768 - DNA, 2207 bp, Toxoplasma gondii
  source 1..2207: mol_type = genomic DNA
gggcctttcaccacacaatccctactcgcgcacagaggcaaacttcccgcctcctcagctgcggtgcgacgtccagatgtgtcgaagctctctccgtggcttcttctctccttcgaaaggcttccgccaccttgtctgtctgcttctctgtgttcttgtcttccttcctgctctcgcgggctcctccctcggtctcgcagcgactgttctgcgtctgcgctgaggacagggaaggggaacaccgagggagaagaggcagcgagcatcagctgggcagtctgagcggcaaggaggcgagggtcgcgggccgcctccggactcgcgtcgtcgacactggcgccgtcttctggagagtcttcatcgagggaagagggaaggtctgaggagctcagcgacgtgtgcccccaaggcgaggagaagcggccggtcgcggcggccgactgttccggctcgagttctgcagcctttggagaggaggccattgtcgagacaaacggaagtgacagaggacgaaggacgggaggagaacgaagaaagggagaagaaagaagaaggcagagtttcgagtcagaaaacaaggtctgagagcagggcaaagaaagcaggaaaaggtgacgtcggaaagagttggagaaagccgtccagagagaaccaagggagatggagagccagaaccaagcacagaggcaaaagaaaaacagaagtgtgaaggaatctatcaaaagaaatgaacaggcagacgccctgcagggcccaggagtgccgagacgccgcagcagagagaacctgagttttgccaaggaaaacaggactaaaaaaatcggaacaaggacatccagataaaaacagatgtggactgttctgtccgttctgcccgccgcgtgggtttttggccgccacgaactcgctcaggtgtatcgacacccgacggtcgacttggggtgtacatacactggagcttctggcgggcacagagaggaatggcgcacaccgcgagttggaaagagtgaaggagctcaaaagaaccatggcacaaagggaactcggcacacttctgctcgagcgccggacggtcccctccgcgcccgaaaaaagcgtcgcgtttctcgcggttttttcccttcgcagagtgggcgactcctctcgctctcagtcgcgacgaacacatgcggaaaaaggcttcttggaaagccgtaaaacctgccgaaactctcgagagtcttcgcatgcgagacaaacagagcaaacagagacgtgcacctcagaaccggcagagcgccgcgtctgcgcggccgtccgtctgcccgacagcgttggaaactttgcgcccgactgcaggtcctttcagtggcttttctcacaaaactgtagacggtttccatttcttttcagcgtcgcagggagaacgcgacgagcaacatctagtaacccttcgcagcgtcgcggcgcagatcagaaagcaagagacactctcagacggcttctgttcctctctcctatatcggcttaccgtctctctcgttttttcgcgtttgctccgtttcgcgtttgcttctttctgcagccgtccaacgcacgcttcttgttttcagagaagaccctgcgccggagactctgtagccccgcgcggaaggacttggtggatcttggaagtcgcgcatcacttgcctttgcacatctgccagcttacatctaaccgattttcgaatatctgttcctccgtctttctggtcgcttggggatccccgagtctcctgtgttcttcctgcatcccctgtttatttccttctcgctcctcttctctctcttcctgttttccttctctctcttccttttctctctctcttcctcctcttcccactcttttctctccttctctctcttccttctctcctcgcgccttcctctcttcttcctcttctttccttcctttctcgctccgacattttcttcttgcctcttccgttgtctcgttgctttctcttccgattgctggcttcctctctgctcgaaccgctgcctctgttcgcttttttcctctcgctatgcggggtccaccagttagtcgccagctcttgcctctcgtctcgtcgttctcccttctctctctgcccgctctcctgtccgtttctctgctgcgcaatgtcgcggaactcgagagaaccgggaagctcccaacagaggcgacgcgcgttcagcgacgacga

SEQ ID NO: 1769 - DNA, 4021 bp, Toxoplasma gondii
  source 1..4021: mol_type = genomic DNA
ccctcacctgtagcagtacatgctctcgtcgctgagcatgagagtacccggccgggtcgcgtagtcgacgattccacaactgccaatgcgaacgacggccaagggttctccttccaaaacaaaagaggcttcacgaatgaaaaaatctgccatcggagcacccatgccaatgcagacgatcgacatgcgctgtccgcctttgatgtatttgcctgaaaacaagcagagaaaaacgaatactagagagttgtgaacgccaaaaaacaatccgaagaaagccaccgccgaccagcaggagttgccacgagctggaggtcctcgggtttgtcgaagcactatcatgctatgacaccccgaagcacacgacttaaaagatcgttcaaagctccctcaccctgttcgggtgctccccatacacaagatctacgtgggggtgctcacgcgtccagttcggtctatcatcagtctgtgggttttctaaactcccaaaaacggtaaaggcaaccgatacgcgttttttcagtcgattcactgcctctgtgcaggtgtggaaagggtcttccaactgacgtcgccaggtcatctgccaccgttcgctctcccatgttgtagaatgcaaatcgctacttacccgtgaaggtgtagaattgtcgcgaagaggaaacctccgtgacatccgtaaggaatttcgctgcgagaacccgcgcgcgctgttcgcagccgaccgtcacgatcagtgatgccaagtctcccttcttgacgcccagatggtacgtgcgaccatccggggtaaggaagatattctttcctttgagttccgactgtcagcgacaaacacacaaccacaggacacgtcgtcatgcccccgtgcataagctagaagtttagatagctaaataccaggtaagctcatgttgaaaacaggctagaggcagaaaaaaaagccggaaaaagatgtgatctgcaactggtaaagatgccactcttgaactggcaggcactacgctcgtgtcctgcaccactgtatacgtcgtcattgctgcaagagaatcaactacatactaggcaaatctacggcaaaacccctcgtcaagaactgtgagggaatggggcggaagcgcccgcccttttaaatgcgacaaagccagaaagagaagccccgctgcgtcagacaagagggggaacgcaggcggacgcagccccccgtgaatcaacgcagagcgtagatgcgtgccctatcttgctgaaactcaccattgtacgcaaaaacagaggcactatatacacgacctaaaggatggcgaaacgtttcttcacttttgtttggaagacaaaagggaatgttcaggcagcagcctctcttccccagagaagaacatgcaattctcagcttgggcgggtggaccagagtccggcggtgcgccttccgcgcgttggcgactgcgctgcgaccggcggttttctttgaaagcaaacgggggcgggaccatggggactggggtgacagcggtgctcgggttatgtacagaaaagatgcatcggtctacacaattcacacgtttgttcacggggtacagtatccgctctgcagacaccgtccgagcgggagcctcgtccgctgcagattagaaaactgaaactacacgtggaaaagggattcttttgttggcacaggggtgccggtttcttttcccgtggatgaggctgtgtgcaaagcgggatgatagggagttcgtgtgataccccttgctggagactaagcctgaacctcaggcactctgtggtcttttcagaagcacagtccagtgagttagctgcagtttcctgctacaagtgcacaagtgcacctcgctgtgtatgtctgcatgccgcgactcctctgagcatcacccggtcaacgatcaacggcgttacgtgcctgcaagtaaaactgctcgacttaaacaagttcacgggtaccactgtatcacgtattcacgtatcgcagagaagcggcgccacgccacgggatctttgttcgagctcggcattcaatagtctctagcgtggcgctggagtagtgaagtaccggatgctacgttcaaaatgacaatctcccaagttaggcgcagcaaaggaaacggaaggagccacgtctgacggagtggctatctgctttctggcaccactgcacgacacggcatctttgtaggcacaaccgaatccagagctgagaccgccgcagctagagaaattgcggggaaaccccacagttgctggtcttcgaatgatgctgtcgaagacgtcaagcgatccgcgtgaggcgacctgttgatcttcagattcttctagacattctaggtttcagcaaaacggggtcttcacatgacaagcaaacacgcgtttcgacgacccttaccatcgtggtggtacaggaaatcacatctttacacgattcgagtgagctcagcaatgcagcgattaagcagggcatacctcaaaaacataagcagcaggctggcaaagaaagccccaacacgaaaaatgcagtgacatgttagacctcgtcacagtcgacccctatgccgtcctgattgggtcagactcttcggctctccaagcccatagatctagttgtactcgattctagatttctccaggcggcaagcattctgggagtgaaatctcattaatctttcctgattcatggaaaacgctcccccggtttatgctcctcgacgacaccagcggcagagcagctgccagcgaagagtacagctcgggttcacagagctctgtgtgaccgtaagagcggtacctggccaagcgtcacacagcaaaaacaaagagggagtggccgcactcagttcaggtttcgcaatatttttccattctcgtgaagagagactccagtgtcactccaggatattttcaaaaggaaacacagtgaccttctgtatgtcatccacttttccgcgtcccgatatggccgttgcaattagctagaggcagctcaagcgacacatgcagggggcccagtgaatccgtggcgggtccatcggcgacgatgaagccgatgagtacgggactttgtggacggtattttttcctctttatctggagagtggttggccacggcgtccagctcctcaactgctagtacgggccttcaccctctcgtcccgtgtcgtctggctgtcttactgaacgccatctctgaatcgatccgcgaccggggttcctctctagcatccggtggatgctttttcgtgtctgcttcgctgcagttcgatgcgtcaagcgacagttttccagaaacggcattctcttcgggttttttttgcgcagagctgcgccacaggagcacgactttcccctgcatctccgtcgtcgaccacccacgctgcctcgcgggccgtttgccgaggctccctcgacccacgtcactttggaagatgtgtaggacttgctgatatgactcactgagattcaagtcttgggtggtcacaggcgtgtgtctgcttagtgcagctgcagtgcgccagcgcggctgcgctgtcgcgaggcgaatgaccacggtagagcgctcagaatgtatcaagaacgtgcatgtttctacaacagagtgaccagctttgcaggttcggtgcggctccgccttgttgccaggcagcatcttctttctgccgtcggttcgcctccgatgactcggtcagccaactgtgaataacgcaccctgcacagtggcggtaacgctctggacctcctcgcacgctctttgcattccgaggtttcatagtatcatcgccacgcttttcgccttcttctagtaaggggtcccagctggtaattcttggcatacaaagcatggaaattcgggacatcggccgtcggacgcagtggtctctttgtccagtagctgcgtgaacggctgcgcataagcgacagcgttttcgcgtctttccgtgtatagatctgcagggaagccagcgcgactttttgttttccactcagcttttccataatcgcgaagaggtggaaa

SEQ ID NO: 1770 - DNA, 1948 bp, Toxoplasma gondii
  source 1..1948: mol_type = genomic DNA
aggagacccgcagaacagatgaggcggcaaggagcacgatggtttccgccggactgagagaagaagagagggcgggggaagagctggagaagagccgagaaagcggcaggacgaacaagaagaaagacacgatggaagggagaaagaagaagggaacgaaaagggaggacttgaggaaaaaggaactgcggcagtccaccaaaagggtgaagagacagagggaggagcggctggacttcgaaagggtacacgccagcctctcgaacctgcggagaacaagggacagcgttgaaacggagaaggaagtcgagaagaggtctgcagagcaaagcacagagaaccccgttcacgcgagaggagaggagacactttcaacgaaccacaagggatgaaagcagccgtccaagacggagcggacgaggctaggttgtgaggagacggccccacagagccgcagagaaggaaggaagaagaagacaagaggaagacgacagaagagaggaaagcagacccagaagaaggcgacagaaacgcacaggctgtctctctccttgctctcctcgaataggacagagagcgatgcatcgaggaggctgcacagcgaaaggctctctcagaactcctcgccttcgcctttatctcttctccgctcatcagtcttcttctctctggttctcctttgctagtctctcttccttcttcttctctcttttcctctctgttttttttttcgtcctccttcttctcgaggcctcggtgagaagggagcaagcgaggaacgagacagctggagaaaacgtttctgggagatgttgaagacggagaagagacagtgaacatgcgtggagtgtgtgtttctgattggttccaaggtcaggatgatttctggaaatccgcgatttccttgtctcccggtcggtgtcaggcatcagcgtgaccggggcgcgcccgcgactcaggcccagctgttcttcctgtcaagttgtattttcgctcgactgccgtttcgtcttctcaaatgaacttcagaaatccaagcaaaaagtcgctgcagggaaaaccgagaaaagccgaaccgagtgtgcatgcatcgacagcgcaaagaacgccccaactggcgtcgacgaggcatcgcgtttcagcctccctctctctctgatggtcttcttctacttgctagtttttctccgtttttcttcgatcttgtagacggcgcggtggacacacacttcgaggcgaatgtgtgactcagatgtcctccctttcttgcagtccccgtgtggaccccccagaggcggtcttgtctgcgcagcgcgacttctggctggctgccggtccatcactgtacagctcgaatcctttctctttttgactcgaactccacttcctcgttctcactctcactttagaggggttggcctgcctggattctcctgttttgtctcttttcggagtgtgtcggtcctcgccacgaaatcgaatgcgcttgactaaatatcagctcgttacggtctgtgcgttgtttcctcatcttctgccttcttcgtcttcctctatactcgtcttcctccatactcgtcttctttttctcttctgtccttccttccgtatcttcttctctcccgagcctttcctctccacgctttccactttcttcgtctgctctccgcatctcttctcttcgtcgttctttgtctcctcttctcatcttcttgtttcctcgccttcgtctttccttatccactttccttacctctgtttaccttcttcgttcgccttcttcctctatctctgtcttttctggagttgctgctgctaccagtgaaatccttgcgtgagtgatctgaatcaaaggctttgtgcactgtgtcgcgtgctcttctttccctctcttctccgttgaaaaaaatcgtgtgtttaccacattcttcactgtctcctcccgcaa

SEQ ID NO: 1771 - DNA, 2424 bp, Toxoplasma gondii
  source 1..2424: mol_type = genomic DNA
aagagtctctcggctgcaaggagtcttcagagtgagaagacctgcgcggctgcgagtgatcctccatcgcgcgcgagcagacggtctcgaggcaggctctgagaagagcgaccgggactacacgcgtgtcgagagaacgtttcttcgagcgaagacgcgagaggctcctcaagcggcaagacggaaaaaggaaaatacggtattcgaagcgaactctgtgtcttctttaccggtatacatccacatatatacacgttctatatgtatatatcggtatgtatgcatatatatacatacatatatgtatagagatacctatagatatctatagatatatgtgtgtgagcgaagaagaaggagtcagtactctctctgacgctttagacgagcggaaagagggccttctggagacgtctggggtgcgttcgaggagcaagagaggtcgaaagtcgaactttcgccagagcggcgacgaaggcgttgtggatcttttgcagattcttcggagacgagttttcaggaatcaagaaaagcagtgccggcaacgaatacaacgctgtgtttcacaaaaaagaaggtcaaccggttctttccattctctgtttaagagacggggcgctgacggcgtaagtgcctggagagactttcagtgctctctgccgctgtcggctttgtggacctctcacacccaggaggcgaggcgacgaaaagcatgcagaagatcgaaaaaagagaaatcgaaaacgctggaaaacgtcagagaaatccagaagtcacgccgagaccggaacgcgacgacacgacaaagaaaccgcgtggacgtccgacctcggcaagaggtagagcaggccggcgaaggtgcagggggagcttcgctgcgcgtcgaaaagaaggtcgcaaagccggaagaacacagaaacaacagaagcggggagcgtacggctcttcctttgttcgttctttaggtgaaaacgaaatctcgtgggagtggaattaagagatttgccgtcctttagttgtccttggactcgagaggcatctcggctccgagcgtgatgaccagggcgcgtcttcaaggtagagaaaggcgagaaagaagtctattgctaatgagattcgtttttatttcgtttccccggctcggttcacgtttggccagaaaagtgagcccgtcaagcggccgcgaaagctctggaaaagtcgttttccacggcgtgcgcggtccaaaaacgaaaaggtgtgcagcaaagttcccgtccacagagtgagaggaacgcaacgaggagctgtcagaagtttgcaagcaaaagcaaggggttcgcaaggagacgccgccagttccctgcgagctgagagagtgcgaaaaaaaaacgtttgtgagactctcatgtgatagtcgggctagcaaatgccgcgaggaaccgcagcggcagaaaggcgttgcgtcgcaaggttgtttctgcgtggcgttcgattcgagatttcgaagatgccttaggcggcttcgggagtttcggtgaattggaagaacgcagacaagcggcgaggcagcgcgagcctctctttccctgtgcggcgacttggacttggcgttttccgcgtgcggctgctcacccgcgctgtctgctgcggcgaattcgcgcgaaaaaatgctttttggtcgcgaaaagcggcccggacatgtcttccccaccacgccgggactgtggactgacacgcggcagccagtttcggtttttgcgtgccttgtttggcagcgaattcactcactatcagaactgtgagagccgtcacgattcaccccagtagtagcacagaggcgcgtcttccgcgatttgtctctctaagaagtctcccactgcggagggaaaaaagctcaacgcgcgcgcgtaccttgtcagtttggcgttcttctactttattggcgacccagggctgatttttcagccagaatttccagccgactgtattccagtccattcgcgctgcttcgcccccgcgaccgatcgaggagcgaggacgagaatttttgtgggaagtttttcgaagtggcgccgttctctggtcaacgggcgccgcgggtgtgtgaagacgcgacgccgacacaaagaactcgactatcggactcgcgtttcctttcgtaacagcgtgtatagttccatttcccgttgtttttcgcggtggcgtggcgcgtttcacctagcccgcaactggttcgcgtgccgtccaccccagcgctgcggggaggcaaactcaccacgcagaaatccgttttttctgttttatcgtcttcgacctttccttttgaggaaccccatttcgggaaacggttttctgcgtggctcggcgcgaggacttctgctcgtccgctgctgtgtcccgtcgccgttgccccacgtcgcgccgtcacggtcgattatcgca

SEQ ID NO: 1772 - DNA, 2740 bp, Toxoplasma gondii
  source 1..2740: mol_type = genomic DNA
ggagtctgtttctctgctgtttctcgtttttctcgttgagagagagcgcacaatgcagctgaaaagcagcagcgtgttcagaggggatcgtaggaattgaggcattgtcgatttctgccgcgttccttcgagttttttcagaccactttgtttcaacgctatgtacaatactccccgtttgtttctgtggaggcgacgcatgcgctcgcaccttctttgtggcagtatagacgcgagacgtcgcagaaaaatattcctttgtagtaaaagaaccgccgtccctgcagaagacaagcgcatcgactcttaagggttgaactctcgaaagacacgtgaacactaaccttcgtaaacatagtgatatatatatatatatatatatcactatgttttccagggagcgggccgttcctgtcaacagcactatattgattcatatgtatacccatatgcgtggtatgtgcgttggattacaaccgcgttctgttgacgaaagactaaattcacacaggcctgcatatcggctacaccacagcatttttgtgagttcttgaacttgccaggacgattgctgaagctgcaaactgccggcaggaagaagccacctgagcacccggcgtttcgagtgtacattcaccctcaggagcgaaggcctggcaaaggcacccacggcattcgtggacttttcttgtttccaatatgttagagtactcgagggaacgtctggaaatatccttattcgtactgtgtaacagagagtcgcgcctgagttgttctccggtactggctgcctgtcgactcgcatgtggctcgtgagtctctcaacaactagcggagtgcttgtgcgctggtggcacaaaagtgtgccatccagtaaggtgcgtggaaactgtccagtcacgagagaaagcgcgacgaagcgaggaaatcaggagtacttgactcgagtgaaatcatggaagaagggggttctagcgagtcgaaagtgaacgaggaaacactcaaagagaagggcgactcacgggactgttcgacattcagtaaatgcctttttgaagtcgaaacacagttgttacgtcactcacagttgctgctccacagacacacaaatcgaatcttcgaaggtccaggggagaggagctatgtagatacaagtgtagacgcatatggacagtcttggagaggaagtagatttctgagcattcgtgagattgcgtttcgctatgaacgtttgagaaggggggaaattcttctggtgtgccctcccttgctttcggagaggccgaagtgtatgtacacccgaaggaccggtcgttaggtctctacaggcaggctggaaagagagacgcctctctcctttcccctgcgtgttcttgttcgtggaagagagtcagaaaagtagagagaggagggagaaatgacggaggggagaaggcgaaagggaagagcagaaaagaagagagaaaaagatccgttgtggaacgccacccgccgactgcccccgagagtcagcgtgtctcttcagccccttctgtgcaaagttcaccaatggatgccttggaggtggccacagacaccatggagacaagaaaaaaagatgaaaacgaacaaaaggttctgggattgcgttctccgtttcttcatcttccttcgaacaaagagactcgaggctctgcgtttctggctacacatcggtctgtctctgaggaaacaacacatcgtagagaagttagttcaccgctgtgcctcttgacatattccacgctctctctccgcggcgcaccttcctcggaattctgctttgaattcgttcttttcctctttatcttggatagcaacgacgctttcgaggaacccagtctcaggcgtgtctccttcgagcgacgaaagacgacgtctctgcgtcccccgttttccttgcttcttctgtttcccctcccatttcgcatggcaattctgtagaaatgaaccttccagacgtcgtttcaacatgttttttcgtctcctcctcgctcgcgtcagatcgagtgtatgtacacactgttatcaaaacatgtggtgtgtggacaactgtacgcgtacttttggggtgctccagtcatttctgacttcctcctttgtgcactgaagcgttccgagccattttgcggactccgcgtcctttcgaggagagaagacgtggtggttctgacctctcttgacgccgactcggtgtatgtacacttcggtctgtcctcccgcgtgtgtcggatgccatgcttgtcgcgtcctctcattctggactttctccggtcttctcttccaaaaatggcggaagtgtaggtctcttgtgaccttcttgtcttcttgccgcttcctgcctccccttttctccgaagtcttcgatattcctgcttctcagtctctcctggcgcctcttctctctcctctcgagctgcggccagcgtttctctctagcgtctgctgctcttgttttccgcctctcagtcctcttctgtcttctatccggtttttttctcggcaacccactttccctcaacgccttctttctccagtcgacagcactattctcgctcttccccttctcctttctcccttgcctcattttcttcgcgcttcttagtgctcccttcctgctgtatcacgttccttctctgcctgcctcgtttcctcttctccctttacaccgttctccgcttctttcttctccgtttctccgtcttatcggcttttttcaaaa

SEQ ID NO: 1773 - DNA, 2278 bp, Toxoplasma gondii
  source 1..2278: mol_type = genomic DNA
tcacggatgtcctcctcgacgtcgtggttcatctttttgaccagaccgaaggtaatcagtcccggccacacccatggccaggcgtacgcgctgcacttgcaccagcatctgcaggcacagacatcgaaaacgcggcatcatcaacaactgtcaaccaagcgaaacgaacatgaaaagagaaaaacaggacatctctagtgcacagccacaccgttccggtccccggaacaaaagacctcgcaaaatgacgagaacgcctccatggagctgccggcaccatccgaagactgccgcatcacatcgtcggcaccgagctccgagtttcacgcattgcctgcgaaaagtctggaactcgttcctctctcggactgcacaacgtccctagtcagtgctccccgtcacattaaccgaatgctctcttgcctctccctcgagtcggtgagcacatacttcaggagttcgcgacagaaaccgacattatctctcgcgccttcagcacaagcgtttctcgcatcgagcaactcctgctgcagtcgacgcggtgcgaccggcagagccaccatcgcgtgcatatgcgtacttccgcccaagtgtctacaccggcagattcgaggttttcgacccagactaaacagacatttgtccccgactttgctcgagtaagcgttcttcgagcccccgagctccatcctctcgactctgcctggaaaaaaagcgtcctttccctaggcgttcttgcctcaagctagctttcctcggacttcctttccctagactttcttgcctccgacttgtctccttcgcgcccctggaccccccgtgttgcggcgcgcgctcgcggtccactcaccgagcaaagaaagtgtgccaaaagggatagatgaatttcagctggtacggggaaatcgtctgttgaatgtagccgccgtgcgcagtcaggcggtctctccagaccatctcgaattcgggggagacagggtaagatccgagcattttgcgttcgaatttcggcgcaccgaggcggggtgccgacagagacagcaatcccgtctgcccgcggccggcgaggtactggcaaaggcgagaagctgccatttttagaaaggcgaggtcgcgaggaagctacgggttctccaaagtttccagtgcatgcgcgctcctgtctgaaaacaggtttctgaccacagaaacgatggtgtctgcctctcctctttcgcgggaagtttgctcggaaaaatacaagcgaaggagcaaagcgctccgtttcgctccaggaagaaacgcgagaaaaaatccaggaaaaaaacacacggaacccgtcgtcgagtcccgcctcgttcttggcgtcgactcccgcagagttcaagacttctcggcggccggcgcaagagacgggtggaaagcagcgatcgtttcgagcaaagtgcagaaaaagacgcgtggaaggaaaaacaaaggcagaacaaatccttaacccaccgctagtctctgcgagagcgcgagactcgtcctcagcgttcgtctgcagaacaggagaggcccctttcagtcaggtcatcgcgtgcggcctgtcacactcggaggcgcatcgcgaggtagacgccgtgtggaagagatcgatcgaagctttttccgtcgggatttcgagggaaatcgtgtttctccggaagcaagaaagcgaaatatgcgacctgagaatacaccttaagttgaatcttttttttgcgaagaacccgggacgtggccggctggtccgtcttcgtttgttgaccggatatttgcgcttgcgacaatacaccagtgagcatgcagtttcttcttgccgcgtttgccttgggtcgcttcaagatgtcatctcctgataggggccgccttttccttttcagaaaaccacggagagagacgagagacgctggaatcgagagcgcgtgagatctctgattgcccgaatacacgaacacagggaggtcttccaccagagagctctctgaagtacaccgacaacgtgcatccaccgtgttgtctcttaccagcagaagaagacgagccggtccttcttcacagcggatcgcgagggtctgagtaagtcgcccgacttcttcggttccgtccttttccccgcgacagaaagctccgtctcaaaaccgttcgagacccgccgaagctcgtctgtctactgcgcgcctttttctccttaagtctccgtctcgtctgaatctcttcatctctttctcttttcttttttcgcgttttctcttcgagaaagtctctgcagcca

SEQ ID NO: 1774 - DNA, 4787 bp, Toxoplasma gondii
  source 1..4787: mol_type = genomic DNA
ggtatcctagctccgccatacattgtagaatcagtgtgacgacctcgcgtctagagaaccctcgccatcttttctcattttggacatcatcgtatgtagcctctgatgaatcttcttgggcaccggcatgcccgttgcgaggatctccggctgatgcggcggtcccattacaagttgtagtgtgcatggttgccgttgcgtgatccgccgtccctttgtcttctggtgtcccgaaaaacggtaagctatgacttccttctgctgcaaacagacgtgaaggtgtgatgcccctactcagctctacagaattcgatttcgtttgttccggagtgccactcgaaacaaaggaacctggcgacagaccctcagtcgaaggcgtgtggtcgcgtggtaagtgtctctcttccccggagtccacggaagacacgcagcctccaccactgtcatccccagtcacttcactcattggccgttcccggcgtaaacccctcaacacggtaaagacagcccaacacacgcaacgaaccacagggaagagaatcgcaatctatacatagcatacgagagcatgcaagacagaaactcgggacgccgtatacaaacgtcaaccaaaaagtgtagccgagacgtgcgctctcaactgcttcgaaacgatgggaagaacgggagcgaatagccaatgatcgtggaaaaggtggtgcacaaatgtggctggagaaaaagggacggaaacgaaaggcttccagctgcctgcgcacccgcgttaaggtgtacaggaatgtgaaaatcgctcttgaagaggccctgcagctcccacctacaaaggtgtacaggaatgtgaaaatcgctcttgaagaggccctgcagctcccacctacacgcagaacgcttgtcctggacgagacaaggcgcctccgtaggccagttcgatgggacagaggtacgtaccgaagaaggcgtagagagaaaggggtgactggagtttctatcatgtacccattttcggttgtccggttacttggccgtcaccagctgaatagctcgattcaattgctaaagcgggtagtacctcgagccgctgtgacgctcttaaagagaaattagagtcagtttataattgaaagaaggtgggcgcgcatggaagagagagcgacaaccggagaaacgaacaagtcaacaaatgtgggaaacagctgagaggcgccagtaaaagtcagacacggacgggagtcaccgtctcttcccgaccggcaggtgcgggtgagccgcagttaaccgcaagtgttccttgcgatttttgtctgcgcaaaagctcgctcgatgaaaggaagtctcatgaagacaattattgctggatcaagcaagggtaaaaaatgtagaggcttacggaaaggcggatgactggaaatccgtgtgctgtgtcgacgcgcgtaagctcggagcgagctacgaaggagcgatagcacacaaccacatagcgtgcctcagattggcggaaaacacaagaaggacctctcagcgaaagaaaaaacccggattcggataccgaaagaaaactcggctcaggacaacagtggaggagctccgcggccccaggctttcactcattaaaagcgtgtggtcacaagcggcgtacggaccttcagtctcgtcccactcaaaaaaatgttgtgaaagaaacagacacacttaaagtttctttaatcaaagctgttcctttgtacgtcaattccttctgtaaaaatatcaatgccaaacggcagaatagcgcgcaaccgcgaccacctgtgtgccaactaaccgcctcaaccgcctggctgagcaacgccgtcgccgctgtaggcgtgcttctttgctccgttccctcccaagtgaagattcggctttccaactaggttccctgagccagttggaaaaaggaaagccacacgtaatgcgtcaacaaaaaagtggtaaatccacaagggcgtgacgtcaggcgtccataggagacacaagcaaaacccgtgtgctcccaacatcggcgttcagctgaaaaagcacacgaaaagcacagcgtaaactactgcctctcattgatgtctcacgacagtcaggggccgttagcagggtgttgcgttattgttgatggaagctccatggaagttgtggctatgacgcaagaacacgcaacaagacatgctggctgtggtcccctggttttttagtttaatattagtactcattataggttcatgctgccgaatcaaaacatccttggccatccggactttcggaaattcaattttctgtgcgtcaaacgtgtttgtatcggatttactcatgcggctgaagaacaagtatacgcacacattgcttcagaaggtggccatgggtaaattgcagacccactctgtaccgccttagaaaggcctcatctatggatgacggaacacaaattctctagcccgtacgtccggcgctacgctccaacttgtaatagaaatgaggcagttggagagacctagaatgtgttgtttggaaagtcgtcagcagtctcgaaatatttcgggatgcacggaaaaagtaacagacgaccttcgccttaacccacaatgcaaaatatctggtcactggtcgagaatagaagtcagaaacctcagagcagcgtttcagcagttagcgatctggagctatcatcagccatcaatgttatgtggggaacggactagcagtcggctggacggagaagcagttccacgttgtgacacattcattgcaaaccagagaaatccccgtttcaacttcagtcacgaacgtcgttgggtggtgaagacatcatacgcttcttgaatgccgaaacggatgtagtgtttttcttttgcgtatgtgttcagttttcagtcaagtgtttgagccaacacaaccacgcttcttcagggctgcggaaatgggcaagcagactactcttggcagtagttacggtcaccatcacgccgactttaacgcccgacagacaacgtatttctacgggagcgtccgcaacagcgcacacgtttgcaacgagaaatggtaaccaacactatggctatacaaggttggagtcaacaaggcatcacaactgtaggcctgcgcccagcagttgctatctcgccgccctaccgtccgccatctttaaaacgatacccgtacaagatacacgcactttggaattgtgcagtgacctcacgatacacatttttatacatttatggggttttctgaacgccagtaagcttttacatggttcccgttcacgcttcgttcgtgcaaatcgacagtagcatcaatagttgttcgatccctacatttccgaccgggagtaaaaaagggcaccggtagtgcggcgacctgccattaaccgtacttgtgtcgtacatattcctacccgtcagcggataaggtgcaccctttctctaatcttgtgcagatgagaagaaacaaaagagaacctgtgcacatggtctcggttatcctgctttttttcgcagattcgaaggaccggagggctcaagacaggtatcggtaaccgccttcgcattactctcctgcggcactactcagacgctaatatgatcagtaccaccgggatgggagtaataatctctgagagaggatctagagttcacaaaaacggtgcggcaactgatgtatcatgtaacgtccttgccacccgcaaaacaggtgattccttgtgactcaaattgactccgtgtactggcggcggtgggattccacgggcatttcgctcaccgggcgtcgatgccaggtcacccaaaggcgtcgcagcaattggatttaggaaagcatacggagaactgggcacgtcagaaggcactgctgttctccctgcactatgtattgaagcggaactgcagggaagaagacattcatccttgcatgcgttgttgtgctacagcagagctgtcttctggatgcatgcaatcgcatctaccacgcaagtgaaccgccacaccggttgacaagagcgtcgcagtgacagatattgctatgaagacttcccgaatgcgaggaacattgtttcgaacatgcccgttttttcgtgtgtctcttcgatcgcggagacagattgggtgctgcaggaaagggggtctatcgcttctgtgttctgcttccctgcacggctggtggcctccctctatgtgaaccagaagaaatacagttgactctcagagaagcgtcaatttttcgtgcctctcctggttaccgtaaacatatgaccgtcgaactacggagttcctcccccgtgacctggcaatctaacagaacaagccgctggttggcgtacccagttgtagtcagtcaagacaggtttcacgccaggaagctcgaactcggaactttcaaggagctcaggattgttagcctgtgagcgagcaaaagcggccacatttagtatcgggatcgctttcttgtgaacactgtggtcgtgttgtattgcctgcgttccgactgttttccattcacttcgttttttgttgttaccggcatttctttgtattgcttgctctgacttgcattcgccgattgtgccatcgatggcatactaagggagatgatctgcaacatacacgcagtcatgggccaatagttgaactgacggatcggtcaagataggcgtcaacaggtgaggtatgttaaggcatctgtcaaggactttttctccgggcttcctgggattctgtcgtcacgcaagcagagaccaggggatacacaccgcaattatgtgcgtttagagatcaagaaaa

SEQ ID NO: 1775 - DNA, 2183 bp, Toxoplasma gondii
  source 1..2183: mol_type = genomic DNA
gtttctttgaagcatttgcagtaacaagtaacactctgctaggtgctgctctcctgttactgcctgcgttcgcgacccctgaggagtcgcgaagacggagttggttgtggacttcatctgtccaagattgcttgaaaccatgcctcgcacgtaacgactccccgtttccctgcttgtgctctttcccatatgaacagaaacagtgaaaatatcaactttggagtgtgctgctggagctttaaggcgtactagataacgcagtgaaagtagagattctcgactgtggtgctggaactcggtatcgtataagctagctcaatggaactacgcactatgaattaccctagtgaaacgtgttgccgtatcaggttacagagtgaaagtagcgacgctgcaggcgccatctacgtctccgatacagcactagcggcacataaggttcaagacagcctcaacaaacggtcttttttcttccctccctcttcctacgagtggcaacattaatccatataatgcgcctagagcatcgttgatggaaaataaccacgatgtcgtacgattttgaaatctaacacttttagctgtcttaagcagatgcatgtggttgagcaaattaatttgactcattcgatccccgcggaaggcaagttcccggctgcgtggtgctgagagacattcatttgagggagtatctccgggtcgagagaacttctcgaaaatctctgtcactcatttgttgttcagttcgactcctaacacatgaccagtttaggatcgttgtggtgttccttacaatcggtttaatcattgagtggagccgacaagagcgaacggacgcgtccttcctgccctaccgcttgtctgcgttctcagtagcggaataacgcaaaaaagtgaaaggctggaaggtcatcctttccacttgtttgtcagctgcctttcgtggtactgtacaaatatcggaagcagttttgcatcactgaagagttctgtgccgtttctatagggtcgcagcaaactaccggtgccctctggatgccgcagtacactactcacgttgtcagttgaatttaaagccgacgaatgacagagacaggactacagccaaaaatgcctcatagtattggtcctcaacaactctgtggcactgaatgctgtcctgaatttaccagtgacaattctagatcacctagtgtgactaaggctatctagcatcgtgtatcggaagagaaataccaaaagctgatcgagccgagtgagctgagggttttttgcgtgttctcaaatcaaaagtgagtcggtcgcgaaaatccgcaaggaactggtggagcaagtgtgcatctgatcgcctgcatgacagaccagcggggcggcttcctgcgtttcttagtaaaaactctgtgttagaaaaagcacggttttagcacttctgatcttgaggcttggaaaagtctgcaacgtcgacgaacagactaacctcgtgtgtgtacgcgactttaatccgtccaagtgcacctgtcttcgaaaacaattttcttcaccgagcggtttacatacccgagtcttgaggtcatcggtcacaggatccaacaggaggaacaattatccccagagctcctctgctttgcacacgtaaagcggtaaggcaggggcgggggttggagctgggtctggcgctgaccacgacaccacaattccgtcaaaaatccacgtcggttatccgcttttctggaatgttttttcgactagaggcaaggaagcagacctcgttctcgagagtcttgaaaccaatgcatctcacgaacgcggcaccggccaacacgggggtggagaggacccccctccccgttttttgtgtgagaaacgcatgcatgcgtggacggaaacaagtcaccgagagaacaactgtgcaagagtgtgcaaaggagggaggctgttcggtctggaataggcaagaaaggtgctctctgcagaggccactgcttttcctcttaggaaacgttgcggtgtatgttttctctgagaaacagaactgtgtcaaaacggacgggacacaggcaattgtctgcggcgttttcctcctctttcttccacctcgactcccagtcctcgggtgtcctgcctctgtccgctttctctttcctgggttttctgcgacttcaagagtgaaaagccacacaaaa

SEQ ID NO: 1776 - DNA, 2265 bp, Toxoplasma gondii
  source 1..2265: mol_type = genomic DNA
ctaatcaaagcgcaggcgctctttcggctggtttcgaactcttgcagcaacatgtggagcgagacaccactttttacgggggtcgggaggccacaatggacgggggcaagtctttcgtgtgggacgtagaaaaagtcggagaaagtttctgtgacgtttccgccgctagttttcaaggcccatccacaggcgaacttcatcgcacatcttcgtcgacgcctcgagcagttcatttctaataggcattgggaaagtttatcgtctctgtggacagcgccgtgtggcggcgttttcccatttggcaataccacggagtgcacgttgtcttcgtacgagagtggcatcgtgcagatgaacacgagcatacgtgtaatgatgtgtaactgatggttctttgtcgatctcatcacccacacatccctcttggaacagcgaatgcttgttcttagctaaactccccgtggcacctgctgctagaaaaaacgctcagtggtaccggtcaggtctcgcgtctcgaaggaactcgcactggcagaatgctaacggatcgtggagaattgattaggtgaactgttgtgagagtaggaaacaatcaaatacgtgcatgggtcggtcacttctgagatcgagatctacctggacactgcctaacgggcaacgaaacagagccggaatggaggaaaaccaagcttcacacacgactggctacttcccgttggcgcaacatctggacagtcgcagcttgtggaaaatgtgacaaagtttttgccgtggatatgcctccgttttcgtaggaatcctcactgttccattgctgagtggaagtttttagctgcagcggaggtaccagtgttatgagtctgcttccctacgtaggtgcgcactgccttgcaaagcgagtctgcctgccaaactgttgtttggacaacactgcagggtgcctcgcggcgcctgggcagtcctctgtcacagtgatggcagagcgtttacgttgtatcttgcgggacgttgtcctacggcaaaaacagtgttgccagtgtcacatttcgtggggcaacttacctcagttttcgttcccaactggaaacgtactctgcaagctttcctctaatccgcggaaccatcactcacgtacggtgtatgcttcaccctaagacagagtgacagatgctaacactgacaagtttgttcgtggccgatatctgacgcacagggaactctagtgcgtgacagcttccacaaattcgtgcgaagtggagaagcctacagtccgtgtgtgtcgtaattagatggatcgttattctgtacagttgaatctgcaacaaacgaatattcggtccttgtggagacgcactgtcgcgcgtcaccaaatgcagctgttcaacttgtgaagaggtcctgcagctgtgtgtcgcaccaaggcagctccttgtgtaatcgctgctgacctacgttagcagtgtgaagtggtattgtgctacccatccttatgtttgcccaacaaaatccttgcaacgtcatttatgtctgagatccgcgaatctacctgttgtcacctccgcaggagggcacaacggcaactcggttctctatggcgtacggcactttttccacgctttctcggaaagcctgtctctgtgtgagttcatcccgtcacacttgaattatgcatgtaaagcatcggcccatacccattgctgaaactcgagaattccaaacggctccaaacaacggtgtacgcagccatcaaaatagcaggaccctggtgcatgcagtcatccaatgcggggcaattcgtgtactattcacacgcgcgaggccacgataagtgaatttcttccttacatcacttcctgacaacacaccagattttcttcttcctcacctggcagtggatcccagcgtcgcctactgagcacccacgccacggcaacaacttgcgcttgacacgagtgatggactcaaacataacaaaggaaaataattatgtcttgggtgctcgaatgcaactgaaagatgagtcatgatcccatccagctcctctaagtcccgattcccctatgtcgaaccgttgctcaaaggagaattacagcgatgtgcttaacgcctataaatcagtacaggcgtccttgattttccgtcgtctgtgcctccttctcaccgaagggtacagacccactgctttttctgataaactgggtctggctggtagttgactattatttgtgtgcggcacaatcttactgataaaagctacagcagaaa

SEQ ID NO: 1777 - DNA, 1574 bp, Toxoplasma gondii
  source 1..1574: mol_type = genomic DNA
cttttcttcacggtcgcgcagccggtcgcgctggtcttcgtcttgatccatgtactcccccagcgcgaggccggagccctcgtctcggtcataccaaatgcgcgagagcatcttgtcagtttcttcatcgatgtacgcctcctcattgtgtttttcgtctgcggcctcatcgtcccacccggaacgcatgcggcgagcgcgcggcggcgcgtaagacggagacgaagaccgagcttcgtcgtttgtcagcttcgacgaggagcaggctgataccaccgacggcgcgctgcttcccgccgctgtcgaccgggtcgaggacccgtcgtcgttcgcggccgtggttttcttgcctttgcggccgaggtcgaccagacaactgccggtccgcggggcagatgcggagaaagataaattaccagcagccgactccagcgaagactgtttactcgttaactgtcgcggacggctgaagaccggcgcgcgaaacgacacccctgagccaggtggacgtcctcccgagggatcgccacctcgcgactcctggctctcagccgtcgcagcagcggcctctacattgaacagcaggcggaatttctttccggattttgaggagaacgagggaaggggatctggacattggaaaggagtttctgggccgtagacaaccggggaagcggcggaggaagaaggttctgtggcagaagcagcggatcccgacggcgcagaggtcgctgcactgtggctattgtcgccacaagaacggaaaaacgacctttcctctagctcctcctcttcgtcatcgatgaaactgagggcaggtttcctcattttgctccgtactgcgcagacgaaaacgacttggagcagttcgctcgtggaaatcacgcgaaatgtcggggcagccacgacacagaaagtacggaatgcccggcacgatgggtagacgaggcgaaaaatgcgttggaaagcggcccgaactggaggaaacaaaaaggcgagacacggaaaatgcgggagtctcagagtgacgaagagtttcaggaaagaatgtacagtttatcttgcgtctgtctgcatgcactccttcggagagacgcgcagaccgtcagttgcgcactggagttcctgtctcgctgtcccacgatggttacggtggcgggtctcaagttcggttgcctgaatcgactcctccgttgggtggcctcccgcgcatcttgccactgaaaagccagccgagcggctgttcatgcttgagactacgtctcgtgtgtcagaaaacgcagtagctagctgcaaataactgcaccctggcaggtcatcgaagaatgatctacgctccgggtcgctgcccgaaggttcgatgagcgtccacgaacggacggctcgataggcatgacagcaggccactggccaagcggtttcactggctagttctcttcaccacattttcacgttacttcctttcttatttcccaggtgcctctttgtcaacagcgactctgcgtcaactgcctctctcgacagttcttttttccacagtgtgtgtactccttgaagctcagactcgcaaaaaa

SEQ ID NO: 1778 - DNA, 3063 bp, Toxoplasma gondii
  source 1..3063: mol_type = genomic DNA
ctggagtgtctcggcacctcgggagaaggcggaagctcatttttcagggtgccgcgccgtcggggctttgcggcagcgtaaattaggattctggggagtgtcagagtgtggaatttcccacagaagagaaaggggaagacttgcatgtgcctctttcttttaaaaaagacaccgctgcgggctgtcaacagcgaagcgcatgcatgtgcacatggccgggacccgcgttgagtcgcgtgagactccgttggatctgccggtctaaagtttccgtctcacttcagttccgcagaacgatataagcagtctgaagtcctgcgtcggagaacgatttgcttctcgtcaaacgccggctgtacaggctgcgcgtagactcgcgatgtctggtctcggaaattcgcttccgatctggaaaaaaaaactggaatgctcgatgcgttgtcagtgcgcttcgcagacggctcgtccccctctcctgcaaacgcagagaggtgtggagagacgcggttcttgtcaggtcgaattctatcggagagagtgaaaaaggaactcgcggattttcggtcctcgcgcggcaaagaaaaacaacgcagtcacatagaggtttctcttcttgaatatcctggaactgcactgctcagagggaagaggcgcccgtgatgggagcaataaaaacgcttttcggagacacccgatacaagcacacaagtgaatatttccgccaatccaccacttacccatttgcgcctaatgcatatatatatatatatatatatatatacatagatatatatatatatatagatagatagatatagatatatatagatatattattacgtgtatacgtctaagtatgtgtataatatctttcacttgggtgggagtagtattggttgactgcagcgcgttttccactgtgcatatgaagagaggcaaagacacgaagcgggggatttgttttttcgttgttattctgtctcgcatttgtgtcgtttttcagcgaggggcacccgacccgaggtgcatttcctttcagtcgagctgtcggccgtagtttcaggcggcgcagacacctcaggtgccttcgtccagcgttctgttcgctgtcgtttgcagtcacgcggtttcctgaaaagcgtggatagcgaagtgcggcggtttttgaaagtttcctcgacgccaggcgtccccaggaatccctctttcgccgcaggcgtacttcaaaaaacggtgtcgagcactcgcgcgttttacagttgaaaagtcgagacctgtgagcgagggactctgaagaggcagccgccgttggcgaggctcctcctttggtgaactcgtgaggcgtgcaggtttcctcacggagcgggcgcaatgcaggcgtggatatctccagttctgtatagtgcggcaattacgaagacatcacgctctcgcgtttcgacacacttcaaaagacgatctcagcaaggtcttttctcccgcttctggaataaacacagcaagttgtttctgaatagaactttagctattccgtgggggagacgacaacgcagctctcataggacgcagggcttctctcagtccataggagcagccagccatacacatatttacttatatttacttatatatatttatatatatatttatatgtgggtgtcaagcatctctacactgagaaacgtccgaattgtatttccgtcggcagagtacccatgtccgggagcgctgcgagacggcgctgccgacgtattgtcgcgtggagaccttgaaagacacgaagccagtgccgtagtgaggtcgttttttacttcgcgtttctgccgaattttttcctcgtgacccgctagtttctggagtaggaatcacactttttcttacgcaggttttggggaatggcgaaatccagcggttttgtccacggcgccgcctcgcctgtgtgtgtgtgtgctcgcacgcgccaagcagccgcgccgacgcccccactcatgccgtcgtcgcacacgatttacatctgtctgccaagtcacctcgtctccttgaatcgaagaggaaacgcgagaacggttctgcagggtcggtctgtggctgtcgaccgctgaagcatcgcgagatgttgccggtagaagttcgagaacacgagcgcagaagaagaggggggtgagcacagtcagtctgggagtgtgcagggcgacagctacactgtttcgcaagcagaaaagctgctgttggcgtttctgcttttctcacgcgactgagtgcttgaaggagagcaagtctggtcgaaaaaaccgcttgtcctaaccttctcgttcgtccacggggtcatgtatcccgcaccgtgcctcctccgacatgaatcttgagccaagcgtcgcggcaagaacaaaaaccggtcggtgtttctgcgtccactgcgggtttaaagtcctggcgtccccgtccctcacgcttttccccgactctctgcttctcggcgctgttgccttgctgcttttccttcttttccgctggcaaccgcgtggtgcagcgccggccctgttttcccaggcttccttccgagagcctgctgtgcttctgcaccctctccgtcgcgtctgcgaacttcgtctctgctgtctgccttctctttcctcgaaaggcagtctctgaatcctttcgctggacaccaacctttttcgcatcggttcgcgcgcgcgcggcggccgagtgtgtgcctccctcgatttttacgcgtgtcagttgctctccgaaagcgaaaagtcccagcagccggcgggtgcgggtgtgtacggttggtctggcggcgttccgcggcctcccggcgaggacgatgacgtaagagtcgtcttcaggttatagaatgtcggaaagcgggggtctgccccgtcctttttccccgcgtcctcctgcgtcaaccccagagaacagaaacaacgcaactgtggcgtttttccgcccgctgtgttcccctcgagtccagccagcgcgctggtgagaagaagccttcccgccgcgctcgcgctggaagagagaagcagaacggaccgcggcggaccctca

SEQ ID NO: 1779 - DNA, 2481 bp, Toxoplasma gondii
  source 1..2481: mol_type = genomic DNA
aggtatggttcaaaacgactcgttcgacattgaaggccgcgtcctcgttgagtccacgtgactcgggaggtcgtacctactgctgcattcagccgaagaccatatgtcacagtctgagcactgttttatccttacgcaagccgcgaccatctctcccggcttcctttgtctctagccgttcacagtaactcgccgacggtctctgctgttttcccggttccaagttccccggcgtcaacgtccttccaaggacattcaggacatctgtgagtctcttaacggtactactagtgttttacctgtgtgttctaagtctacatttatcctgtagttccggtcttcaccactgtcatgtcgcggatgtttctccaaggataaagaaagtacatggacgttcaagaattcctccaggaaaacgaagtcgagtttccatgtagagggtacggtgcgcccagcctagggtttccctcaaaaaatacataagcttcactttctattaaatgcacgcctaccagccacaccaattcctgcagggttaactttaaaggcgtgagcaaaagatgtgcaaggcgacaatagagcctataaaacgcacggcaaaatgaagttgacttccgcttggtttacgaaccagagcaatgaagtcagaggaagcggtactattcaggcattcagtgtcatctgtctacacataaatatatgtctaagtatacgttcatgtatgcatgtatatatatatatatatatatatatatatatatacagaaggcatagttattgcgttggacctccctgtagcgttcttgtgctcacaataatagtgaatttagtccagggacgccaaatctgcgtttccttgtagtgagacgagaatcaccgtaagagccatcttcttcgatgtaaatctccgacggtctttcctcccgtaccagcccccctcccgttttggtagaaatcatgcatttttcacgttcttgtcctcaagaaagattttccgaaacagagatttcgtgcctttcttgagtatacataccacaccggtcaaggtgaaagatttccttccgttcagagaggttcttcttgtgaaacaagcttctccatattttgactgttcagtcgtcgagagctcacctacgatgtttttggattgctgtcttctgagagtctccatcgctatgtttcgctccgtagaaatgtgttttccagcatccatgcatgcatgtgcacgtgcctcatccagttccattcgttccttttacggtacagcctgaggaagcgttgagaaaacaaacaggtgctcgttttatctcgacgtttcgctgccttcccccctcggaagctctgcacagattcccggtacccgatgttcaagattcagatgcagaagaccaagttgtctgcgactcgtgtacacactggctcactggactgctagagaaaggattaaaagttatcatttgaacagagtgtacatcagccaaattccacatcaacgacactcgaggcacgacgcgactttgcgatgacgcgtgtctcctcaccggagctacgagctgcagttgttcccctcctcgaatccagatgacccacagcatcactgttttcctttcttgtccattaattcctcggttttcaagaatctccacctcgtttttgccgcgggattttggttctccccggtgccggtgcggcagctgtctctggggctgtgtcccgtcgccgccgtgccacgaggtcttcctcggagtgttccgtttttttcgcaaaacctcttctgcctctgatcgtctgctcctataaacatgccccgtctccagacgtctccgtctgtgtctgtagcggttttacgaggctcgcggctccgggcgtctcacacttgggcgttgttgtgaggagcctcgaccctcgagatcggagtcgtccacagaaacagactttccttgttctttctctccctcgatcgcctttcctgtctacctgcaggaagcgttgatgtgatgggcagaagctgctctcagagccctcttgtcagtctgacgagaaggcggaggggagaggaggaagggagacatagagaaaggatcgttgcccgcttccacaagccagcctggctgtgtccgttctgactctgacaagaaacgctgtactaaagaaaatcttttccgcacccgagacataccgacgccctttttgtttgcaacttgtaccgttacattcaggagcataccgttatagtcgatgcctttttccctcatatatgttgatgacagatgcgaaaactcaactacgtcacctcgcagtccccaaactcttcgtgctactctgtcgttccaccttcaacagacccgtcgtctcttcaactttcccttccactcagtgtctgcagttttccgtgtctcccttcgttccggtttccagtgtaattccaacacagcgtgattcgttcgtaacggacgtcgctctcctcgctttttaccgaaa

SEQ ID NO: 1780 - DNA, 1727 bp, Toxoplasma gondii
  source 1..1727: mol_type = genomic DNA
attgtgcagcaatggcttcgaggacacgtagaattcgcgacagaatgagactgcggattccagccttgcgtttgggtatagagatgccgtgacagcgtgaaaaacacgctcgagcgcctgacgatacttccagttccacagaactctgttactaccacgactccgacgccgtgaaaccaatagtggcacatttacacaagcatatacaccatccaggaatctcacctgttttttctgtgaatccatcgtgtcccgggtaggctggaaacgcgcggcgatattgcagaatgaaaccaaagatcgatccttacgcacctgtatcaccaagagatttacgcgttatcgactgaaacatgaaaaacgcatgcaaaccagtatgccatatcgtacaaagtccgttaccagctgaagacaccgacgagacaagaacttttcccgtaggcgtctgtgactgtttccttatgtgtgggatgagaaagtatggctcgcagtgacatctcgacagcaccgacaagaaatgcaaggctgcaatcgatgccgatacgtaaaatttcttgagattgaaaagccatcgcgacgccagggcctgaaactcctcctagataaagatacatccttttcatcgtgacgcatttggatctattttcgctgcagtttcctgaaaagctttgactgctcgcttgtcttataacctcgaggcctccagatctttcaaacgcgaacgcagtcagggcgatggggtattaacgtctccacagaaagcaagcttcgctttgactgtgctatgaaaaagctatcgattaaagtcactccaaaacgtagaagtgaagcagctcattccggatgaaagggaacggcatctggaacttccctgtgtaaccgcttgtccgccagcaaacatccgacggattggtgtctcgctaccacttgcttgtctccacatacaggtagattgaagtacacagaacttatcgtggaggccgaatctgtctgaagtgtcttcaacaatgtaacagaaacggcattctgtcttactttgcggactgtttgtttcaccaccaacagcgaagcgacacgaggccttgcgcaggccgagatgcttttgggaaaacctgggaggaaggggccaacaaggcttagccagttacacagtattactaccttgttacaaaattccaggatttaatgatgtcaaaacattcttccacaggagaggccaagataccagaaagataaatagcgccgagagcacgcggcgggtcagaaatattaggttcctggtcaagtgaccccgcgtcaaaggctgaagacctctccgtcaaagaaaatctccttacggagtcccaaatattcgcaaaattgggaaaaaatagatgcatgacagatccacttgaaaaataggtgataaatatatatggtaattgtgacgtccccacggaatcaaaggccgaccttgcgataaaaagtggacgctgcagcgcaagccccccccaaaactgagacacacggtagcatactaaacccgagatgatgtcgtagtgggtattttatgattactttgtctcatagtcaagtaacgcagcatatccatagaagggaacccctgctgttcaacgccgaaacaaacagacgctgtcgaggcagtaaagcagttgcgtctagctcgacgtattcgcgtgtcggataagctgaatgcaacggctttacacgtgatgaattgactggga

SEQ ID NO: 1781 - DNA, 2712 bp, Toxoplasma gondii
  source 1..2712: mol_type = genomic DNA
ttcaagcacccgttttcctgaccgcagccggtgacagtgctaaaaaaaacgtgaccagacggcctgtatacacagcgtggctagacagtgttgcatgtagatcccgataggcagctttattaatctaaaattcagacagaggccttccgcatcccacccacaaagagataaacgtgaaattgaaggcccgctcatcgcccagtcaccgaaactcccttttacctggtatattggagtcggtatctccacaaacttctcgacaacttgaacttgtggtacgtcgacaacaacttctcgagttacatggcgtggaacttccacaatacgctcttgaatctcagttcgaggaacatgaataaccttctccacaaacaccgtttgtcgctcctctactaagtggtcgcggtactcgacttgtggtacctcaattatttgttcggcgactatcggcttcgtagtataagtcactttttcttcgatgagggtttgagatgccggcaaccctccaacggtggcgagtgggagtaccgggatcgctgggagacgttccctaggctcgcagcaggggctctcgcagagctccatcgtgtccactattggtaacggattaatgcgatttccttccggtccacacgaaacacaagaggaagactccagtcctcaattagcaacgaatgacgctttaaagcaggagaatacgtcgcgaactgcagacatcaggcaaacagtgctacaaatgagggctagactggaatttgagcactcgcagcgaagttccaacgcctccttttttcggttctggacacgaggtctgtgcacaggcataatgcttcctaaagcgtcagcgacttcatgacagcggacaggcaggcgctgtattgtattttggcagttacacgagttctctacgcggcagagcaactgataagggcctcgcagatattgacagagaaatgaggtttttagcttgcgtccagcacaatatcctacgacgagcattgcttcccaatgtacaaaccagcagtatatatgtactagcgtgcccgatagagttgtgaaaagcaaagttcggttttccttaaaaccggactcacacgcttcggcaatcgattctgaccgccagctagcccatcctctttctctcgagccgcggaaacccctcgtgacacgcagaatgacgggacaaaggagcaactgcaacaaatccgtcgggtgacgacggaaattcttgcggaaataaagggttgaccaggaaacagacgaacgagggcggctgttcacgttgcattcagcgtccctgagctgcaacaaatgccgtcgcattcaagatcccgacttgcacagcgtgggtcggtatcgggaaacccccgcgatgcagaatgagctggaggtcgagcgaatacgcaagggttttcagttcgctacacactcgtctacccaaatcttcgttgaatatagacaaacatcaagaaaccatcaatgctctttgtttcagcctcgctttttccactttagaacagcacgacgagatgcgcagaggatgcaagtcccacaattcgagatgctgtcccatacaatacgatacaggcacggatgtcccgttgcacaggctgtgtccgcttgcatggtgagcgcgggtctcgatgatcgcccttccttggtgtgagcggttttcagtgctggagctggtcaccagcgagactgtcttgtgctacggcagactgggggtctctgcgtgcaagaggcaagtgcatctgtcgtaagcttctgcctcgtccattgtcgtttgtattcatggtctctctgcgtacccaaattgtggatatgcttaaaaaacggcactttgccggccgcccaaaagcgtgcggtattgcttgagcccttccgtgctcttgcatgtctccagaatgcagtgttcctcttccgcacaggcgattttgctgtaacgaatcagacagactatgtagtgaagaggaaatgaagaaaggagaacacacgcgtccttaccgacacgccgcttacaccgccccccgcgcactcttttctcggacggccaaccgtcggggttggttcctcagcatgcgacagggaaagagcaaccattttgggtcttgttaaacaaaattgagctattccgtcatgagttatcattcttgtcgatccgaagccttcgtgcaacgacttctgtcgtttctttttgacgtcaacgcgattatttttcagtgccaagcaaagttgacctcgttctttgttcgggcaagcctcgaccgccatcggtaacctacgagcagtggaaatgatatagtggtactgttcgagtttgtgtttcctctctgcggtgtcacttaccagggcattcctggtgtatcatctttagtctccccggctgagatactggcctcgttttttccctttacagcgctctttatgaattgtgttgtcacccgcaaacaccggcacacttcgttgagcaacgtatatcctccacgacggtggattcaaatcattaaggacggaatcgcgtacctctcacttttcttctgtctcagaacatctctgaagtaagtgtcaacacacagagccagcggaaacgcaacctcccgggtatatcgcagcggcgagaaatccccggaacgggccttttttgtaaccatgcagtgctgatctgcgctccttgcaagccgttccaacttcgacacccctctgactcaa

SEQ ID NO: 1782 - DNA, 4305 bp, Toxoplasma gondii
  source 1..4305: mol_type = genomic DNA
cttcaacaaaactcaacatggcaggccgctgacaggaccgagtgcacgacagtcgagcacttctcttcttggccttggagacgagataacgaaaatcagaatccaaaagctctggaccggctgctgtggcacattacacctagggacagcaacgtggcgaggtcacccgcttcgcaagatccttacccttctcttccacaatgtccagggctgcatacgcggcaaactgcatcgagagatcatcgtcagaattgaagacctgaagagaaagcggttcattctgtaaatacccaaggcacgggacaataaatcaaaggaaaccgccgagtacaggacacggtggacgtcgtcgaaaaacaacagagcattcagtggtcgcaagtgatttccagtgactatggcgagttgaatttctgttgtacactcaaggaaagaatttgccacgtggccctaatcttcactcaaagcccagtcagcttcaacagcctatctatttgctgtcttgtcgccactaccaagctcgcaagggttgcaaagcggcgcacaaattcgcattcacatccagcaatgctagtccaaatcctctactcatcttcctcacttgttttccaatgaagcagacgcacgcgaccgccatcgtgacgcatttctaccgcacaaagaaacacccgacagggcctcaatcttggtaggatgctgacggggtctgcgttgcctccaccacgaggacttggctcccgattataactcccccactcaacgactgcattgaacggctggtcaccgttccgaaaaaagccagcagagaacagagtagtattttcatcggcgcgatgccaaaagcgagcttcgtcgtggctttctggaacgaagctcgcactccacaccgtgttgggtcagagttccgtcgagtatgcagtcacaagaaccagtgcctaacgaagcaggagcgccgtagtgtgtctgcttgcgtgaatgccgcgagctcgcacgcataggagaacaaacaataaactaaaaagtggataaaacatcaagagagtgtgtgtgcagtccaggtacaacggatcgcaagtctgaatcgtaacgctgcatgcggttgcagtgtctgttcaggcatgtaccgatgcgaacgggcgtgactgctggcaattgtttgtgtctgtagtgtccggaaatccttcatagcattatcagtgtgcagaacaacattgaagacactgttcatcatccgatgcttatgacatataatggatcctttcctccttagcacaaccagatgcatactttaaaggacgggggagggccactggcctgccctgcatagtacgggacggcgaagcggaaaagcagttgctgccatgattgcttacgaccgcgtgccgactgcagaataaacagaaattgcacgccccctctcccagtatcgtgtaaggctgccatggggtgcgatccaacttttttctggcacatagcaaggagcggcgcttgccgcttgcatctgaatcaccaggaacatcgcgcatctagcgttcccgctgccacagtatgcagacacgccattcttggcgtcatgtcttcttctcctgtccagccatccctttcgccaaggaggccaggactcgtaaaaacatcgccactgagtaaatacaattccctgcgggtgcgtgaagagcaatgctccgtaaactgcaaagtgcagcgcagatcaaacttccgtgcattgttaactgggcctgttcaaggttttttcctgtattggaacgaagagacatattcggaattgttcttgctgaaaactccatgcttcctgcagctctgttgaagagaactgtttgggcctgacgggtgcaagcacagtttagcaccatggatgaattgtgaatcctgccagctggagcatcaagacaagttcggtttctcgatcgttcactgcttatctgctgcgcggtgcctcgtctgtccaccctgcaaacgcgtctcttaaaagtacatctgatgtggagattgtggtatgatagtatggaaaagctactgccacacggcacatccctgtgatgagcagactgttcggaggcacacctgaacctcaagggtcacggtatttgcgcagattgaagcatcactgcttcaggaagtgtcacggaacacgttctgtagaaacaaacggaatatataagcgaaaaaccgtttctctcgctacttctgtctgtcatacgccaaaaggatatagagcccgtgctcctcgctgtgtacgccacccgtcgatgtgaggacgtcgaagacaagaactaagccagagtccttgcatggcttatcttagcaactaagccacagtagagcatgtccgaaatatctgagtttcagcagcgccgcgttacatgtctgtatcaacaacagcagggacgtcaaacgggaattgggttaagttgcaattttgtgctgagaatattcatatgatacaatcgtgcatctatagcttcaaatgccgagagtcgagctcgtttcttatgcatctaggactccgatgtaattggtaaacttcctggatggaagcgtctggaatctggattgctgcaatactcacacattaaaggcgccttaagtgtcatgaaactagtgcagcatgcctgcaatagcttcgttgcttcctcagcctctttctgcgagttccgatctatctgcatagatcccaagcagcgaaaactggtgctaggctactcaccaccaaggatcgtagttggttaaatgcgtgatgtacgcggtagtcactttgattcaaaggtataagaagaagagttattaacctgcttttcgtttgcttgaatgctgttgagtcgttgattcttatagagagcttgatgcggccgtgtctcttcatgtctgatatcactgcggcattgctaggaattgatagttatttgcactcgtatttgtcccacctcctcacttcttcacgcacagcggcgtgaaggtcctcagcacgtgcttcctgggtctcatctagtgatatgtaatggacaccatctgttaatcagggcgaagttactgcgtttgctgcttttctttggagttcctctggcggagagatgcacagttaccagtttcaacaacgtcgactgccaacgtcccttaccaatccgttgcagagtctctggagaatggtcgccggaggcttctggcgcatccgctggtagttaccatgtgtttgtaagacataactgaaggatggcttctagaaacaaccaaccgatatcctcctctatctgtttgtcttctgcttggatgttgtcaacataagcctttcttatggatgacacgaggtgctgcatggcatcgctgcattttcgctttcaactacttcactcgtccaacgtgcaggtcctttaatgtgtctcacgcgtgtttgctttgctcatcggcgcttgttatgacggagggttcctcagaatcgcccggagggacgtacacgtcttgcgaaacaggctccgcacaaacacctgaagtcgctcggtgtgccggtgcaagcgcgaaggtaaggaagacctgcaacatcttcattgcggtagagataaattcggggcacctcgaatcagaaaccgtgttgcattcggtcgtgaacctgtaatggattatatctgcacagggggcagcggaatgttgtcctgacgtgtcgatacaccgctagttggtacgctcgacactgtgcccaggttcctctaccgtaacgggacgcacactccttcctggccctttagggctttccatacatatcggagtcttcatctctcctattcggctaacaacaggttttttggaagactcagttgcttacctcggctacaaccacttacatactgcagcacgtgcgccagctcaagtaccgttcgtggaagtcggccacgctttcccttgaaatgttccactgccgagcatgcaacgagcaaattgccggcaccgtttttttgcgggtccgctgctgtccttttccaggcatcctcttctacccaacagcgcaccatttatctgttttttattaactttgccttcgtgcgacacacgcgaacccaactcaaatcttttgggtcagccacaagtactaggactcgttgcaggcctgtcgttgtctgccgcttagcaagtgtgccacggttcgagtgtgtcgttggcgcttgagtctgggaaagtggtggcagcgaaggtaaccaggattttgcgttgatctgcgagtggagacttctatcggcatctctgccagccgatttcatgtgtgctggcgtggtctcgcaccgaatcccacattga

SEQ ID NO: 1783 - DNA, 2153 bp, Toxoplasma gondii
  source 1..2153: mol_type = genomic DNA
aaagaaaaacgttcgtgcctttccctcaaaaagacgcggctcaagaaactcgctctcggtacgcaccgtgggaaaatgtagcgggagctgttgagtgcctgcactgacacgcgccggctcgtcgcaggctggaaacgcgagtgtttccagtggagcatgcgcggcttttcttggtgatctcgttcgctggtatgtatgcctttttgtcgaaagagaagacacccacgagcgcacatacacgcaccccaatgcgacgtgatagcgctctgggccacccgtgtgtccgactctctgttcccggcatgcatggcttcatcgtggaaggagccgtggaaaaaaagaataggtgtagcaccagggagaaatcttatcgtggtggtgggcagaatggacagggatccgaggcaggaaattgggttagagacgaacgcttgtcgccggagaagggtacgttcatcctctaaatctggtcattcccttcaaggaagcgataacttcggactcaccttccgatgtggcggaaacgaaaacactcgtagcttgcgagttgtcgtacagccgcgaacgctagctcacggttatctacaacggacaacaaaaggaaacggccagcctaacaaagaagcacatgcaaatccctgtttacccgtgtctgcttgaacggcgcacaaaggctaacaagcacaatcaatacggttcgtttttgagtgacactctggttagttattgacagacatttaacgaactcaaaagcatgaattcgtggcctcactggtttgcaacagaactgaacgcggatacgagaagtacagccgttgctgcggaacacgagggtcatgtgagagaacattatccacatctttcacacgaatgtagcatgtggaaagtactttcactgatactttcattaaaaactgtttcttcatcgtgcacccctactacactgctctgcaaggcgtcggcagcagacaacgaacatgaaccatggtgaagggaatcgttttgcggagctttcaaagcctcggtgaggttgttgcaccagcacggctcgagaaaaggaccattatgtgtcgctgggttccgttgtgttacagcaaagatctcgctcgttctaaaacaaagaggccggctctaccggttcatgtagaggttgtgaggggaataggctgatccttgcccaatctatggcagaccagctggacactgtttcttctttcagctgcgtacatgtcctacgctggcagtgctgcgaagcagcgccaacccgctttgtgtggaaccctgctttgtcctcatacataagactgtttacccattcatcttgaggcagcctacccacagctgagcagttccacaagaaaatcttctgttcagtgagagtgtttccttgtcgtcgttaaacaggctctcagaacttgttcctgcccaaacgcaacactcgatagcagttatggcatgtcagacatcaagcgccgctgtgccttttcattcgtccagtccatgtgtttcggcaagacgcctttgtggcctttcattggggtagtcacacacactattgaaggcgaaatactgagaagaataagcatttctcactctgggaacatgcataacattttctccagtggcagcatttttccgcactgtcgtcgccaggtctccttccacttctgtgtaccacgtagcacccttgtatacacacaagctactcggtgaagagaaaacgctggtggcttcctgggattgttaacacaacttccgggtccggctctcgcggttgctgcgcaggcgtcgacggagccggtgacgccgtgtccccggcaactggctggacacgccggatggagatggatgaccgttgaagccaacgccgctgagactaactagaaagaagtgtgcaacagttcatgagggacaaaaggaatgtgatgcggttcgcttgaagaaggaatgtttaagcacgtcaacaatacgccttggcgaatgttcatgactgttcatgtggttcatcggatacatttgaaaacatcgtgaggctggtacctggtcgcaaacgtcgtagtgtagtaccgacaataacgtcgtcgttcaaggggacgcagttctcggaagacgcgtcgcagcatactgcaactgctttcgtctgtcttcaacca

SEQ ID NO: 1784 - DNA, 2478 bp, Toxoplasma gondii
  source 1..2478: mol_type = genomic DNA
gactagatgtgcgaataaaagccatggacgactggacggttgttagaaatgcacccaggtgccactgtcaaacggttggtttcatatgttcttgtcttgtgcatgcttaggatgcgacccagtggggcgccgatgctgcagctgctgactggaagcaagctggcgctgactggaccggccccgctgctggcggagctggtggtgaatgggaccagtctgcagttgctgctgaaggcgagtggggtggtggccgccctggtgtcgctgttggcgagccctggtaaacactccgttgatcgaggcgggaagttctctgacgaaagaacgagaaggaagcgcccaagagagcagctgggagggacaggctttcgatgggagcactgacgggaccatcaccgaggttgtagagaggatatatgtggaggacctgaagcgtactgtgctcggatcgtctgctcggtgtggcgggtgtcttgtcgctggggccactgcgagcttgctggcgtggaagaaactgtcgactccccactgccttgtttcgcgcaaaaaacctatgctggcggcacttggccttggcgtcgtgagaagcgtggaaaaaactgcgtttcgtgcgcacagaatccgagggctttggtcgcctgcctgcgacaacatagctggacaggcagcggttactttgttatgcttgaaacggctcccactgatccacgcaaaattgagcgtaggcaagctggagaacagtgccagcatttgccaacacggtgatttgcggtgcgaacacatcgcacattagagtggctgtgccgcaccgtggcgattgtctgtgtgtgttgctcgcagctcacacaggcgtgtagaacgcgagtgcaagaagcaactgagatcacacaaacggaacgcactctacggaccctcgatacatgctgtccagtagtatatcaggtggtcgtttggacaaacacatacacagttttgtcttcctagatgagggcgggagcaccatcacgtacaacaaaatacccgccgctccacgcagttgattaggaccttcggactcctgacatatacagctccagagcactggttccgtcaccgtgcgtgtttctacagtgcccatgcaacaaggaagaattaagaacagctacttcaaagagtgcagacggagagtcttgttttctgtgggtggatgagggaaggtgcgtttcgctccggcggaaggccgctaacgtaaaaagttacgtgacacacaccatatcttattcgtttggtaatcacgtatcaaaaggatactctagaggtattaccgtagggtacgattgtgcctatataccgtatatgccgcgtgtacatgtacccctggcgtgttcgcgcagagtcacccccacacagatgtgtacagtatcaagttgttgctgtagccgtaggcagccgcgaggttgatacgagaagtggtgcccacgacggaggggttctctgctgaaatgagagtacctaacaatcaagttctcttgtaattctcccaaagggtcacgcaatgtaggcgatacagctgttgagaaaacgtagtgacaaaaattcaacatgaaaatgcacccctagtttgcaaagtaatgcataggaacatgtacgaaggaaccacgatgtatcgcccgatgcgaaaacagtggtacgtcactggggatgcgtttgttaccttcacagctgattcacttccggaaagccaggacgtcatgatcgagccctgtctcatccaagcagtcgaaccaggttgctcctctcaggcgataaagccctgacaccaatgtcatgagcagagttccccctaaacatagattttttgaatgttgtagccaaaaggggcttgagctagatcgctcttgcccttctatgggcaacggccacctctcgctccgggcagagcaatgggaatgaacggctgtcacacaatggaatatgtcatacaaggtccgtttgaagaatcgaattaaaaagtattcattttgacttctatactcaggttgctcatccagttcgcgtgacactttttcttgattaggttcacctaaagtatttgatgtgaaagactacagacacaaatacatcattgccactgggctgtctggcattttgtcttatctgccgaaagaattaaggcagcgtttttgacacattttggcatcatcatctttgtaacctcctctaccctgagcatctggcgttcctgtcaccagtgtacagtgctctgtaaatagctggaagtgtcgattcctgcgcgtcctactgtattttagtacgcttccttttggctgtgtttgggttttgtctaagcaccgtgcagaaaacgtgtcgcgtacattctcgaagaaagtgcccgcataaaacacggtcagaagatcatcttagccgtccgtcactgactctacagagaactgctcggggcattcgctattcaagttcttgtggaattgagataagcaa

SEQ ID NO: 1785 - DNA, 3055 bp, Toxoplasma gondii
  source 1..3055: mol_type = genomic DNA
taacaatgccttcgacgccttcctgggtgccctggtagtacaaaggtaggagcttggggttgcccatagcttccttgggaacggggtgctcgatggtgcgctgcacgtgcacagggacaggtacctccttgtatcggggctcgatcttggggcagaggtactcctggacaatctggagttcgacagggaccggaacgttacggtcgacgatcttctcaacgggaatcgggcggtagtgagtcatcggcacttcgacgggcttgggaatgtggcgatactgaggggtcatgacattgcggtaagtgtgctggatgtggggaacttcaacgaccttctccacatcgacgaccttctccacgaccactggcttggggacctccaccacctcttcctcctggagaatctcgaccgcctccagcggcttctcaacaacaacatcgcggtagtccacctggctgatctccacaatcttctccttcaccaccttgcgcgggacggggataacgcgctcttgcacgacaacgcggggcacttcaatgatcttttcttggtagacatactgaggaacttcgacgatcttgtcgacaacctgtcacgtcacgatccagacagagggggccacaatgcattcgctgcaaatattgtactctttagaaattcgacaacaaaaatgtggtttcaggtggcgtttcgtgtggctgtatgtatggtcgtttggggctagcatacagtagtgtgtgtgttgattcgaaggcggatggtaacttcgcgtatcctagctggtgggcgtcaagattgaagcgaacgtggtgcccgcagattggaaatacttaccttaacttgcggcacctcaataattttctgctggtagacgggcttatggacgtgcttcacgcgttcctgaatgatgggcttggcgacgtgagtcaccttctcgtgcacgacgtgctgcggcacctcaacaattctgtcgacatactgcacttggggaacttcaatcacgcgttcctggatttcctccttcaagacctcgacaacgcgttcctaaagaacagcaaatgatattcgaacactttcttttcagaccgccacgtgtacgtagccagggttcacggcgtccgcctccacgtcgagcacgacggtggctgatgcccccaaaacgggtctcttttcagacatgcttgtacgccttggatacacgaaaaacaaatataaagagtaatcgatgaatttctgcactgtatcggcgcaactgcaataacgagcgccttcgcaggaagttcttcggcctctacgcaaccagctacgttcttccgcccgcgcagtctgtgagcgttttgttggatagtcgagatatctcttcctttttcgggctgtctgccaagaaatctcacctggacaaggggctcgagaatacgggcttcaccttgagtggcaacaactccagaaacgaggcggcttccagggacttgagtcggttgcgcagcgccgggctcgccctcaccacagggagcgcacggctggcagcactcagaaaacatggtgagaaaggagggaacaactttgtctaaacaaacagcctctttgaggtcgagtgccaagcgcacttctgtcacctgtttctggagctgtggtgttcgccgcgagaaatcctttccacacgcggacgaggtgtttgcacaacccacggacaaagcgcggcagatctcaggggcaggacaggttgcgcgtccacttgcagaaggttcgcgcaaaagagaggccccgcgcgacagtggaagaaagacagtggtaaaaaatcgacgagttcggttccttggatccacaataaaactttagcaatacgagaagaactcagataaatttacacggagagacgacgcgtgctgcgagtgccaagctagactgtgtcaagaggccataatttctacacggcattcggcgggaagaccggcacaacccggaaggcaaacagctcttgagacctagcgcggcagggctcacgcgaaaagagaaacagcgccagcaggcagcctgcagacgccgcttgtccagccggtctcgctcaagggtcatagcgcttgtccacggacacggcgcggacccgcgcttctgcgcggacgcctttctaaatggctcgcctccataagctcgatggcgcacaacggctgtgacttatccgtcctaagaaggacacagtcgcgaatggcggtggcgacgctggcattcctggtttacgtctgcgcgagtagaaaaccggagaggtcagctcgggcacgggacgatatcgacggactgggtgtcctgtgacgacatgtgccgcgttggttgctggctggcgatgtgcctgtttcgaacgcgttgagcgattcgagaagacgactcgggtgccgaagcatggtgccgtcctctcgtgatgtgttacgtcgcggcgcgcgagaagaccattcgcgattttggtcgtcgcctcttgcacgcgctgtctgcggcacgtctcttactcaaggcatcggcctcgaagcttggctgttcatcgctggcagctaggcagacgtgttgtcctcagaaatctttttgtgttgcgatttctaaggcgcccttcaccgtcttcttttttagttggaatttctcgtgcggcgttcctctcagaccttcagtcaaaatatccgtctttctcaaatgcagtttaaacgcagcctcgcctgacgagagactctggcaaccgtcccctgtccattgtggagccgttcctaagcagcaactttttgagactcgacactggctgaacgaagcacattcctccttactgaccgaactcccgcgtgtacttttgcctttgcgtttcgggtggagttccctttctcccgccaggacttactgatcagaaagcggtttttttgttgttcttgcaaaagttctcgtggctcgaccgcgggccggactaggggccagcgcgattctgatttgcacccggtcgccctctgcgtgtgtgccgagaacctctcggatacttccacctaactccaaagactagtcttcctgtttgttgtcagaa

SEQ ID NO: 1786 - DNA, 3865 bp, Toxoplasma gondii
  source 1..3865: mol_type = genomic DNA
tctccgcaccacgttttctccgaccttgtgaactctctgaaagcccggggtgaaatttgtccttggtatccaccactttcgaacggcagatacctgtctgccagactcctgtcgacagctctgttcgcctcttgccgctgggcctctggttcaaaacaccctgaggcagagcaactcccgtggaagccctcgtcccgacgtacgaacccttctcgtccaaacgccgcggtccgtctaactgcggcagaggcggtgacagcggccgcactcgctgccgcggcagctgcagccgctgcagctgctgcttggacgttggagtggcttacgctaactgttccaaagacagtggccggtgtacagttggtataatggagatcctcggctgcgccgtttgtcggatagaaccctgtcggtgttccgagttttgaggtgcggaaatgggattgaggcaacagggcctcccgttccccatctgaagagccggcaggcgcctggacgtttgactggcacgccgcaggggcgttgagacggagcggcgaagcggcgccagcgtcttgggaggctgtagaagaggcagatctatcgggtgctagagtcattggaagacgtggacggtgtggaaaagtggcgattgcggaaggtacacacgttgggaaagtggagtgcgaactccggcccggatgagaagcgaaggaaggcacgaagtctagatgagaatgagcagacgaaaatgaggaaggcgcaagttgagatgtaggatcacagagttctgccgatagaggcctacaacggccattggcggcgggacgcaaagtctcgagctcgcgggagaccatctgcctactccactcgggcctgccgctggcatgctgctcaaactggggattcctgtcgtgtgaattcacaaacgacgcggatccagaggcgagacaagcggctccagagcgaatgtcttccccgcttccgctggcggatgccctgcaagcctccctggcgtcccctggcggccacatgcgagcatccacactcgcgcgcttgacgtcgcaccgcttcgcagttaacgttggagaaacgcttctaccgccggcttcgttgcatattatccgtaatctgtgtcttttgcatggagacacacggagggaaagaccgatcacagtagagctgacgacgggagaaatcactcattctgctcgtgaagaggccctcgcagaagatcgccggtgcgctagaaaaacgaactaacgcttcagtccgtgggacccgctgcgctgaaaaagacatcagttaagtcaagatagcgaaatggatgagaaataactttgacgaaaaggcaaggctataatttgaaacaatcggtggcggcagccccgtgaacccataacgtcgtgtcagttcggataaaacggcgtgcggatcaccgggtgtacttacaactgaatgccaagaagagtgcctctccaaaaaattaccggttatgcgcatctcaatcttgtcgagatgtcttgtctgaggagaggctgacaggagataatcaacggcagtcccccctcccctactatctgttagagtctatccactaaatcgggtggaacagatgaatccgcactgcagaatgggcaaagaagccgaaacaatgcccaagcaacgccacctaatgacgcttttacgtgagccacttgctgttcattgtgcgaaagttacgggttctcgttttttaaaaactcccaggcaccggtgctctccttaacgtggctggcgggaaacgtcggaaagacttacggggaagagactggggagacacgggtgacagctgcaaagccgtcggacgccagaaatccaagctccggcaaaacggactgaagacttgaatgaaagtttgcaacaaaacgaagactgtcctctaagaccgttcacacgagcattgagacgcggatgcctctcgatatcgcggtggtcacggccgagtgctccaggtgcagcgccctttacaaaaaacggggttctcacacagaggaattacagtgtgattgaagaatccttggacacagaacacgcaagtttctaggagacctgccagctttcagcgcgcagtatctcgctaactcgcgcaccgatggcaatcgacactcgaaacactggatccgtaagaagtccaccgtctcgggtggaggcatgctttgcatatcggtgttacaggacaccctggcgttttgcttaaaagagtctgcaggagacctgatactatacacaagtatcgaaagaaagtgtggtccaccagcttttttttctacgaacaaagcaggtggcgtgacagggtgccatgaacactcttggctagccgtacgtctgttggggggcggaagggggagggtgaaaggagggaggcgcagggttctgcactgtggtatcttcctgtggaagtttgacgaacatgccgaaaggtcaaaaatgtgattccctgtgaacagaggcagcaagaaccactttacatcacgggtggcatgctgctccgagccgcccgatatagctcccgcccaagtcacccacttcgaatggagcgaacggtataaaagccgaaagacacgcgtcttaacaacggtgtcaataatgggctgcaactctcgtcgttagtaggaagccacctctttgtggtgtgccggcgtgcgcgaaggctttttcggaggttttctggcgggcttctcgaagttcccttcaggagaagaagcacgtgacgagatccacgatgagtggtatggtaattggagaagcgaccggttctttagaaagctgctgatcctcgcgcctgtttagagcgaacagtcccctgtatagttgactctgtcgacaagaccgaccggagcgtttgtcctttctttcgtcatctcaggtggacgacgcgtttctagtcgcgttaacgtacagaaacggggaaagttctcgttttctgcgtcgcttcactcggtttcgtccggagtgcggtggcccaaaatctcgtaggggcatcgtggacacacgttttccttgaggcacacaaagttcagcgtcgccggtcttttcgcacgtgcccgtccgtgtctattctcctaacggggaaaggggtattttcgtgttcgtccttcgacttttttctgccgggactccctcggacttgctgcgccgcacttcacaggcgagctgctttccgagttgcgcggacaactcgacgggcttcgtgagagccagtgaagctgtgctttttctgttccgtggtctttatgcggcattcctcatccgaaactgtgaagttgtctttccggttaaatggattccgtagttgtctcgggaaatttcgacggacctgttcgaactcgaggagcatacgtggctccgctccaacgtagcgcctccgtttttgcgacagtcacgatatagcttctcgtgcagttcttcgattatgttttccttgttttttccgtctgaggtatgtttcttttcctcatgttaaaccaggcgttcacctcggtcaccccagttgtttttcttttgagtctcagtatctcttgggcctctccggcatcggtcctcgcgccgtcctgtgcagaagcctagctgcagcaagttgctcgtatcccattctagttcgtattcacaccgaaccacgcgagtacgaaatcgctttttgcaattatgcgcgtggatctccagtcctggagtctgtcgtgggcgtgtgcgcgcatcaaataagttcggcctttgtaccactttggcttcgctgtggtttcgattttcgactccgttcagctccgtagttgttgggtaccttttttcgtcaagactgcaatattcagtctgttttcaggaacagttgccttcattttctgtaaaa

SEQ ID NO: 1787 - DNA, 3070 bp, Toxoplasma gondii
  source 1..3070: mol_type = genomic DNA
cgcagagggctctctatggaaatcgacgacgtagagatgatacacaacttttactttccgcccattttgattgttcgtcgtccgcgattctaaaccatccccctgctggttttcgccgtagccagtcccgaaaatgtggtgttccattgcttcatctggatcgatttcgttcccgaccgaggctgtcggattgtttcttttcagtgctatgtcgtggagagtctttcccaaagggagcacctggcgccagtcgccgcggtgacctggcaccaccagcatggggtagtactcaacatccgcttcatcctcgtcctcttgggtcctttcatcatttttactggactccaccattttctgtggacgacttcttcgtgggaggttgaagggtcggctgaaatccggtgcggggtcgtcggccgtcagcttgacaaaaagcagagcgtagtgcgagtctgcacgcattgcacaaagccaagatatcgattcaagcgagtcgcgaccatccccgaattgtgtttctgtacatccaccgagttccccaaagaagaaatgaaggcgtcgtcaaaacagaaaaaaaccggcatttctatctcaaatatccatggcaactgacggtttgcccgggtcgccagtccaacactaagagctctggatcgaatcccaaagtcccggctgggtccattcggggcagctgtcgtctacccaacgcggatctcagctgccgcagagtccgacacagcaaaaagaaccgagacgctgttgaaccctcgcgtccctcgaaggaatttgcttggttgcgccgacgagagggacacccgacaccaccaacatcctgccaccaagcaacaggagccactgtgtcctagtttcagggtgcatcttgctagcgagagggaaagtgacggttcccacgttggcttcctgtttagacacgccacgttgggaacagatctatttgctctcaaatacgcttacttttttcgagaggaacgcgagggaatcggccggaagctcggaccagattgcgcgtgtggttcccgtggtagtagggtgacagcccagacagtaggatgaaactgaaggcgaatatcgcgaggtagaaagctgcgttcttcgcatgccttcgaagccagagaactgcgcgccgaacgggcgctgaaagcccctgtttctcgcattctagcgcggcagactcgcctttggcggcacccagagtcgtttctattgcctccagtcgcctgtgtttaggagggaaagctcgcgctggatgtaacattcgagtttcgcaagtttcttgtgtgttgcgagagtcgacctcggtgacggcccgcgtggctgcagccaaccaggagccttcgctcccgttgtctttgtcgtttcctttgttttctggagactcggacctcctcccaggtttcgtccccagagggagtcctccacgagagcggcgcctctgagagttagacccattcaagttcgagcggtcaccagaatgcggccgagaggaatatgtttcgagagcccccatcgtggcatctctccagatgcaggtacatacccctgcggacgagtcacacgcaccctcaaatgccgcacacacgtgtctgtcctctaaaccagcgtggccgctgcaaaatctactctcgggttagaggggaaagtccccaacgttgaccatcattcacaaaaccgtggagctcaaaatgaggaaactgccggctcgactgcgcccgaaggcctccgcgaggtaaatttactggggggggttccagcacatccatgagaaacgcactgcaattcccgcagatgcgagctggccggagacaaagactcctccaccaacaaagggggcgtttaccaaaacgacaaagcgcttcaccatgatattttaaatgtcaggtcactgagagagttccggaagacacttcgcctgggaattgcttagcctcggacgattcaccctttgcgacacgaccagccccccagagagattaagggcatgcacggagcaaacattctcgagctcgtcgcgctttgctgcgacctgttacactttttccagtcctggcccgacaagccgaaaaggctgcagtttttatggcttggcttaggacgacgactaattccaggctctgaatgcttttggatgttcttgcggagaatttcgctcgctgtcttccgttcctgaacaacggttttcacaggtgaagagaactgaggtggtttgggcggcagtgaccacaacgctcttattccaaatcaagactgtctgcatcttggacacatctggcggtatccttcccgcaatacgggtcaaaacctaaactttcaagacagacacaaatccgcttggttcaagcggactaacagataggattgaacgcatcgtgtgcccgaaaacgccggcaaggagtgtctttcccgtgccagcctgagagtccgaaagctgcagcacgcgcggatagcattatgcatctttgttggtactatttttcattgttccgttcttcttcctgtcttctccgctcgttcaaagcggccctgttagtctcctaagacggcaaaatcggctgatccatccaactgtccttttcaaagcgttggaataccagtgtgcgatgaccggccgtgcggtgcgacgttcggggcattcggaggattcgttttgccatcccggcaaattccaggagaggtattcgagttttacttgtccatcttcgtgacacacttcctgcgtctgacagtcgtctcttcgttgccttgctgttattcttcgttttccaccgcgcaaccctcacatcgttggtaggctgtgcgcctgtttgccccgatccgtttttctgcttgttccctttggtatttgtccactttcccacgtgtttgcatgcacaggacagagcgctaacgcgaaactggaagaaagcgagagttaagacagtgatattggatggccgccggtagaaagcggctggctggcgtgtgagctacgtaaagaccaccagtcgtttcagagagccatagaggtggaagcggtttctttctgactagttcaacccaacgcgcgtaccga

SEQ ID NO: 1788 - DNA, 4984 bp, Toxoplasma gondii
  source 1..4984: mol_type = genomic DNA
ctgcgtcacccgcctctctctcataactcactttccaaggacaataaggtaattgctcgtgccaataagaagcatgcgatcggctttaccctccacgatccggcgggtcaaacggtatcgaaaaccccccagtataccgctctccccgttctcccgagaagcagtcagcgtctcttccctggctctaagtgccgatgttgcgtcgtccgcaatcctgcttaggagtccggaaaaccgcgtttcgcccgcatgtgaaaaatcgtcagtttcccgacccccacatccgtctccgttatcttctgttgctctctctgtagcagaagtgcattcagatccgggcggaccagggtggaaggtgttttctgttgaatggctttcgttctgtcttgtcctttttggggagcttcgcgctcctaagcctgccaacgcagctgcccgcttccgcgcgaaaattgctgccgccgcccggcgcgcctccagtgaccgaggctgtcctcgaatctcggggcactctcccgagcaaaatggggaagctgcatgccgctggcaaaaaaaattgtcacgagagttggaggagtcgggagctcgcgacacggcagatgtctccagcaccggccgagaatgcggcgacgccggacacaggtcgccactcaacgtcgaagatcctcgagacggggaattccgaagagaggcatcttgcgatggaccggatgcggggttcgacacggacgatgtggatgacagactgtagtccggaagcagattctctcggggggcgctgtgcccgtctgcttgaaaccgggctgaagggagcgcagcggcaatagcggcgccagaggtagccatattagaggcataggaggaagaaacagcaggggtaagggtggtaaaggtaagctcttgtggagccgactggaaaagaacctccggaggcccgggacccgactgtcgcgacgagaaaccctgatcacaggcgtctgacgaaacagcgtacaaccgcactcgcggtgccactctgacacatcggatgctcgggaatacgcggctcaaacactgtacaagagtcgtcctcacagcctctcacatcaccagcagggagcgcgccaacagccaccgccgggcgtcctcataattccgtgtgatatcgagttgctttgacaagagaaagcgttcactcggtccaccgagggcggcacggcagctgacatgctcagatgtctagagcaaaacaacgttgggtgtctagacacctacatagcacatcgaacatcgtcctacaatgacggagatgcgcaagagaaatgtccacgagtggttggtcgcaaaaaaatggtgaacgacagcgccttctgctggcgtccgggacacaggttccggcgaaaaacatgcaaatcgtcaactcgataccgcgtcaagagctgcgacaagctgagacctttcgctaggtgtgcttgcccatcaagactcgcacgctgcctgcacacgttcgcgccgtttccgcaactccttgaaatatcgagcctttcctctgcagtggtggatcagtttatgcgaaaaaaagtagcagatggagagatttcactttcaccaccgcccaattgtctcttccgacgagcgatatcttccctggctgctcctctctataccgcttcaggatggtccgccccctacccgaatataaggtaacagcgtcgatgtgcatgtgggaaccaagggaatggctgccgtctcttgacgccgctttaactcatctgtcacctttagagtctcagtttcgttccactacgttacctgggactacgaactaataacactttgaggtgaacggtgcggcagccgtgcttttgtgtttactgtacatgaaccagcgtactgcacccatcttccctcgcttcccagccgcctcaaaagtctacacacggctaggggtttgagtctcgacgcttaaatttgcgaccggcaggggatttacggtttgcatgtgcctgtggatgcaagctttagcaaggggcacatcacagcaacgagaaaacgtcccgaaaagcctccgtgtttcggcgcgcacccgccacgcgacctcgtttgaagggggcagggtgctctccgtatgaacacggtttgataaacactcgaagtttacagtcgaatggcgtgtagaatgtggagaaaaacagaggagggaactgaatggggcgaagttcgatctaattaatcctgcgaagtcatcagaagagaggaagttagttgcgaactgcgcatcgaattcggaggtactttctaaagtaattgacgggcctccagcgtatgtaggggacggcaaagggttttcaactgaagctcgctgaggtcactgaaacagaagcgactatcgaccgctctactaacagttttatgaaaacagggttgtgcggcagaacacaatatacgcggcgtgtacagaaaacaagagaggccgcttgcgcggggaatccgcgaagttttactttcgttcgaattccttgagcagcggcctcgagcgacacgctccagtcggacttcatgtccaaaatgaactggaagggacgttagacgggaagacttgtgcacgaacagaggcagggaaggtagaaagaacaaactcgcgttcaggtgaatatgggagaaacggatgatagacgaaaatcgtttcgagtctgaggcagagaaacgcccagcgttttggcatggtcgctctgcgcagtggggccatgcatgtcgtagagtctactcagagagtgatgcctctccacggtttgagaataatccatttgaaaaggggcttctttcccgtcagccgcactacagaaactctgcgcttgtgtgccgcatgcactataaatgtgggaaacaacaagctctacgcttgcagagtcgtactccagttctgttttgtgaagcaagttgctgctcgtgaaaaagacgtgtaagtttctgagaaacagcacgctgctgccagcatgacttcaactcttgaaaaaccggaaacaccaacgagaatcgaagtagccttgattatcctatgaagttgtactggcaggagttgctcttcacctcagggaacggagttttgatgcgatacttcgggtcgggaagtgcggagatccttctgctggctgcctcactttccctgtcgtgatctcaaaactacacgaccacccattctcgctgttttcctctcgatttcctcattctctcttctgtgtctgcgcattccacgtcagccgcactatacgcaactgagccaaggcggcatatttattgggaggaagcagcatacacacacacatatggaaggactgcatcggagcacgctgatttcgacgccaggtgctgtatttttctggtcagttattcaaacggcgtatcatgcgacaggtgcgagccacagaaactagtctgagatactcaggcagatagagtttctttctactatttatacgccgctaccactttgttagagcagcgaacttcacaaatagccaccagtaccggtagaacatacccgtgaaattcttattactccgcagaaggctcgatgtcagtgtagacagcaaagctccaggcaatccaccactgagttggccgattagaagacaaaaactggagtgaagaaattaaacactgcctatgaatctaccaaatggcttgcaagaacgcagcccgcgtatctcaagttcagagggtttctcccgttttgttcgaacgaggcatggccgcttcccaacggagatcttttaaggttgaacaatgtgtcttcatcgaacccgggactgtcactgattgctcagcagaatttcgatacatatatacatatctatatacatacatatattatattatttgtatctccacacatgcacgggcacatccttgcatcgttcccctttacaatttgcatgacaggtccagaactctacatcttgagctaaaaaggttccaatgtagacataaacttggaatttttgtttgaacgtgaaattagagatgtgagttggcttcgcacatattgttccgagcgaggcgaacacgctgtagcttggaaaccggtctggtagctgtgcatgcaccaactattttcttcagccgtttttcgcgtaccacgaggaagctgtcaggtattcgctttccacggaaagtctagttaagtcttggtgaaaaacggggtgtgcagtaaccgatgcgactttggcttttccggcagtcggaggggacggggaagcttcgtccgtgcgaatcaccttgtctctacttcgcaaaaagccctgtttttttttgcgcggctcgaggttctcggaagcgccttgcaattgaacaacagatgagaaattcaaaatgaggctaacgaattccgtctgaaggctttgtctcgcaaaatcagaaatcccctaatcgactgcaggttgtcagaagtgaaacgtacggactctcccaatgtctctcgacaagttcggtgcgttttttcactcttggcctttgcatggacaaacacacccttcaagaagtttgtttttcccagaagtcctttttctttgtctttgacgcttttgaagaaagttcaaagtccaaaatgcgtgttcttgtccacgtgtagagcgcacacatccacgaaacagtatgcccgtgcatgtcgggttcttgtgcgcattcgcggctttagaagctgtgttgttagagaccctttgctgctgacttttgtttttttagcttttcccaaccggtttttcaaaacgtcctccgctctggcatttcttcccgtatcccgagaacgtttcccttcaatcttgaagaactcgactcctgtcaaacacgatcgtgagtccttttcccaaatcgctttcttctaagctattgcccacttgttttcacttctacatccttcgtcggtgtctccacagcgaccgttttattcccttcttttccttctccctttcacctccctttgtcgatctctttatcagttccagga

SEQ ID NO: 1789 - DNA, 2199 bp, Toxoplasma gondii
  source 1..2199: mol_type = genomic DNA
cagacttcgaaggtggagaagaggcaggttcgactggagttgaagaagtgcgaggtggagcgggggaagtcgcggaagagtcatgtggagcgcctggagctgggagaactgaagcgcccgaatcgattcgcgacgcgggtgggtggggacatggaggctcgtccacccggtcgtctccgaacgtctgtttgtgctttctcagaaattcgagaagtctctcgcgctccgcaaactgctcttcgagttgcagttgccgcagctgcaaaagctcgcactcttcctgggaaacattcaagacgaaaatcagcttcggaaaagccaaacctccgacgagcagccctccaggtgtacgtacacacgaagtcgcatcgggggcagacgctcgcggcggctccgggcgctggaggcgccgcagcagaagcagaagaatgccatgtgcgtctacgcctcttgccaaaacagctaacgcatcttccttgaccaacttctccaccacttcttctttgtactcaagagagggaaacaaatgcgcctgtctccccaaacggctcgaagcagaaggagcagaggaggacgcggaaacagaagagaaagacgaggaaaacgaggaagacgaggaaaacgaggaagatgaagaaaaagaggaagaggaagaagaggaagaagaggaagaaaaagaggaagatgaggaggaagaagaggaggaagaagaggaagaggaacggctggaatcgatatccgaggctggctgctccatggaggcagcacgggaactgccttcttggcgagcgtccatggttgaaggaaaaagtcgccgagagacagatggaggggaagaagagcgtcgcgcaagtcagccgccatctgcgcgcatggacgagggaggaggcgaagacgtatggggggagtacatgcacagcatgtttgcgagagcgtttatctctcttgcgtcgccttctgcggggaacaagattgaaagccgcggttcccctccaccaactcgccttctgcatgcgcgcatggacgcgtgaggagttttccgcgtcgagaaggtcggatggatgttctgtgaagtctcgctctgaagtcgtggtatttttcctcgttgatgcagttctgccattgagatcgctgcgggtggagggccaaaccagaatggcgcattgttagtggtgccgggaagctggagaacgcatcacattttgggggagatactcacccttggagagtgtagagcgcagaagaacgcagacgctggctgcaaaggaacagtctagcgaagagaaggaagccatctcccccttgttttctgcttcggcgacacagccgtaaaaggctaacagaagagaagaagatccaaaagttccttcttcctccacacaacgtcagtcgccgcatctcactctgtgcagccacaacgcaccctatgtatccggtgagtctctctgcgttggtcttgcttctctctttgcctccccagttcccttccagaaggtgaaagagagaagacagagaaggaaggcgaaagcaacggaagcaagaaggaagcgtctgcgccgacttccgtgctttgccaggtgacccagagacctcagccatgccagtaaaagacgaagagaagcgtttttcgagtgcgcatgcatgcatgcaacacaaaaaactcgaaagaaactgctcgagtctgtcgctcttctctcttctctctcctctctttcttttctctcgggctccttccactttcgaacaaatacgttttattccttcgctttcttggcgtctccgggggaggccttcaccgacaaagctctccgcgttcctcaaagttcacagagcctcttgggtttcctctccaagaaagatctccgtcctgtctgggaggacttcacctctctattagacgcaactgtgagacagaaaaccgcagatgaagaacgaaataggaacatgcaagccaccaatgtaggcttctcttcccttcgtcgctggactctctcaatctcctctctctccttcctcttctctctctccgtcttctcgcttcttcatctctctccttcctcgtctccctctccgtcttctcgcttcttcatctctctccttcctcgtctccctctccgtcttcttgcttcttcatctctctccttcctcgtctctctctccttctctctcttctctccttcttctcttgtctttcaacga

SEQ ID NO: 1790 - DNA, 1560 bp, Toxoplasma gondii
  source 1..1560: mol_type = genomic DNA
gacatcagttgttcatttgccgtcggtgggttgtggaaacgttttcattttataaagcataaagtggctagttttgtgcgcacgggcattttgcatgatgatttattgcagcagcccgttgtccgtttccaaaaattatttcgaattaatgctcagtgcgtcaacgtcctgaaacgcaccagagagatgttgagtaaaactttagaaaagacgagggtgatcttcgtccgtggcacaatagtaggaaaaagcaccgctacagttgtacacaacaccagacggttctacagggcatcaaataatcgatatagcaggcctcgccgcatacgatgagactggtaaacgtttccagcagaagtgagatgtaccgcggtgttgaagtgagcaaccgtggggtgagcgagtgatcaattggagcaagaacaacgcatggtatatttagcagtgtgatcaattccgtgacacacgagctttctgggaaacatgcgacgccgatagtgataccttcagtatttaacatctgtacattccagtaacaggtgactgcatgtatccatgcattgcttgtgaatgcacatgtgtaggtcagtgtaggcgcgtggcaactcagcggaaaaatacccctataggcaagaagggcagcgcacgttgcacgggaaaggatggctgcatccggggctctatctagcactgatcctgttttcacttgaacgtcctctttcacgtcacaggccgatgtgaagcgggtgaggtgaagcaacatttcttgtccagtcatgctgagggagtaccggaaaacaaccgtcgcgaggtgttatatgaacccgaagcggggattttcagaagcttgaacgcaaacgccactgcttcgaggcatcatatttggtagcctgctctctggtggatcccatcacggcgtaaaagcctgcttcccgtagtcaccgcgaatggtacgggtaatccgcagatgaagaactacatgggaaacttagtgacctgaggcagaatgaagcgaacaaaagtatcgtgcaaaggggagtgatgtggtattgaacatagaaccaatcacgaaacacaaacccctttgggtgcctcattcgttccatatcctaaagcatttcgtgtgtacaagcggaatgtctaccgtgaacaacacggccacggctcagaatctggcaaaactaaaaaactgtgattttcgggaataggggaacccagcaccgacctacgacagggtccctttgctgacattgttctacagaaggaaaccatacatgcagaagaacgcaaaagtagagaggttggtaaaacagttttgccgaagaagttggcgacggagctcgtgaggcggcacaggcagacgagcattgatacccataggcattaaccgatcccagcggaggtcagaacgtccgcagctcattatatttttttccattctacctaaattttcttcgaaacgattggcatcattatctctatcaatagatcgtgacgtattaatcacttttcatttgtggacgttctgtaccggtggaattcgttctttatttcacacaa

SEQ ID NO: 1791 - DNA, 1081 bp, Toxoplasma gondii
  source 1..1081: mol_type = genomic DNA
gggcctctcagggtcgtaaacaggaacgaactgcggcattttcagaaaagaggatctccaggatctctgcgccgtcgaaaaaactggagcgccccggacgaaacaggaaggaaagagatcggtcctgctggccgagatctctctgtgctctcactcgggcctctcaaggcagaggcgctcgtgacgcaacgtaggagaagaaaaacagagcgagaggagcaaggcggagatcgcgcgatgtcagagggagagtgctgtgcaggggaacgccaggtacctttctttggagcagaaaatgcaccagagagcgacagaggagaagtggattcaagaaagaagcgagaactgacaaaggcgacaagagagaacaggagagatggagcactcaaggacaggaggcgaggagagagatcccccctacaggttcagaagaaaccaagctgagccgcaggacctcctgacatactgaaaaacaatcctacgtctcggttgcacatgtttgtctacagacacacacatatatatagatatatagacataaatattgtgtaaacatgcatatagatctatctatacgtatctttggagaacaaccagatctttatcgcctgccatactgcggtttggtcctctgtgacccacaacgcacaaggccgagtaaaagacagaggaagagaaacacattccgtttgcttggaaaaagtcagacagcgaccgggagagttgacgaagtctcccttctccgtggttgctctttctgcgtcgactcatgtctttgatctcccgcagtagagaggacgggagacgatggaggacgagagaacagaggtcgcgagataaaaagcgaagaccgaggcggccgcccagaggcgagaggaaaaagaagatactgtgaaagggatcgaaaagaaggacgaaacaggagaatcgacaaagctgtcggcgaggagaacgtgcagcagagtcactcaaagtcgaggtctctccagaaagagtcgttctttcttcctgatttttccggcgaagaaaccaaatggctttttaagcgctgtggagaagaagaggctcagagagaaagcga

SEQ ID NO: 1792 - DNA, 1403 bp, Toxoplasma gondii
  source 1..1403: mol_type = genomic DNA
cagactgcgtagatcaacatttggttagctgtagcatttcattttacagcatagtatttgatctgtgagacattacacgtcaacattcgtttgttttttggggggcggcgacacatttgagttgtgaatgactgccacttctcaaggaagggcccagaagtggaacaaaagtcgcggagtagcaacgcgtatcggttcagcgtattaggtataccgtcctaggcagagagacgaagaatgcatcatctgtgaaaggccaagctgagcagctccacgtccacggaggacagatgagcctcatgcattggtacgtattttaccacttgaagaccggagattggtttgacttaccagtgacaagaactaacagccttctgttacaaggacttcctgtctcaagtacacaacggtatttgggtagtagttacccgttctcagtagctgttgccaggtcacggtgctgggctgctacctgataggaagggtcttgcaagacgaatagacagcgctgacgcccgtgcaactgaatcagaattgggaccgcatgggacagccctttactcgatagcgccgctcgctaaaatcgaactagtggcatttcgccctcatcttgtccagctgcatttatagttcctgttcgcttgtttgcgtccactttaacaaagaaaataacgaacacactccaccacgtcggccaacaatgagaggcctccggcacgaactctattcgctagaactgaaacatcactgtgatgaagctgtcgcaacgaaagtgcctttcccggaaggaggatttcctcttttatcgaccagtttgccagtttgatggacgctcctgcctagaccgaaagatacctagtttcagacttgtcccctcggagccgcacccttcgtcgagcagtggcatccctgcacgatcctttagatgaagttcacgaattctcagccagacagcctttcctggatgtcttgtggaactgtggcatttcggcgctaccaaacatttgctattacctcccccagcgaggccgtttatatgccgaaaaggagacgtcgtatgactgactgtccgacagtattttcgcgtctttcggactgaaaaacccccttttttgtcaacgtggcagctgaaacaacggattttcataatagaaaaggcacacagaagatgcgagcactcatacgcttaccgagcggagactttcactggagatacacccgagcggttcttccgaagtatcactcaccggcttcgccggcggagtggccagctggagatccccatggatggttaacgaagggaaatgtctacagcctgaacccatttgacggcgtttctcagttacagaaaaaacgtttcatagatcaaccgttatctgtcttctgctgcaagcttgtcgcaa

SEQ ID NO: 1793 - DNA, 2245 bp, Toxoplasma gondii
  source 1..2245: mol_type = genomic DNA
gttgtctcgaggagccaacggctcacgtgaaaactggcgaccgaaaattccccagagccagccagagcgtggactctcgactggctcctggtgagtgaagaggggggaaagaatgaaacgaacggtgaccgtgttggccaccagcgcgcacacccacacgaggaggcacaagaagattcccaagggactgaatatcagccgcatggtggggacatcacttctgcttcccgcctctagggttcaccaggcaagccgcagctccgacgcatgtggcaaggggcagatcgtttgtaagcgagacagtacgctggttcaagggtcattttccctgacctgagcggagccagaaactgcattcgaagaaacgcttagaattccattcgcgaggagataacggtggagggaacgcacagcacctgacatgcctgttggttatatgctgctcaaaacgaaaacttcgttttgtgcgcctagcagcgggaacaggtcccttgaaggggtcggcagacacccgggggtacgctcatactttgaacagaagaattcattgaaagctttgtagaagaggtgagcaaatccttaaggtaacaaccggcatgaagcacaaaacgttcgaaatgaaggtgcgcggaagaccttgggaactgcgcccaaccccccttgtagctggccagtcacacggcccgccaggccctcatacaaagcccagcttcctgatgatttgacgagggacagcctaaatgcgaacttaatcacagacaacctcatagatggaaaacacttgactctaggctacttgctacgattcacccttaaccatgcacaagtgccgcccggggaaccacggacggttgacgcggttcacgagagtgcccaggaaaatcacggcggaaccccaaaataactgtagaaatcgcccgccgctttcggtatgccccgcgcatctgcttctgctgtttccgtaagaggtaatcgaaactaagccagctggttcccagaatggcgcaaggaccgcctcctgcatcgcagcttgtgctcttggggaaattggcaagttgcgcacgatgtcagtgcctacagaaactcttcgtgagccaacagcacgattctaatcttggggaacaaacacagactcaaccatattcgtcgacactggcacatgccacagtgcgaggccaactatcgtaaacttgcacgttacatcaacagatcaagtgtgcggctttgccgcggccggtctgttgtttgtcaggcactccgatttgtttgacacatagacattttgcgaacactctggacgtctgactttattttgctgcaatgcgtgtagcaagatttgaacgtgcctccagaattagtgggtcagctggcacgtaaaagtgtgccgtggccttgaaacgctgtctccgcgctgtcgaaaagccgacaaaaactcttgggggatcggagcggtaggccggcggcacaagccgcaatgcggtcctttatggaaaacagtaaccgaattctccgtgcacatagtaagtcacctagttgcttggctattctgtggacattcgtacttcgtttggttgtctagacgtggctcaaccacggtggcacagacgaaggcgcacagaaacgctcagccggaaaagccttctcaggcagagagcgtagtgccggtggtcccgtgaaaactacaaaggtcatgactcctatgtttcctgcaaatgtgtggtgtcaacattaacgccagtcctttgtctgacctgagcgagcgcctcgaccaacctctctaagctcctctccgccgtgatagtcatcgttgtgaaagcttgtcttcaccgacctacgaagctttgtgtctctgttcaagacactatgtcccgctgcatgccgttgttttgggtgtagcaggggaccgtcttccccagtcgctgtgtttcgtgttgcactgaatactgtctgcattcctgcgttacgttttcgttcacaacttgtgtcttccttcactggctgcacagcagagcaacttctgggtaggcgacacgcagagaaaagcaatctttgtttattcaggtgtttgtggttctgcaacgaatttcgtccgcgatggcttcttggcggtaacctgtcggccgcaggacctctctgctacggaaagaagtgtcttttttctacgggcgttactgggaacgagcaaggagggggaggagatagagcatctgatgctttctaagggctgtgagggtgttgagaaaaa

SEQ ID NO: 1794 - DNA, 2101 bp, Toxoplasma gondii
  source 1..2101: mol_type = genomic DNA
tcgtcctcaccgtttccatctcgccttcttcattctccggttgctcgcggtctgcgctctctgctggactcctctttcttcgttcgccgcttccttcttcgtcttccatcctctcgactgaagcgccacctctgctgctgtctccttcggagacaccaccgctttcgggcgcggcgtttgacggccccgccgaggcggtcgagagggcgcgggccgccagggcgaggggcgagaagggcgcggcgaccgtggagcccagagaggcgcggaaagccgacggggagcagagagcggcgcagaggtgctcatgagaagcagaagagaggcagagagacggcgaggaagaaaacctctgggtctgtctcgcgagacgcgctgctctctccagagaagagaaagacgaaaagcattcgcctcttcggcggacagcagacaggcgagtttggacgccacgcgcgccccgcgaaagagaagaagaagcacacgagagagacatggtgcgtgaggcggagagacaacgcgcggagcccgacagaagggacagctgtgcgacccggttcgtctttcgatagggagaaaaagaagagaactaaagcgggaggagaagaccacgcgtttcgccaccgctgcgttgggggcgacgtcagaagtcggagaatcgacggaacgcgcaattcgcttgccccaagggagggaggaaacgacttgattcgcctttgtcaaggtcgtggactgaggacgccgagagacggagacacgctggcgtcacgaggccgcaaatccgagaaaccagcttcttctcacagtcaaaatcgaggagacttttttcatctgcaaaagaaaagaagaaagaagaagcgcgcttctcttctttcgcccgaccgaggcagctgtgcagtcttgcgagagccccacaagtgcagaaaaaagagacgacttctctacacgtggaaaagaggatcgtccactgtggaaaactcggcgctcgcagaaaggaaagtctttctccttggctgcagcttcctgatgattcgcgcgccatgccgtggcttcacagggccagtgggggggcttcgagccgcgaatctacatgcacgctgcagagaaaaaatgcgcagcagaagcgacaacttcgcgggcgctctgaacgcttcacggtgtctcgcgagacagctgcgaggtcgaggcgctctccgggaactttttccgaaagcgtcctcgttttcctcccagtcctccgtgaagcactttccttggaaatgtccttttcattttcgaagtttcctccaattctctcgcaatttccccgtctttttgacccgccagtctcgaccggcgaccgccacagacgaacgccggcaaccgttgagacagcgcactcggtgagtctggcaagactcaaatcgctagcggtgttttccgctgtcgcatttctgtctcttctctctttttggcaagaagtgcctgtctcccttcgacaaaagcgcgagttcaacgccgcatttcttgaggcgtcgttccgtgctgtgcctgctgcgcagagatagacctgcctgtagacccgaaaccgcactgcgagctcgcgagcgcgctcgaccggcttttaccagtttttcgtctttgcttttctctggagcgcagctgctcctctccttccgcccgcgagtctgtctgtccatgtggaaggcgttgccacctgaggccagaagcagagacttccgcgctctcgctagagcagatgcaccgacggggaaatggcgcgtgtggctcgtgtgcaggaagctgtacgtacaccccaagtcttgcgacctaccggaccggcgagaaagggagacttgcagatggagatcgacgcgcttcgtgactagactcaacaggatttgtcggaagggactttcatcaccgatctttgtttctttgtcggtgcccagccgagctgccgccgtctctctaaggaacgttccagaagaggttcacagacgcgtttgagaacagacgttctccaacctagagtgtccagaccgtggtttctgtgcatgcatcaatcgtcgccgatcccaacctgctctccagtttgttttgtgcccgctttccttcccca

SEQ ID NO: 1795 - DNA, 3446 bp, Toxoplasma gondii
  source 1..3446: mol_type = genomic DNA
ggctgcgacacgcttccgagtcgacttctctagcgttttgtggtacacaaagtgctcatcaagtcgctgcgtgcgtgtgccgctcgcggcgaccctcgtcgcgacgaaagacgcgaaaaccgacggacgctctgacgccaaacaccggcgagacagagagaaaaacgaacgcagcgagtccgccgctgaggccggcggcgcggaagctgcgagtggcgggatgggaaggccgagaacggagcgcgacgcccggcctgcagaccgagaagcagagctacacagaggagaatagagggagaaaaagaacaggttggaagaaagggcggtcgtacggcgacagacgcggagaggaggaaccgccattgtggaaacacctgcaacggtgaaatcgacacggcctgcaggaaacacagcgaatggccgcggtgtctgtacgcttcagccgtcgcagctcaaccaggtagagttgtactgccggtagaccgggtggcaaacgtccgcgaaagcgaccaatgaatgggtacgggaacagcagctgaacagaggagcgtgctcgccggtcgcggagacgacaaagacacccgctggccaggcacacccttcagacggtgacggcaccgctgcttgcgcccgaactcgactgggatgcaacggcctcttctctgcgtgtctgcagtttatgtctttgcctttcgacgtctctcaggacaccttcgtaccgtctttgagtctgcttctccttcgcgtgaagcacaactgcagcaggcacagcacgggcaagccgacacagagaaaccagcaaactctagcaggacacctgcagcagggaacacgagaacccccgacgtcaatctcgatgcaaacagctgtctgtctgtcacacgaatgctctgcaatgtgcctttcaccgaccctttccgttctccgacagtttcccttctcgaggaccgagccgttacgtggacgttcaccgacagccgcacacagcttgcgcaaaaaaagggagacatcgtcaatttttggctgccttctcaggaacaggagaaaaagcatgtgtgtatgcagcgaccctcgacagaaacgggactgcgtagggctgccttcccagtcgcatctcagttttcaccgcgcttacatgtgcacatgccgacgcagaagaccgaggaaagaaaaatgaagatgctgccgcggggcaggaaccccttccctttcatctttttccggcgctaactcgaagacttgtcctcacgcaactggtgtaactgcttttgtctttccttttgagtcacgggaacgagacggggtccttagtcaggggagggcggcgcggccggcgcagcgacagagaaagaactcgaaacagtggagacgcggggtcggcatctcgaacgctggccataaacgacgaaggaaatctatgctttgaaaccgctgaagcggggaagtagcggcgcagtttaacaacgaaaggcgaggcttcgctcggttaaactcgctctgtgtatcgccccctcgctggaatctgacaggcgacttctctcgcgcagaggcacctcgtgtcaaccgtatggtgtggcgggaagaaaaaagtccccgaagctccagcgatttgctcttagcagccaaagttcactttagttactggagttcttcttttatttcgtttttagggggattcctctcgtttaaataggtagcctttctccccgggggtatcgggtttcgatcaggcatccctctgtctccggacggatacccggcctgtgtgcccctcctttgttaaaacttgtcggagtcaaagtgcacgagtccacgacttggaaactgactttcacatttgctgccccaggtcgcctcccacggatagtggctttttcttctagatcaccagtacaacaggaattccctgtttcgtgcacagacaaggcagctacagctgtatgtatcacgccatagctatgatggatgtcccctggcacaagaaggcaagtagctacaaaccgtacaaagtctagctacgtacatttgtgcaactaatatggtaggcggttgtacatgttagatgccaatttaccggctaaacgtcccctgcataacttacgcctgttccttccgcggggtttaggaagggatcactccaaagtagcaacagtgctcattaggtaaggtatatgtcttcttacaaggctcagacatccgactgtgacacctctacggggtaacctttggcttttcgaacccgtgtgccggcacaggcatcagggattctgaggtttgggagtgtattacttccgaatcgggtaagttcattattgttgcgtaggtttttgtttagattccccgccgactttggactgtctttcctttccttctctgaggagcagttccacctgggtagctccgaatttatagtcacgtgacgatgttgacacctctaggagagtgtgttttttagcagttctcgcactgtcagtcgttgcttttgctttgccgccggagcgagatgcacgatcacccgcttattgtttatcgttccacgcttgcaaaaaagatggacagtccgcgtcccgcgtggtcccatcttgcgtcttaagggaaaaaaagacgaaacataaatgttgactaatcagcctgaagttaagccgcaattaaagcgtcctaacgaagcccgtccaaatatggtcttgtctgtttgaaaaaatatcaccttgcaggcattttggtatgttgctcgcttggctctgaaagcgtccacggggaactaaatggtgaaaaaattctgggtaagccgtctttgccgcctcactgttcctaactcacgctcagtccgcctttgaataccaggtattctcccggcggttgcacactcctcaagcctgcttgtttttagaaatgcgttcccgctctcatctgtttcaacgcagagaaacggaacattttttccactcggcacttcgccacgtccacatatcgagcagcgcgacaaaccatcgagcagagaggactagcgggacggcgcggctggacgagatcaaacaggatgtgctgacccctatttttttaaccgcgaaccgtagtcactgatgcagatactctgccacgtccgtaattcaccatatgctccaactgagcgctgcccgttattgtcggcggctcattctctgtgaagaacggccccacccgatcaggaccgcgtcatgtttttgcctatcttcgagaaatgattccgtcatcagcgagtaatgccgtcaaacatgaaccccactattttcagtggctaagctgtcgcggctagtcttgttccagagcaggatattatgttcttctgtcggaagcctgtgtctttatttggcgggcacatcggattctgtgcactgaaatagaacgcatcccatttttgactagtctgctattttgtgatgtccctaatgcacaattttccaaga

SEQ ID NO: 1796 - DNA, 2655 bp, Toxoplasma gondii
  source 1..2655: mol_type = genomic DNA
cttggcttccgcgtttctccttcgctaacgcatcatcacgcatgcagctggccggcgggcgtccacctgcgaaaggaaagggagagaagcgcagaagcaggcgaaggggaggcgaagcagcagacaagagacaacagccttcactaggaaaccgaccagagagaggtgtctcctccagaacgcgcaatgcatgcgccgcgtaggctcttcggcgacggggtaggacgctgccgcatgcaccgagagtgctgacatgcgccgccgcgagacgcatcctctgaaggcagagaaaacgcaggaggcgccagagagaaagggcttctccgctgcggaggcatgtcctgcagcgcgcccgctggagcggagagaggaaagtggagggtctgctcttcaagagggtggaggggaagctctgtagaggccgaggcgactcagggtgcccaggtaggctggggaatcgagtctcgcttcctggagacggaggcggtgctgcggagagtcgtcgaacagccggggaaggcgccactgcgatgcagcccagaaaggacgcagagagaaggacagacagcaggcgctgtggggagagaaagagaagacgaccttccaaaggtcgcgggaggagaacctgacagaacgcttccctcgcaccgttgacgctgtgcggagcaacatgtagatgcagacgaaaaggaagcagaaggcagcagagcagcagaacgagaggaggcagattgagaggaacaaggacgagagaaaagaaggaagcgacgcaggagcgtggcggtgagtgagagcgcgaaaggagagaggagagaagaaggaagagtcgacagacgagagcggactggacgcacttgagagcgcgcgtaagatggggagaacatgcgcgtcaacgagcaggttgaagatgacagagatgagtgactgcacgagagagagagagagagagagagagagagagaagaagaagatccgctcgaggggctttgtggggggaggccggccgagagagattgaagaaaacgaagagaaaaaggctcaacgtgaacactgaaccgccactcagaaaccgcgccgcctccagccatgcccgtcaacgcgcaaagaggctcgacgcagagaagaaagaaggccaggtccagaaggcaacgcagaggaacacaaaggagaacacagcgagagaagaacaagacgaagaaaatgagcagagagagagagagaggaggctcggcgggagaggaaaaggaagaggcagctaggacagagagagaaagacagagaggaagggagaaggatggcgagcaagaggaaaggcgaaggagatagaacggatagaaagcgaagagagcgtcaaagcgaggaggaaggtccagtgacaaagaagaagagggaagtggagacgatcctgtcggagagggcgaagctgaagaagtcgagcagagaggaggctatgaaacgagcgttgtgcaaggaagagaagaagtttctttccagagacaagggccgtggggtcaaagacctcaagctagcgatttcacttgcctcacgacagacttcggcaaaaagcaggaaccgactgcaacccagaagacctgcgcgttcgctctgaaaagaagttggtgcttctctcagaaactttggacttttctaacggacaacgcattcttctgacttaagctcccagcgcgagaggtgacagaaaaagagaggcgagagagagtcgaggttccttttctcgctgatgcctcttgcggttgaagtcatttctgctcgcggaagaccggccgcaaaggaggagattttctcgttttttatacgaacgaaagttgttccttctcccttctagactagcgcgaaacagtgccgagtgaccctcaaccttttgccgacaagcggatgcgcgtatacagacgaactgcggcgcggtgtgcagcagccccagggagatggaaaagcatgcgccgtttgagtttcttttcgttgtttacgtttgatttataaaagaggatcttctgttgcttttgatcagccgtttggcgttcgattcgtttcttctctttccgtcgatttccgacctcgaaccagcgggaactggatctctctggggggtgtcctcgcttgtctccattccagactccatcgcgaaggatcgcaagaccagggaccgaggctttccttatattcctcactgctgaggacttcgttgtccttttctctggcgaaccgttcttttctctccccgatttcacctgcaaacgaaaaacatctagagcacacactgttgtaactcttctctctcgattcctctctccatcatcttcttctctccttctccttcaccttcaactttcttctcttcttctcttcttctcttcttctttcttcttctcgtccatcctctaatttttctcctccatcgtctcctttcgtcttctccccgtcttctcttctcccatcttgtctcctccttttctccgtcataccgtttttctctttttttctccgttctttcttaacgaagaagaaggtctctcccttggaggcacggttgtcgaaacggacctcgagacgctttcttcgtttctctccttgcggctccattctttcctctctctgctttttccttctcctccgaggtcacaaagaattcaaaga

SEQ ID NO: 1797 - DNA, 1680 bp, Toxoplasma gondii
  source 1..1680: mol_type = genomic DNA
gctttacttctgaagacacaccaacatcgagacagacatatacgcagacagacagataaatggacaggcaagcatgtatgcacacaccgacacaagcatgtccatctacacagctacatacatacatacatataaatatatatatatatatggagacgtataagtcgagctacctacgtggatgcgcgaagcgtttgcacgcacatggatgcaaacgtgtccatatatatatatatataaagatagatagatagctgtctacgtcaaggtttctgcatgcgaagatcgctcgtttttttttctgtgagtctctggaacttacgggaggaggaggtcaatgtcatgagggtctaagagatctgtggcgccgcagttcatgaggagggaaaatcttccgaggcgcagaatcgcggcgtggaagccgccagagcctctgccgcccacgtagaggggctccactgcaactctgaccatcgcggagcgccgagaaaagacgagaaagaaagaagggagaaggtgtgtacatgggagagaagatagcacaggaagtagagaaggtgggggagcagaagaggaagaaacagacgcggcaagagaaagcggccgttgaagatgaaaagcagacaaggaaaagcagaccgtctctctaggcacgctgtgcctccttcccaggaagagagagacacaattgcctacgagaggatcccggaggaagtcgacttctccgcggttctcgcgtctgtcctctccccgtcttcttcgtagagaaaggcgcgaaagagcgccacctgctgtcggagtgtatctgctattgtttcattttagagaagagagcgaagcaagcgcgagccacaaaaaaaacgttgcttccgcgccgtgcggctctcccttccccacgaagaaaggaaggtgagaaggctgtctctcccctgaaacgaagcgctgctctcgtttcttgttttctgtcgctttcaaacgcagaagcgacaggaaagtctgccacaggcagtttccagtttgttgcctgggaacctccgggcgcatgcagaaaactgagaaaagattctcggggcaatgtcgcgcgccctccacagtcacgcgtcgagaattgaaaaatgggacaagacaactggaacgaaatccgagaactccgcttcctcgttggtggccagtcttcttgaacacgaacctttcctcctgcaaaaagaaggccgatccagcgccgattttcgtacatacagacgctccggacaaagccccgcgagtcgactcagcagaagggggtatgcacacggtcttgtacttgtctcttttctcttcctgctctcctctcggttcccttttttcttctttgctcgaggggaaagcatgcgacggagcgggcgacgaaacgcagtatcagcttcgcgctgtggcttgagttccttgcctctcccgacggcttgtcggaccggctcgctcgtgacggcgtgtatgcatccctctcactgaagcggcgcttgaaccggagactttgcttgcaccgaaactgagtggagagaaagaggcgaaccggtgccctctcctcagtctccgttgcactctgtctccgcttggttctcttcttctcacgcttctcttcgacctgaaggagagaagaggcagaagagagacgttcagctcctctgcttttacgccgca

SEQ ID NO: 1798 - DNA, 1753 bp, Toxoplasma gondii
  source 1..1753: mol_type = genomic DNA
tctttgtaagtacaggaagaccctcgtctgtttgtgtgttgactcttgctggcaccttcatgtacttccctccatcgaaacgaaagcgttggttatgcacaagtctgtctcttcacctgaacacaacttctcgatttcgtgttccatttgaacataagttccctagttcaccgtttatcagcagacactttgtttcctgtccagagtctttagtgccacgtatccacgagtcactggtcgattcaaacgactctttctttttgtgcaagaactgggtgcgtgttcgtagaacagcaatatcgatgtattgcccataaaggtgggcggttcatttactaaaaatgtctgtaggcttgaacagaatctgttttcgaattctcctatgctcctaatatcggtgagatctctgtggaaaataccgactacgcgttgagacgtgtgaaaacatctcccaccccaagcatcttgcttcagcgttgcgtcttggaactgagagggtttgatcttgacacgacagctagcttttccgtttgtgtctcgcccggcgactctcgaaaaaacgtactttcacggctccgaaagaaacctagtctttcctacagttcgtacacctcatcaaaggcgcctttctttctcaatcactcaccccataatcttctaaaggaaatgtctttgctcgttctcgaaccacacgtatggtgtcaccaccgtggtggatatgccgcggaggtgatcgtcagaaaaggcagcgtttttcttcgaacaagcagaatatggaactctacaacccttcaacgagtccaccaggttgtctgttttcctagaccggacgcaagctctgtttcctttttacggctcggatgcggagtgacgctcatgcatagtccatcggcgaacttcgcagccacaaaacacagcaacaagactttttcacggacttccgggcttcctcgctcagtagcttcgtctccttttgttggcagcgagaaacgccgaaaataaacgaaatctcttccttgaagaggtgagaggagtctgggctcctacgaagagctggaaaactcgcgaaaatggcatgcatgcgcgcatgcatgccattttcgcgagtggcaccgaggaccctcggctgtagattttctgtcgcaaacttgagtctgctgctccggaagaaggcgactttgtatcgaaacgaaacaaagtctcatctggtgttcatgtagttgtttttttccaggaggcatgatgtcggaaatgccacttttcccagtgcgcctctcgcagcgtccacacgcttttcgcacatgcgcttttcctgaatgaatcgaagatttctccagtcgataaagaaaacaactcctgatttaccacagattgtttccctgtcaaccccgagcaacgcaaaaaggagaagaaaacggagcggttcttgcttcctttcccctctaaattcctctccaaatgaccatatgcacaacagcttcaaaatccaaaacgactcgaaatccgtacacctaaaatatatacatgtatatagatagatatagataagtataaagacagaaacatatggatatagctgtatatatatgaacttgaacgaatttatttaccaatgtccacgtctataaacgtctgcatctgtccctatatagctgtgtgtgagcgtgtgagtcggtttttgccgcaaagatgaatatacagctgcatgtgaatgaggctaggaacgcaacggtgattctgtcttttttctaga

SEQ ID NO: 1799 - DNA, 3005 bp, Toxoplasma gondii
  source 1..3005: mol_type = genomic DNA
caggttgccggtacacagtggtgtatgaggtgtaccattgtttctggcagccccaaccagcacgcgggtgtatgatgaggcccgcacattttttcgcttggaattgtcctttcgcgcagcccttcgcgtttttcctcttcgtgtggaggggattctcgtcatagcccgaagaacagaaatgcaggactgctagggatacttgattctggtcttttcttcccttcaaaaggactctcgaaaaaaatccatatcctgcgcagtcggcaacgccgtctcaccccagcactcagtctagtagacacactcgcatccatgctgccagcttgaagcggaagttgcaactgcggcgcagtgcccttgaacgccagattcacctttttttacgagaagagttttgtgagcgcaaggctgagccacaaagggcggtgcacaaaagaatgataaagggattcttttagatgaatgcacctccatatattctaccgcacaccgtgaatctgctggtgattagtgtaggcaaaattaacatcccggatcgcgattgttttgccgtatgtacgcagcattccagaaacgctgaatgtgcaaaggaaatggtcatgcaggccaatcatctctagaggccctgccgcactcttcagtggtaaggcagtggtactcacctgtcgcctccacatgaacataatgtctagtatcgaggggtcaaaagccccacccttcccgcaccagactggaggaagtctagtcgccgtaggctggcggcgaaggaccctgctacgcgccgtggtgtccacagttttgcaatcggaggccgtaagcaggcatgagtccacaccatgacaaaaggtcagatcgttgaatgttttttccattcacgctgacgtgctttcgaagtcatcagagcctcacactccacagctttctgtcttgagaacgttttgcagagccccgctttcataaaaacaaggccatgcattcggtcaggggtttagcgtgccagagggttttggcaacgcggaacagttttaatcgcaggcggattcacagttgaaaaggggtttctagatagtaaacaggttcacaggacagcatcttgacacggtgatttatctgcagtcaatcgaggacacctgctgatggcgtcttgcgatacgttttgaaacaggcttcagactcaactgctgtccgtgtgatagcgagtacccgcatatttttccctcctcctgtacgcgtaacggactgcacatcgatttagccgaaattggtgcaccaagaagaacgttagttcatttcttaggttgtccgcgtttatcatcaacactcagtaccaccgccgtgtctacggaacggcggacgcaggtgaatctggtgtcccggtgataagactaatccatatataacgccttgagcatattacacgacatattagaaaacagtccttaaacggacgtagctgttgtcgattgaccgacacttttgtaaacgtgtagaataatgggtaagcgcgtttttctgttatgcgaacgggtcaacttttagactgtatcctcaagacttgaccctgcgttttgtccccctctttgtttcttcagaccagaaacacagagcctttagtctgcatctccccactccgtacctcagtctgatttctttttcaggtgcctaggtagagttggatgctgttagtcaaaaatcagacacctatctcgacgattcgatgcctttctgcgatagaaggttgtgtctcgtcaattcctcgtcctatgcatctaatagaaagagcaacagcagttccattccctttgtgtttttgcgctcggtctggccccgaatgttcccagtcccgggtgaccaactggactcggaaaacatgcagcatgctactcgactgtgcaaacgcttattctttcttcaagctgggctaccggagtccacaagagtcgtggtattcctgaatgtttctgtttttcgtatgccagcaaggaatttgcagtgctctgtgtgcccgtggcgaccgggacgagttggttgggcaacggagtgtgtgcagaggaatgcgacactcacggggaaattttagaccagttcggaacagccaccgtgcccttttccccgctttccccttctcacggaaatacccgaaacctgccgaacgccggtgctcgaatatcacttctcgtgtcgctaagccacacttcgacgtttcgcagtccactaccctcttgacggaaatggtttgcacagcgtagaaaaaaaaaggaaacgtcacgcaagaagcgcttgcactggccgcaaagagtttttaaagggcaaactcggggaatcgctcgaggcgactgcaccgggcgcccacgcgccacgtcccgagaggccgccagttctggctggcagaaattcaagttggctgtgtacattcacgatcgattcaggccagcgatattgccctgccacgcaggtccacccctcagctggctgtcgacagaggctgcgaacgcgccggagagtggtgagatttcctttcagcgaattttgtgatctcaagagcgagaggcacaactgtatttgagaacttttgctttttcagcgttgcacgagttttaaatctcggtgtgactgttcgaaaccctgtcatttccctccgagaagatcggtcgacggcgcgcggacaaccgcgtgcgtaaaaggtgtttgctatttcgccggggagaaaagcggccgtaaagtcggaagacttgccagacgagacgagaaactgggtgcggcacggcatttcatcattctgtatgtgttgttttccattcgaagaaagttttgtttctcgcggcagagggaaaggcgcgcaccgaacctgcccgcagtttccggtacatccacgcacacacttcggtggctgaaacgccgcgattgttccgttcttgtgttcgcgacttcgactctctgaatcgctcccccacacatcttttgttgtcgccccctcaactttttcgcactttttcgattcgaaa

SEQ ID NO: 1800 - DNA, 2375 bp, Toxoplasma gondii
  source 1..2375: mol_type = genomic DNA
gacagccgagacagggaaagaatgcagaatggttccacaaggacaggggacggtcggcaaagaccaccgccgcgttagtcgcagttccaggacccgttttttggacacgcatcagctatcagccgcagtctgaatgtccggagtgctttcagaaggcaaaaaaacaaacgagcatgtgttctggtttccgagttggtctacatgtcgagaagccatagtaacaccacggcacgagaactgattatgacacacagagcccttaacccttgaaatcgttcggtcgcccgaagcgtttcagccttttccatctcactcgcgaaagactagaggtcttcgcacattcaaaacttccactgaagtacacattaccagcttccttattcgtctacttcgttcttactgcagcttatccctcataactacgtcgcacagaggcagacgaaacgcgaatatcagcctctgctcatgctttttttccacggacgatagctagaatacagtgttagctacaccgaaaaacacccccccaggaaatgtctgacccttcaggcttatcagatttcaaacgctcttggattcagaggcagccctctcgcgtctaccttcttctgtccaccccctctcgaggtcgctgactggggttcgaggaagccgtggccggagcgccctgcccgttctgaggcgcggctccgccagagtcgcctcccatgagacttgccatgacgagaacacacaaaatcagccaccagttccgtctccagaacgacggctgttcatcctccttctcgccttggcctccttggatcggagcgcccgcggcgccggcccggtgctggctctcgccgggaaagtagacggggacgatgagcgcctctttgccagcttttgccggcggcaaaaccacttgcagcgcaggcgctctaccggtagacagctccctgttctgccccgctgcagtcggagtcacctccggacacgtgagcacgatgcggtcggaaaccgccttctcgtcggagcctcgatctacactccgggcaggttcacttgtcgcagatacctggtcgctcgtgctttctgggaggcgtcgaatcgaagcagagaagggaacgagggaaggcgagacgtggagagaaagcaggaacggggtctcagtgcgacagactgctgacggcgacccgggcctgtcagcgttcactaggaaggaaacaggggcggatacttcgagagctggaatgagcctattttgttggtttttttcttcctgcgtcacgacgggttccagccgtagagacagcaaaggaaacatgttccagggcagcgtttctgtcccgccactctgctgctcgcgggtagccgcctccaaagccgacgaaagcacgctgccggaaaaggaaatccagttcgctcgaaccgcgcgtgtcggaccttcagcaaatgctggtgcagaagcgctgccagagaaatggctcttcgcgttcagtgctggggactccgctggacggctgtattcccggatcgcgaggcgtcccagcggcttcccctcgagttgtgtgccggcccctagccccgagagaacggagagctttacatcatatacgagggcagatgatgccgaacagcacaggaaaacgtaaacgccaagggtggcccagaggaagaagaacctcacacagtcatgggctgcatgcccgcgtagagagaatggagcggacaccatcctggcgctgctgcctgcgagaggaaggtcacaccttcctcgacaggggaattgcgctctctcgctggaagggaacagaaaaaaggaggaagacaccttgagataccctgaatgaggagcctcagccaaaacctgatgcggcgtggagtgcaggcgccgctggcaaggacgctggggtaacacacgctacaagctcgttcgctgcacaccagctttcagggagccccacaagtgccatggacgaaacacaaaaccgatagttgagatttttccctcgtgtggtaactttaaagtgtccatgaggcgccagcattcttaatcgcgtgatttgcgaccgcatgcacagaggtagcgactcagacagggggtagcggttggcactgagcggccacagaagtgtacacaccgtttagttagagtccgctgaccccttcacaattgaagatgttctgctgtggatagaagaggacaagaataacaaggctgatgttgaagaggatcttcttcactcgtgaattgataactgtgtggatgctttgcagcctactagctgcaagcttgccgcgctggccttattggtgacgcagacgaaaagcgggcccatgtctgcacaggcgtcctgtcgagatctcaggaggaagtagtcgcgctctgttaa

SEQ ID NO: 1801 - DNA, 2985 bp, Toxoplasma gondii
  source 1..2985: mol_type = genomic DNA
ctctccttgcccggaaaaccaaagcgatgaaggtcttttcaagcgtcaaggtgtgcctttgtcgttcttcatctccgccttcgtggcgtccccagcctcgctcctgccgttgcctcgagcctggcgagagctgaagtgtgcagccgagcttttccagggctcggcggagatagctggcctcggaaacggttgctgtgggctcccgagatatgggagcaatggccgaggctcctggcacaacgcggaaggccacaacgttggaggcagtcgcgagaagagacaggacggggcgctggacacgctggattccgggggaagcaaaccgaacggcgaggcagaggcgggaagcgaaagaagcgagaattcgagcagccattctggaaagaagagcagtgaaagaggcgaagagagccttccaaagatcgggagcgatcagcctagggcaggcgagaaacggccgcggctggcgagtaggccgacgcttgggttttccgatgcctttctcagttgtccgtgctgtggagacacatccaactatcctcttcatgtcgcggctcgcatgtccggttcgaaaaacgacgcagagcggacgaggcggcttctcgcccaggcgcggggggggaacgtcgtggacgcgcctctacctctttcctgttcttcgagttctgcctcagagtccttagagatgctcgcgagactcgcagccctgcgagcacagcgaggcgaagagaagagagtgaaaggcggccgcctcgagcttctctcttcctggcttcaagacgacgaaaggagactcacccttgctaggtcaagcgcggcggttgagaatgcacgcgaagggagagaaacagccaattctgggagggacggcgacggcagcgacgaacaggcaagtagtcgtgttcaggccgggccgctgcatctcctgctccaggctgtcgactccatgacccgtgagatgttgctcgcttgaaggaagcctcagggcactttagaattcgatattgggaatcaatgctctgcaaaacaacatgtcaggtttccttttgtgcgactaccaggacacgttttgtttgtgtgattcgtacaggaggcgagggggctgtggtttagcacgcgagaatgagactctttgcgttcatcgcgcctgcacgttgcttgtgtttccctgtgtctttcctcgttctcgattctctgcgcttgtaactgtcttgttcttctctggggttttttccctgtgatctcaatcgcggctttcgcgacgcagcggaggaattcaaaagaggggtttgaacgtggtgtggttctgtcaagtttttctgcgcgttcactcctctttctttgtcggtggttcttctgtaactttctcgtcctttgcgtatcatcggcgaccgtgtatcactttgctgactctgtgtcgctggaattcgcggctgtattgtatgtgcactgacagcgttatgtttgtgttgtgtgcgaagtagcaaaccgaagtgtgtcgctgtttcttcagtattattatggtagaatctgacccttttatgaagtcggtgccattttctcctgagacaacacagagctccgtactgccacatttctcccagttacattttttccgaaagcctgtctcggcacacgtgaacgaatctagtcaccagcctcaggacagtcaaggcatcacaaccttacatgcttaactcctcgacgtaacctaagtgcgttctgatcggtaatcaggatttctattgtagagcgtatgtcacagctattgacacccggtgggtctcatttgtgcatttcgtttgcaaaatcatgtaggatttgtctccgcttaattcagaaagatatttcggccattatgacacacatccttccaggactcccgcagctttacccatccttcccccgcaaaaaggtgttaccggtggaaacccggcttacggcgggattagccaaaacgccacgatcgagaagtgttttttctatggcacgcgacgaacccagttcggttgaaccacagacgctcctctggcgcctctgcggctcttccagtttccacttttcttttagcatcatgcagttaccacacagaaattgcgtcaacgactgtctcacttcgttttgtgtatcgacgaaatcggtgctttaaatatgatacatggtacagtgtgctacagctggggggaccactgatagagcaatgctattctaatgaatcgcggagtgcccgaactataacccgttgttcaacgtggtagagacttcggttaagtggctgcgagcgtgggtgttagtccctccgatccactggagtcccctaacgaagacaaggcctcttccgcgttcgttaaaatcggttcctggccattcccggtggtgattcactaacagtgcaaatcttacattcgacttcctaaatcgcagtgacactctggtgagaaacaaggatcacgacaaaccagcaagcgttcttgtagaatggtccttcttagttcacgacagcggaacctgctacaggggaaggggagaagttgctgccgcctgggcaacgataatgggagtctagctagttacgcttccccgtcgcacactggcgctgatccccacaatgcattggctgtttgaacaaccagagacgctgacgcgcagcgagagattctaaagtctcgatgctgtccgcagggagctgtgtattggcaaatgagcaacgtatgtctgcgaggccacaattatggccacggttattcataccatgcagttcgtagcgatggtgttcgacgcgccatggttacgaacgcactaaagactccattccattcagtaaatccgaggcaaattttggcgtttcttgtcgctgagacccccaagcgatattttgtgtagttcgtgaatgttgatggcccctgaatgtttaccatgcctcgcagataaagtaagtttagggagatgcaggtctttctgcgcaacaccgggtcgtaggtacga

SEQ ID NO: 1802 - DNA, 2971 bp, Toxoplasma gondii
  source 1..2971: mol_type = genomic DNA
tcgtgtccaagagtgacaaggatttcctcgagagcgatttcttccttcagaccttcttcgttgcctacccctgcctccacgtctcggtcttgacccgcttgatcaccccctccgcaggcgccaaacacgagggccgcagagagggcgactgctagctggcgcacgacggcttttggcgctcgtctgcacgagaagagaagctgcaaaaggccctctctgagttccttgaagacagtcgaagcggctgaactgtgtcgctccctcgcgccgcccaaggagtctcccccccgcttcttctccagcaccagagacagctgctgagggaagcctgcgcgagcttgcgccgcgagagtctgcgcggcaaaatagaggacgcactcgtcgcctgtgtctacagatgaagactgcgacgagcgagcgaagtggttcaagaaggaaatacagatcggccaggccgacgcatgctgctggaagtcgacaaggaactcgtttgcctgtgcaggggtgactccacacccagacggcgagtagaaagccgcaatcatctcacggacattctgctctgtgtacgaaggtgggagagaagaaggatacgaagggccaggagtcgggggagcccccggctcgacactggaagaatgcatcttgaagatgagaagaggaactggaaaagaaaaacggggagagatagcacccagggaagaaatggaggtgacggaaacggggaggcgggcggtgaaagaaggaagacgagagtggagcgaggaacacaagggacaaagacgtagagttgaggcacgagcacaagcaaggtgaaaaggattcgagaggcatgagagactccacgaagagggaggaactgcgccgacctcaaggacggaaaaggtctcttaccctctgtccatcttcacgttaacctgaactatctatatttgtcggaagcagatactttacccctgcgttcgccattcccagaatcatttctctggtgctgctgctcgtgagaactcccgtcttcggcttccagcatcgatgttttcgcggttggtccgcccccagtcaacactcccgcgaacggtgcaggaagaaggggcaacgcaagagggaggaatagaaaacaacaagtgaaacgaaaaaatgacgcgaaggcaatggcgacaaaactatggtagggaaaaccgtcgaagactgtgtctgtgaacaattgcttctcaccggaggtacgcgatatcgggagcatatctacctcccaatcaattacaaaacaactcggcaggcgaaggcacatgaacgtgtgttggggcagatgagcaaattcatgcagcgatacagtgtgtagaaacacagggaaaacataatgctcgtccgcttccgcgctatgtggcctgtcggttgcacgaaagcggaaaatttctggcatgtgcgcgagtgatcacatggggtgtgaatgggaaacctttgaaaagacctgataaacgacgcgccggtcaagccagcaaacacgggccatccgctaaaacgcaaaaggagctgtgaaaagcaggtggaaacaagaaagaggaaaccgtgaggcatgtgcgagaacagcgggctcacgcgtcgaggagggaggtaaacagcacctctccctggtcttcacactgccgatcgtagcagctgcttttaggcatccgtgccccgcgtacaaagtggactttcttcatctgttcgtccatgcttccggaaaaacgaatgggcttcagtgctcagataactggcttgaatctgcaagatctctcagtttctcagattatgtcgggcacagtgttgtcgcctgtctggccgacggctgtggctggtgcctattcggcgcgactctcacgcgtgttctcacagacgccacggcgcatgctgccccatgacaacgcagcacacattccgataacggaaaagaaaacctagctggaaaaagaatctgctttttgacgccagctctcctcggttttcacgacctgaagcagtaacgcaggaacggtctctaaaaggaatccatattcgttttcgccctatactgcaccgccgtacacgtcgtctctggccttgactgcgctggcttccttacttccggtgcagacacacaaccatagcattggcggagcccacggaactgtttggtacagccgccgaattgaatgtccagcataaaagtatgataatggcttctatgttagttcgctttgcttcgatggatcagatggagttgcaaggctcctgggagttccgcatttggtagtgtcacagcgacttttcgagagcacgtctgatcagctctcttgacggccccttccaaggctgaagcaactccaccgccggacgatgagcgactgtggactccttttattcgtatgaaattttgccctagtaattttttctccatttcgggctcatccattggcgcgccacaacgccctcagtcttgcaccggcggtaccttgcctgtacatacacctggcactgcccagaatcactgctaacggaccttcagaactgctgcaatcgaactttaccttcaatcaggaattttcaattttcgcacttgttcccgcagccgtgcataagtgactgaattctcttcggaagtccccgccctccgtcattccgtaggaaccacttctccatcttgtgaggcagtattcgtggcaaaagactccgccgactgcctctgccagcacaaacatgcttaggtaaattacggatccgtagcatcatagaaatgtaggttggcgtcaccatcattggctcagttccttgagcttcagtgcgttttctggatggtctgaacaaaaacccatttgtcgctaccgaaacggatccaccaagagaaaacggcatgtctacatgagaaccaaccgagtccgacttctgacttctgaattttaacatcaacctcgtactagggaagaaagtgtcttttccgcgaccctcgcagcca

SEQ ID NO: 1803 - DNA, 4211 bp, Toxoplasma gondii
  source 1..4211: mol_type = genomic DNA
gaatatagccagcattgctagggcaggttgttggtaggtgaaactcaaacagttccttctgtgtcggaagcagttgcaaacaagcggcccatttgtgtgcctgaaaaatcgtgactggcagtctgttgttgttcgccgcaacgaaacaggcgaagcatgtttgcgatcccagaggaatttactaagtcacagcatgactataatgttaccgtcttccaacagaaatggaaaatgacaggtggcagagtctcccactttattgtctggtttttgtgacacgcttcctgtctactgatgaaatcaagcaacgctctccgcccccatccgcctcctcgtcaccaggcaatgtgtctcaacgcatccgaaaaagagaatgaattttcatcacagtatctagtgttgaagcacaacagacgctctccccgttccgccacctaattacagtctagtgttcttccgacgaagaacatcatgatgagggaaaagttccgttttaaaccactcctttccctccaggagtcaacaagactagcgcaggagattgtacgtaacaacgaagcggtattgcattgagcttctgcagctaaatcattcctcaacaagggcagctctggaagcaatgaagcaagaaatgggaccttcacaaaagctgcagaaagcaggcgaaagccttgtttaaacccgaggaccgctgatagccagaaattggttatgcctccaggcccttacgattctggtgagccaatacgtagacttcattttctccagcattcctggctccaaagcgcgccgagtttctctgcaggaccacgtagggtctgccatctgaagaaaatggacgacgcttcgacgccaccaggacttttccccgttggatagaccatcagaaaagttctgaaaaaaccaacggtcacgaattgaggccccaaaccccacctttccctccattccacccctgcttgtctctcgcggtggtttcatgattcacagataacgtttttctttaggtcgatatagggtagcaatggcaaagggcaagtggccgtgccgaacacaccgtaaggagtcacggtggaaaaaaacatagctccccgggagcagacagtggccttgcaagcatctagtgctccaaaagcgagcgataaatagaactgtgcgacttcaagttcccgactgccaacactgctagctcacacgtcttgaacccgggtggctccgacaagacacacggcaggcagcgaaaacgggaagttcaaagacgggtatttccggagaattgtaggccacacaactcattcactagacacacggtggaaaagagtttatgcaggacaaggcccccaaagggcgggtgtggcatcgttgatcgaggctgaaacatcgttggttgcctcaaagagctggtaaggtgcaaaaattcgagaattcgtgacgcagtggatgatccaactctaaacggcattttgaagtgcacacttcaatgattgtccttttttgggctatctggccgaaaaacgcgagaagcacgctgaaggaacacgacgcttgaaatgctagccactactggccatgtcttctgcagcctctgtctagcggcccgcaaaaacgttgtatgtctcccccgcagccgaaaacgtagaggctgagttattcggactgtcgatggttgcaaaagaggcggaaagacgtatccagtaatcgcctcgtaaacataaaataatggttgcaaagtacttctttcatccacgatttctctcgtttttcgtctacggaaacggcggaccgctagtccgccagttgactaaactcagacggaaggctcctggtcaaacccatatccctccctccacacgaacggtgtgctgtttccctcagatacttacaccgttttttgtgaaggctcgaaaggattggaatatgtaatgaattgcccatatggatgtgttgcgtgtcaggggagcagatgtacccgtcgcgtgttccaccttgacgcaacgaatcagcctcgaatctttggctctttggactaactgagcaaactgcgtgaccagatcatctcacacactgtggagaattgtgatagggtactcatgtacggaagaagagacaaatcataccattgggcaagatcgcttacgataaactatgttgtaccgttatccagcagatgccgacaagctgtttttgtagataagcacccgccgaaagacgcgggatgcaacacttcatcataatgtgcagggctcgaaaagagatttttttacgatattccccagatgtacatgagtaaccagtttgaactattcactccattgctgtggaggtcatgcgagagtttgggactgaaaactcagggaacatacaacctacgtgatacacgaatgcagcatgggctacgcctgtaggcaaaaggtactcggtgtcaaaaaagccataggggcagtcttcaggaactgaaactcagcttcaataggaaggttcatgcagtgcagttccccgaaaaaaacaccgttgttatccttcgtgcaggggaccgccgatggtacagtaactggagcaatccacgtgtcgctagtgccactcatctgcgtcgggtgctgctacacgctccttatgggaagagcagctctcgttttgccctgcttgatttcatgtaccacctgttgacaagaaccgagggcacgcgtcaattgaggaagattctgttgcggaagcccgcttcccctgattgaggtggtggttagaacatgaccaggttgtcgaggaatcagtgatgatagaaaccgaatgtggcctgctgacaaaggacgaggcgaggtaaacagaaatccgtgacggaggtctgtgatgcctgtagcgccacagagtcatttgtttccatggtagtatatattcggagaacgcagtggctatacgaagcagatataaaatcaaacctgtcatccaagaggttacaggcgtcccgtcgccgcattgttgcccattgaccagggagttaccgaaaatctctgaaataccgtgtgctagtcaacacgaaagtcctcattcaagtcatcatttaggaaacctctgagcctctgctaccttctctagggctatccgccttatgctgtatctttcgcttcgtctactactgttgatcttgtacttcagcggctcgtgtattgcggcggaatcacaatttcgtgttacccgaagaggacaaattctccagaaggtcggttggtttcaaattaatgcccgatggcctcggcggcctggagggctcccgatgtttcgtcaccaatgggaaattgaattcaatacggaaaaaaacggaaaagcacaaaggttcgtttttttggcacgctttgcccttcggcagctcgctgcatagagccccgctgagagctgccacgggtaacaagacagattgtcctagcccagccgccagcttgtctttggttgctttcgacactccgttccacggcttagcgggaaattcagattttgtccgattctgtggaaagggttttgtgcttttcttttccctcaacggagtactcaaggactcaaaaagaggcactcgacctgtgtctcgcggtcctgcggcacgcaccggtcctggcggcacgaacagctcgatggcccgacaatcccgcaacttttttatctgtgaacggtggttttctttggctctattctcatatccgatggcggaatttcaacgcatgtgaagaccataaccgcactttgcgttaccagggaatttgagtgatctccgtgatgccatcccgggccttgtctggtcgaggagctcgagagccaatgacgtttgcgttagatgaaccgttgtcattgattgtgttccaattcgacctcaaggagggatcaagatttggtcgtcgcgcagtttcatgtagacattctccgtcgctgtgacacagggttctcggaaacgcctgtacgtttgtctggctagatgagagtgagggtgcaacggcgacgctcgggccccataccgttcatttcgtcgttttcttttcttcttgtttcactcgttctactacgtagactttatgctgtcgtgcccacagtttccatttttcgcacactgacggcggtggtcttcgcggcggcaaaacaccttcccggttcggatcgtgctagcgagcccacagatatcacagaggcaccggtaacgttctctccgtttccctgaattgtcagca

SEQ ID NO: 1804 - DNA, 3006 bp, Toxoplasma gondii
  source 1..3006: mol_type = genomic DNA
gtcttcaactggtggcatctctgtcttaaagcgtctactcttcaccgcctccgctgggctgctacatatcccttctctctcgtctagtgtgagaattgtgggctgcgcgtcctcctcagcgcgccactgcctcccccgtttgtggcagacgaacacagagacgaacacacagtctcccgacggtctctccggtctcgaggactctgcgtggtccaggtacgaaaaggatttttattttttctcgcttcgcttcgcccccgaaacgcttttctgtacgcactctctgtcgagccagaagaacgaacgacagaagccgacgcggaggtcgctgacgaaggtggacgcgtggtggatgtagaacgcagagaatccagtgaagagccctacgagggcggcgaggacccagacctcgagaacctcgaacagctggcgcttccccggtgtacagacagtccgcttggccgtgaggagcagccgccgcaggagagccgcaacatgcactgcgaggagaaccgccacgcggagcagaactgcgaaaaccagcagcgcaggcaccagacaccaggtgtacgtacaccccgcgacgcggcggccgagacgcagcagcgacgccggagcagccgcatgcaggcggcgcgggcgcggcagagctccacgtctcggggcgggagagaagagcggcaaaaaagaggcagcagaggcttcggagtcccctagaaaacgcgaactcgcctccgagaaatgatgagtttctgaatccttgaggaggatgcgctcgaaggagggctgtcggccgtctgtggagagggactctcgctcttcttctctctgggaggatagaggcttgagcggaatctcctgtggccgccgctcctggcgagaagagccggagacgagcccaactagcggcagcgcgaccgcgaaccctgaggctctgacttctgagaagctgtgcacagaggcagtctcgcgcccgtgtggagactccgcagaacacaccagactctcaaacagcggagaagattcctccaaagacgcagacgaagaaaacgggaacgaagaggggggagaagaagagaagcaacaggaagaagagttctctggattactcagcggattgggagcaagggggagagtcaaacgttttgatgttgtgccttcgttgacgtctctgtttagcgaaggaaaggagggcagcggcgcggtcgcagaaggcgcatgcgtggaaacggagtcgccagcctctcgctggctgttcttccccgcccccgtctgctgtatgtacacctctcgcgggctctgtgactcccttcttctcctgccaggacgaggctcttcccctccgccgctcggtgaagctggcatgatgcagagacgaaggggagggagaagaagagaaagaggagaagtggaggaagaggacgcaggggcagctagccgagtcgtccggagttactcgccactgccgccggtcatgtcgtcgcgcttttgtcgaaggggagacatgggaggagagtctggtggctttgacagagcatgagaaggatggacaatgaacagaaaggtccgctgtcgctgcacacagatacgagggcggtgaacggcgcgggcaggcggttcagcagcggtcctttgcagaagttgacgtagagaagagaacgcgagtctctgggcttcgagcaaaggatagaagctgcgtggttggtaccatctccaaatatcagagataaaagagcgtattttgtctccgggagaacgtgcaggccgcgacgctttcgatataggcacacgaaattggctgggcggagtcaaaagaggggggaagagtgcagaaactcgggcgtggaagtggagagagaagccgcttttcgtctctccctgtctgcgtctcgtctctctcgtttttctcagctctctctctcggtcttctttgtcttctctcggggcctctgtgtggctttgtcgtctgcgcctcgccgagcgcgggcgaggttggagcagccagggaatgagtcggttttcgcagaaagatgtgaaagcgtccgcgtgcagacgagaaagcacaggaagcaagcgttccacctttttgggtgtctttacacccgaaaagcggcgagtgttttcgagcgctgcctcgtcttcctcctcgaccttgtcctgggccccacgcaggtttgcaggcgactttgcgggtctctccatgcgccgcatgcgtctttttttctttttcctgtcgactctcggacaccgagacgcagaggttcatctgtgcgagtctgttcttcgcagaaaaaggcgagtccgtgtgtcgaagcaagccatcgctgcatgtggctacaacttctcgttcggtgtcggctctgcgctcctctcgccctcgactggcttggtccttgttgcctctctcgctcgttgtgtcttcttttccggtctctctgcttcctgtagaggcacacgtctttcttcggatgtctcccgctttccccttgaacaggaagacaggagacgctctcttctcccagagataagccgcgggcgaacaaagacctcttcatgcacagagaaggagctggcgagaaggtttctgcagctcagtcgatctcttctgaaatccaccaacgcagacagacgaaaatggagaaggaaaggaaagcaacaagttaggaggcaggagggagcaaagctcggacgcccagcccctgctgtctccgatctgcggcaacgacctgagacaccagcagacacgttctgcgcccagaaactcctgttgccgtcctgaggaactctttcgtccttgtctctctcctccacttcttcttggtctgctctcccctacgcgaccttcgcctcgggcagcctctcctctcttctttccttctcatcaacctgcgctcgacttctctctcgtgtctgagaacagtcgacctcgtctgccttcctcgtcacccgcaaagattatatatatatatatatatatatatatatatatatatttatgtattcgta

SEQ ID NO: 1805 - DNA, 2324 bp, Toxoplasma gondii
  source 1..2324: mol_type = genomic DNA
acaagcgaggagctccagaattttgattttcctctgaatgcgctcctcctcccgcgcaaaggcctcgactgcgcggggacctgcgcctccgtcgttctcacgcgtcgcctcagcgagcggctctcgaaccgcagcctgtcggactgcatgcacctgccagtctcgaagaagctcctgccgcctctctttcagtcgagagagaagaagcgagaggggcaggagaggaaagtcgccgaccttcttcacagaggcaaaggcgcctggaacgatctcgccggtgtccagcagccaggccgaagaagaaggcgacgatggcgaagaagagacagaagagagcaaagactccgcgacttcgtcggcttcgtctgcgacgatacactcgcctttcttcctcggcgagggagacgaggaggaagcgaatctgcggagaaaggctgcggcgagtgtaggaaaacctcctccttgcgacgcgaacgcgcagggtggagagcggtctcgcgccgtctcggagtatgcacgcgccgattctgcatgcgagaacgaggaagacgaagaagcggaagaggaagagagagaagacgatgagagaggaacagaactggaaggagagagaaaagaaagcgcgaggagtgacgaggagactggcgacaaagggcgtggtgagaaagaagaggagaaaagacgagaagcgaagatcatctccggactggagaaacgagaggaaagagagaggaaagaggccgaggaagaaagaaaagaggactgtctcgtcccttgtcgaagcatctggctgcgcgagaacattgtgagagtttcgttaaaaagaaaacaccgtaatgagagagaaacttaaaagcgtatattttaccgcaaggggccttcgcctcccgcatgttcctcgatgctctccgtttttttgtctttttctctctcaacacagtcacaccggaaaggaatggaacaagaacgccggggaaaagagttcaggtctcccctctctccttttgcggttcgttcttttgtcatttcacgagtctgcatgcatcaccggatgtcctccaccgtggaagtcgacgcatgcgtatgtcttcccctcccatgtctctttctggcttgctcttcctccctttctcggaagacaaaagtcgacagagagacctgcgactgcggcagagcttcgctcggggatgccctgggagaagaggcagggcggaacggctccggagaggagtgagggaggaacgagaaaggaaactgggggaaccagtgacctgttcagctgaatcaagaaacgcagacgaacatctggagcacacaaatctctctgcatgtacggagaactcagtacacacaggcaggaggctatggcctccaggggatgggcaccgaggtggagcagctgggagaggagcagagaaacagaaacgctgagcaaagaaggggaaagcagagtgaacactggcgaaggaatctggaaaacgcaagactgctctctcgccgcctcttgaggcttccgtggtacgatttgacattgcatgcgctgccttttctttgcatgcgatctcgttgtgtcaccttctctgtgaactttttccattacgattcttgaaggaagaccctcgttcgacctgaaacacacaccagcttgcacaggagactttgttccggtttcgctttcttttttttctttcctctgtctgtggctctggtcttttccaaagatcccgcagagcgcggcgcctgctgtgtcgatcgcttctctcgagagtcctccaagagatttcttgacttctcgcttggccttccttttctcgctctctgcgcgcattctcctctctgtggatccctctcgaagggaagctcctcccacagttcttcctcgccttcacgaataaggcagttcaggaaacgaagagagatcgccgagactcgcctctccagctcctcttctctcggaagtctatgcgctaatgcttcttctcactttctttccttgatccctgtttggcgttcacccccttccactgtgcaccttcccttcctttcaacctttcgttcctcgttcttccagtcttcttctctcttcctcttcttctctttctcttcttttctttcttttctcctctctttctcttcttttctctctcttctcctctctttctctttttctcttcctcctcttctctctttctcttcttctttcttcctcttcatccccctttctcttcttctctcttcctcttcttctcccttttgtcttttctcctggcgctctctgaaaaggggccgaagtcttggagagagcacagcgcgctgaaggccga

SEQ ID NO: 1806 - DNA, 1990 bp, Toxoplasma gondii
  source 1..1990: mol_type = genomic DNA
ctcaattcgtgacgcctgcctccatatttttacatcggaaattatgtcgcttgagacggtctcagtcgcgtacaatgacttgccacactgttaaattgtaccataaaatctacaagttctgtgtgacaaggcgccattcggttttcctttcactatgtgcgcagtttttacctgaatcgtcaactgggttgtaattttgtgggttaggggttgtttgcagtcatcatttgaccgcgcggctgggtgttcttggcaaataagaaactgcaggtgtatgcagaactatctgatatcgccaaggttaaacagcggtcctttttctcttgcgataaatatatgaggcttcccagcacctcatgctgtgctgccattatcaggggacgattacaacatcttctgcttgtgacaacctagttctgcatcatgtgaacaccaaagacagcagctctgttatttgtggaactgtatccgtagaatgcagttgcccatcaaatggatcaagtgcactgtggtagacgcagggcgtaaaaagtcccactgtttcagtgtggtattcgctcgcagcgtttagtgacagtcggtgatcatacactaccagcgtagccagtactgacataaagcaaccatcatggctgaacctgcctttctcgtgtctcgtggttcacactgcaagctgccgtatgcggagcgcaactgctgagcggtagcactgtggaacacctagccgctacgccggttctggttctcttcaaccggttataaatttgtacttcactgcggtcgacattgaggcgctcccgatgtccccgtgtcagcgtgagacttgcggtttatggtggtattgtgccttacggttctcttcgctgaactgggtgaatcgatggtagagtgttcggtggcaccttcggcatgtgcaaaggcatgttcacttgttcatcgtgacaaggggccactaccacagctggagacagctgtattcccttgtatgcgaagtgtgtgggggcacacgtgacattccttcacagcagagaaaaaaactgccctgctcttgacgcttccttggtgacacggagcggtgtcgccgctcgatcaatccccgcatcagcgggtgccatagtcgctttgggccacggggacgtgatctgctgcattcggtcacacaaaaacacgctggcaaccctttacgaaaattcatgtaggcaaaacggcactcttttcccagccacactagtccctcaccagaacctacgctacacacagttcacgatcaccggtcgtcaaaggctacagtttcgattccatcgtgacctcgctggtaccggaaactccaatcttggggggcttagcacgttggacatgaaattgtgcttggaagcgttcaggaagatccctcttctctttactgcccttttccaacgcagtcttctgggctataatgcgtgcgtgacaatggatacatgacctgggcggcacgagggacacgagcgagaaatacctgcggagtcagcgtgtcctatcgcgagtgcaatcgagaggacaacaaagtgaggcatttatgcagtctgcccgtaccaccaaaactgccaatgcaactccacaagggcatctccacgtagctctagtggtgaactctctacagcacgagtggatgttgctcatatcggcgcgaagagcgcatgcacttgtccttttagaaagcaagagcttgtcagcaggtcgaagaattttgagttttcggcatccgcgtttctgcagaagcataactaacacttcttgccacggcgattatgcccgtagcaaaactgttcccaaagctgaatttttgttccatccttttcgcctgcaccgccgttgccgcccgagcggtcactagcggcctggcataaaattcggggactgatttctccaagtcacgtgtaaacaggggagttggcgtgacttcccacatttcatccctttcgttttgtgaattccaacatccacctaaaga

SEQ ID NO: 1807 - DNA, 4546 bp, Toxoplasma gondii
  source 1..4546: mol_type = genomic DNA
gcatttcctcctttgcaaggcaatcaggagtatcggagtgctcatgtgtgtcgcggtgattggatcaagtcagcaatggcttttccccagttgcctttctcgaagtgcctctgtgttgcacgcgccctgcgcttcccttccttgtatgcgtcttctctcctttcacgccgacttccgctcttccggcttttcaaaaaatgcagtgcacgtcttttacgaatcgacggttttcaggggctctctggagagacaccacgcgtgttcatagcaaagctttccacttgtctacatgcgtttctgtttgtctccatttcgctgtcgcgagggtacggcggtgcgtgatatgctgttttgtagtcgcgcgtttatgtggacgacgtcacgtcgcttgctgcttcttcgtctctcggcttcctctccgtatctctcctatttgtctcgtaatggacgcctgatgtaaactgtctcctatttctcaagactttttttcgcctctttgttacgtcttctaggtatcttttgtcgcgtcgacggccgtctactgtaccccaattgtgtccgttggagccgatgcgtttaacctgaatatagggactttctcctgtggtaacgagtgttagcgtcttaaatgtttgcgccagtgcgaattttcgcgttccagcacgcattcgcctgcggcgaccctggcgtggaatctccagtgaggcactgtactgcagcggtcaccacctcctgtctccgaatctgtgtccacctggagcacaaaaaaccaatacttccatctcttcgactttttcgttttagtctgcgatatcggagtcttgcaacgagacgcactcgcgcactcaacggcgcctctttgtgatacaaatgtaccgacgatcccttggcaacagccggggaaatggcaaatttccctgctgatggtctcccagtgacacacgcttagaggcatgtcgtttgctctaaaggcgcgtccgtgaagcagacggttgcttgctggaaaactcagacgcaaagaagttaccgctaccgcaaaagcaggcaaggtgccccgactttgcgtctagtctccggccctcaaactgcagccgactgactggcgagctagatctgttcacgtctgtgctgagcggtaacgccgatacgaattggcgtatagaggttctgcaccaaaggggctgaattcggtagtggtcttggttggacaatgctccccccattaagtactatcttgatggagctggagacgacgccgttcacttctttgaatagccgtttttctttgagggtattccagggcctcatcacctgtcacgaagctcatgtctgaatttcttttttctgtgtggagcgctggcggcactcttgtgcctgagcgaaaacggactgccgcgaattcatccgcgacttccaggaacacaccgcggtgcacgcacacctcaggtccagtggcgcagcacgcatcactgtaagttctgtacttttgcgatttgtggattgccggtaagcgttcgaaattcggacgtgcccgctgtggtacgggtcaacgattgccgtccaacgactcttcaataccgaacgcggaatgtggcaggaaaatcctacgttctttgcggggaacttgcagatgcgcatccagtacgagagtggtcagtagtgacagttccgacagtcaacaaatgcatgaaagctgcgagattacgaaatttgggaattttcccgctggatgccgttcctcaacggccagtgcctcctccctctgcagtaaaacggacgatgcacggacttccagttatgctacgctgagcagcttgacccgttcagacgtgctcttcatgtgagtgggcgttccaccgttcgtcgtcgcgtaacggaaatgtacgcgatgtttgctcaggcgagctttactggcctcccctgtcgagaagaacatttacagcttacaggttcgaaatcaggtgtcgcgtgttttccgccgtgcattccattagagaagccggctagtttttcaaataagcgcgggaggccattgtacttcacgcacttaccatggtggtcatgaacaacacagtagaacttggatattgctcttttcaagtcacttctcgtttgtccttaattctctctcttttatccccgcggcacctttatgacgtgcacgcaggtgttcgtgtgtcgtcgtaatcgaaaaacaacgctcagatcgctcctacgctacgactccaaatttatatacggtgtctaactcgcgtgtctttcactcggttgatcgaaaaccaacgaacccgccggtggaatttgagcgttgtttcgagtgaacgaacagcttctgccgcactctcaaggcggtcgacagtgcgggtgtgtgggggttctactagctctcgatgcattccagtgatgagcagccactcgtgggtgtggcgaatacgtcgctttgtttccttcgtatcaagctgcctggcagtgtataacgacggcagaaaggggatgttgtttgcttaacgccctgctcacttaagtacgattgcgcgagctgtgaaacaaaatcggaactcggctaacttatctcgtacacatctcacgattctctcgagctgaaactcgtggccagacagaccgagagcgaggctgctcctctgtgtttgcaattcagtagcgaacgctggggttgtgcgtccgtccctacataacggagatcatgcctgaagtgtcactgggtcagtgccagggaccagtgccgggcactgttccggcacttgacagtgtgtccggcgctctgcctttggtacacgtctgtcgggggacacctgagctagccacccatccccctaagtgagttttttggagttttctctgtgaattctctaaagaaaaaactatgaggagacacgcgagaagaagttcgggcgcggagtgaacaatgccgccatcatagccacaaaaatgtggcggggacccagagggacatcccccgcgtcagaggcgggtttttccccgtgccctcttccggcgcccggcgcgccagatgcgcacaagctcgtccgtttttggaggattgtttggtcacactggccgacgaaaagcgacatatggcgggaagaccgtgtgtggagagactggcatggaccacagccaaaagggcagaggaaaatggaaggaaaataccggcaaaacgagccttcagcggaggaaaacctcctcattaggcgttgctcctaccttcggcgaccgtgggggaggggccaggccgcaggcgctgcacgacagagcgacggtgccacttgccgtctccaggtcgtggtcaaattctgctagagcacgatccctccaaccggttttccgacgccgcggccctttcctcgtattttccttttatcgccgtgttcccgccactgtttgtttttgctcaggtttctccacttcccgcctcgggagaaggggtcacttcggcccacagaactttggcaacgtttggtcgcgttgtctgtgagtgcggggtgctcccctgccaggcgaggggaagccttgggttcagtagccttcgtcgcgtccaacttcgcgtcatcagatggctttcagtggctcaatggcagtctctccgtggtctgtgcggctgagataaacaccggccatgtaggaacgccgtcggtagtcatcgggtcaatgcagaaaacccgaccaacttcgctcgaccagacaccagccgccgagtgtatgtacaccgttagtcattaaatctcagtgccgagaagcgcccgccaaacttgcaaaacgcgtcgtcctctagtttgtcaccgtgaacctggacgggaaattcgtggtttcctctcgtttctctggaacttcaaagagcctaaaggtggcgagattttgtgggaacgaatgtacagggtcacaacatcgtggtcctatgtggcacagctctcgccgtctccggtttcactcgttgttccaggaacgcaggacaaactcggggggagttccctcagtgctcttttccaaacgtgcgctttggaaaacgaaacattcgcgtgagttcctgtccttcccctcctgtctccccaggcatgcactgttgtcacctcttatctgttgcctcgtgccctggtatggcactttatcaaacacccgaccgtgtcttgcatgggtacgtgggttcggtttaagaggtattctgatgcatgtgtcgcacttttcttcgagggagtgacgtttcatgtcaactgcgcagaggtccgccgtctcttttgagaactcatggttattcttcttctgtgccgtgtcaaggacggactgcgaccgcactttctgcggttagattcacgcaggagtgggcagcaagttagcgtgatatttcctcggccccgtgaccgcggacgctgtatcgacagcccttagcttcgacgtttttcagcgtcccttctgacttcaatgtgaagcaggcgccgtctttcacttttgccggcccctacgtggagcccgcgaggtcgctgcctcgctctcctccctttgaattattcctccccccttttctcgagaa

SEQ ID NO: 1808 - DNA, 4565 bp, Toxoplasma gondii
  source 1..4565: mol_type = genomic DNA
gagtctctctgagaacccaaggtaagccatacgcggtcctcttcggcggaggcagaggcgcctgcgcctgtccccaggggagagtgacccccagcgagttcgaggtttcctgctccacttcttcccccgtctacgcttccttctgacgcgtttctttcctctacgtcctgcactccttccaagactctctcagagacgcaagcgcgaggagatgcgcggtctccagtggcgtcgaggcgcgggctgaagaaagagcagacagtggcgcccaacgcgcccgaaggagacagggccggcgcccccgctccgggaaggcgcgcagacagatgctgcatcccggcggacttgaaatgctccgcctatcgacggtgcatgcacatagtgtccagacggcgtttgctgactgtgccaccaggggcgcgttttttgaaaatttctctctcgcactttctagctcctaaagaaactcccgtttttgaagggacctcagtgaatcagtcagacaacatgcagcatctcctctctctcctcgaccttcggctcaaaagaaaactctgctgagagtctcggacgacccaacgcgcctcggtagccgtgtgtgccggacaagcatgcatgcagaggcaaaaaatacaggtaaatcggcagagagacgcgagtgagcacggatgcatgcggcaggttccgtgaatctacacaggagctgtcgacgcgtttacggcaaacgcgaagattaagaacggatagaacagcgaagtctgggcgagacggagaaaacgacgtacaagatggacccaggggagaaaggggagggaacaaggggaaagaaagcgaaaagagaggtgcagaggaaagggaacaggaacggagaaccaggcaagcaaagaagaccaaggaggaaggtcacgaacagagaaaaagaggcgacccttggtatttcgcgaggagacacccccggacatggcgtttctctgcttcccgaggcttttcatccacgcgacctgtgcgacagcgtgcagacgcttgaaagcaggctggaatacaaaagatttgaactgaggaaggaaaagaagtaaaaacaagcctcgcagacgacgagacagaaaaaggcttcgcatgcagtcaagccgatatatatgtgcgcatgcagcgaaccgctgtaccccgaggcgtttcgcttggtggcagccttggtgtgtgcttcgtttccttctctgcgttttctctctttcttttcgtagacttgcttgctattcaccgtgagttcgtctcagaactccctccccaacttttaaagaaagcgcatggtggctgctgacagatcaaacgcacagctgtgaactcggttcctacctttagacagtatctcactttcgactacccgagtcccccttcctctcttttattttcggtacttctgccgaccacaatcgacatcgttggtggcctggacttcttcgtctctcacccctcatctgtgcacatcttcacaagtcttgcagcttctgttttcttcactcttgctcgtctctctctgcatcgtttccttccctctccacgtttctctatgtttcacgagctgtctctgttccttgctccctctctctccgccgcgtattctctcgtcgtcttttttttgtgggaggctgtcatggtttgttgcagctgtcttggagatctggaaagtctgtttttttttgtcggaacccagttagactgcgtttttcacatgaggatgcaagctgtgaatagatgccacaataacatctgtggtagtctccttcctcaaaagcgcctccacattcgagacctcaccagtgctaagttcccgtcggaggcgcgggcgcatggagagaattacctctctgaagaagaaaagaatggacattacaaaacgggtgttggcgtggttctaggaagcaggagagtgcatcagaaatagacacgatgggcatagaagaatgtaagatcgacaccgtttttttcaggaattttggggaacttcagcactctcagtaaacgccaacttctcccgtttctgtgtcttttctgtttccgcggttccccctcttctcttttgcaggcacagcatcccttcgcgtcggctagagagagccgtgagatgcgacagcttcgatcagcgccgtcgtgctgggagtgggggcctcttagtcagacgtttcacggcgctttccggcgagggagcattgagctcacaagatgcgaaagaatttggcagataacacaagagttgtacataggggtgtgtagacaaccaagacaacaggactgtagagcaggatggctttacgttacacacagagacacacaccaactctcagactgtttctcggatgtaactcagagttgccaggcggagcgcgagcgttcagcacgggcgacaactttttttgtagattgctgaaggcagcaaaaagtagtggaaatgaatatcgtccgacagaaggttcctcgacactcgatctgctgtaaagttctggatttcgatacttgacgaaactaaggttctttcgcgtatgttccagatgcaatctatggatgcgatccagaactgcagaagtcaaatggactgaaccgagtcataaagcttcgcaaaaactgaaccgcagtccagttccccacttctttcacctccgaacacactctgcatttcttttcgctgcaaatcattgccaattctccgggacatctgctttccatacgaaagccgagcgggggtgacggctgcaaacaaccaacaccgtcgaggtgcggtcggtgaccggacattttcgttgagaaaccaaatcctaatttgcctcaggaggttcggtctctcttccgctgcaggtaagctgcagtctatcggtcagctcccatcctctcacgctgccgctgctctcggagtttatgtgggcgtgaagaaggctgtaaagcattggtatattaactgtggtagtctccttcctcattcaagtctgttcgaacgagtctgtctgcctatgcctatcaacgacgctggagaacctatgcagttgcggcgtcggttcggagagagttatgtcgcaaagggaactgctcgccagcacaccgatacagagactcccagttctctgaaacaacgccaccgcatagacgccgcgtctggatccccagtccttccttgataacacaaaaggcgtggaaacgcagaccgacaggaagcccagatgtctgcgtgcatctgcaaacgctgtgataaacgcatgaaacggcaggacaaaagatatgtttcctttccctcagcctcacggtccaggagaaccgattttcacactccattatactccacccgtcgccgcgagtaaaaataacggacagttgcgtgcaggtgtgtgtcacctgtcctatttgaggtgatgtgcaatcctgatgtggaggggcaccagccgcccgtggaagtctcagacagcaagaggagttcgatgagacacaaagagagacagaaagtacaagagagtaaggagaaaaagagaaagaaggagaaatagtcgaaacaagacgtttacaggacagccggaggagaaggtctgggcagggttagggcggaacgaagcagtagagagtggtgacgctgacgatacaggaaagagaataaaagataaaacgaggaacgaaagagagcgcgtttgttgagaggccagtacttcgaacacaagacgagaagaatgccgtcgggaggctttggctgcgaaaaagcgcgcaacgttgcagtgctacgccatggcaaagacgcaagaaacaaaggtttctctcgtgccaaggtcttggtttttctcttttcgaatttcagcgtgtttcttggaagacttgtttcgctcggcttcttccgcaggaccctcttctcaacgtctgcgtttccatttctcgcgatcttctggaacttccgcgttgttctcagcaaagcgcttgcgagccttctttcgcctttgtgtcttggtttctcttcctggaactccacgagaaagagcaaggaaggaaaaaagaacgaggcttccactgtcgtttccttcgttgtccatgggtgttctagacgccttctcatctccacagatttccaaagattggagattgacaagtcctcagctcaaggaagatattcgcacatctgtatacgcacaggcagctgctgagcaagacacgggccgtctagttttttggatttctctgcaatttctcaaagcacatcgacggcttctgtctcttccggataacacaacatctccacaaggacatccctttttgttattacgggcactcgaccccccctcctcccgcccgccggcagcctcgcagcttttctgcatcctttctggtgtcttctctttctcttccatctctctgtttgtgctcttaccttctctcgtgtctcgtcgtcgtcggctcttctcctggtcctaacctttctgtctgtctctctcccgttcttcggaggctgctgccatcgcagtgttcgtccttcgtccccgtgacgccttttcttttccgcgaaggcctgagaaatttcgtcgcggcgttctccaaga

SEQ ID NO: 1809 - DNA, 2195 bp, Toxoplasma gondii
  source 1..2195: mol_type = genomic DNA
ttcaccacgcatgcactgcagctttcttctcacgccttaggttttgacggagcaccagcgcagagtatgccgcagctcttcgcttctgaggcgtcgcctctcgctgtcgaaacgctgaagcgaatgccagcagaaatccgcatgctcctagtataacagagccgctggggggacccctgatagagaatttcgagtccagtgtctccagcaagtgtgtgtgtgtagcctcagcggctctcaggagaaaggaacaaagatactgtgcagttcaagaagaaaagactcagacacgtcgtcagcctgagagggaggcgcctgccatgagcgagatgaaaggtcaccgagtaagcagaggaaagaatgtggtgaatcaggaaccgaccattttcactcatcagcaggagaatcaacccgaatatggagacgaagatagagatatccacatatgatatacatctctatgtttttatatgtatttatacatatatctctatatgtagttgtatatacctttatacataaatatatatatatatatatatatatatttatatatgtatatgtgtataacgcatgcattcatgagtgcagacaagagaagaatccagaggcgttcggaattgtttttttgctttcatgcgtttcgtgtgtggctcgcgcgcgcgaggttttggcaggcactctgagtctcgctcttcagtcccttgattgacactgtggctttgtgagccggattccaattctctcgagaagcacactagtaaaaaatgggaggaatgagaacgagaaaacggcgctgagggaaatgctgtcttcgaagagaagagaaaaacagtaaaggtaagcagagagaaggaaagacagagaaagcgagagaacgacacggatgtctggccgaggaagtgccagacagagaagtcgacagaatggagttccaaaaagtgaaggaagaagtggaagacagctgagcctcgcctgccctctgtggagagtctcagcacatattcacccgttttgatctcacaattcgcatgtccatcctctgttgccctcggggtcagctcgccttctgcgtttctaggtctcttcttgttccggctcttctcttggctcactctgcctcgattcctgtcccctcgctactcaacttcctccacacatgcttcttttctgaggtgtacgtacacttgactcgagtcgttccgagttcccagtgtcgatcctctccttgcaccgcacaagtccctccgtcggtttgccgcgataaaactctcgcttcgctaggccttctcttggattcttctctgacgacacactgacgcattccaccgacttggcatgcctccttagcctttctcactcgactcaggtgtatctacactcaagcgcagtcacccgcactgcagtgtcgcgcgcgcgatccgctgcacacccgttcccgcgctgtctgctcacttcgcgtcgattcttttcgttcctgtgcctctctcgagtgggctctttctcggattctctgtctcttcaattcgcctctcctccgttttttcgccaccttcccttgactcgctgttcatcgcgggaggacgtcggcgcgcttcctccaagcgagcttctcccgccagagagagtgcatgcaaacttctccccgggctcgcgggtgcgacagcactggactgagaagcgaacttcacttttcttcctccgttttcctgccttttcacagccttgcctctctcggctgtattcacggagactgcatgcagccaaggaagtctcttttcttcttcttcttctcacccgccgcggccgcggaccccgctttgtgtcatgcctttgcgccgcctgccgctgtgtctcctggacccacgatgagagaggaagcaattccttgcgatacacgtgcgttttttttgtgagttttccctgtgtttttccgttttttctttttcctcctctctcttctctcctctccttcgccctgttcttcgtccttctcctcgttccttccaccccttgcccccaggtccctgtgcttctgacacgcgtaaagagggaaggcgagccctccgttcctccccttccttcccgtttccacgcatttcttcgattcacccagttctccatttcctttactttctttctgcctcctgctccaggatcttccccccactctccgctcttcgccttcaacccca

SEQ ID NO: 1810 - DNA, 2735 bp, Toxoplasma gondii
  source 1..2735: mol_type = genomic DNA
agctcgactcctggctgagacgcggaaaacctttacttttgacccctctccttcactggtttttgttgacctacgttagagaacaatcgaaaccacggtttgaatctcgcggcggaacgaacttctcaaagtaaaacgagagtcttcaacagacctccctctgcacctcacaaacgcgtttcctccagattcgcctgtgctccacgcttcctctaaaaccatatatataaccgctaaatttagactttggggattcacagaaaaggcagcagttcgtcgcagtgctacatcctgtgtccaggatcccctctccacacccgaaaaggaacgacagaagaaacctgaaagcgtttacgatgctcacaccacgtcagaaacgcactttgtttctctctcttacttgttccgaggacctgcgttttccttctctacagaaaaagcaacttcattttctcggtcgaaattcttgtctgaacaggcggcagggacgttcgttccagaggagacgctgaggcctctgtgccacgcagtcgacaccccaattgccgagaagtctctgcggcaaaaaactcttttttcgttcctgtctcccttgaccgcgcgcctgccgccagcccaaagtctgcccctctcccgcctcgcgagccgaccccacactggagacacttgatcccgccgattgacttctgaaggtccggagacagccacccgcttcactgtctccttccgaccgcgctcgcgccccggcagagcagccgaggaggagacacacggagagcaggagaaagaagaagagctggagagcgaaggagagcacgggagagaaggccgcaaggaagagcgataggagggcagagcagactgaggttgttcggcggagagggcaggagggtgtctccggcagcaataagaggcacgcggagcaagatgcggagcagccgagttggttttcctccaagactcagaggaaagagggagtgagagaggaagggagacgctgtgagaggagcgcgtttctgaagcagcagaaaacattctacaaggagggcggcgaggcagagttctccactgcattctgcgtcagagaaatcgtcacaactggaaacgaattcgaccaagaccccctgacagtgcacgaacgagcaaggcgaagatacctgattggagagaaactgtctcgacagaactgcgcacagaaggagcgacgcgaacgacgacaggggacgaagagaacgggagcaatccggagacctcgcgccgtttccacgcgaagaagacgttcatgcatgcgtaaaaaaagagttgcagctagtcttcagatgacgaattcatccaaattgatggaagcaatctccacatacacacgcaagcagtcgagccggtgacacgcggcgtcatccggacttgcagagaagcatttacgcattatgggcagggagggtccacttccacttttgaaggctctgggaggttacatatgtctagagacgcgtgcgatgaagtctctacaaagcaggttcacgacagttgcgagtgaatggcgatagaccgcgcccgaatgttcagttttctgtttcagtgggtcttgtttttcgcaggcaagcgttccggctgcgagtctgctgcgtcgcggcgcctcggctattcacaggtgtctcgggagagaaaaaacgtttccgcgctttaattggaagaaaaaggctttagggcgtcgtcgagaagacgtcgacgagagggagagaaaaccgcacaaaacagtaaagaacaacgaagacccgctctggctgcgcgagtgcgcgtgcggcgtcaaacccggagagaaaacggcaaaaacttgggggaaaaactcggaaaaagcgggacttttcagaacccaaaggaaagatgggaacagggcctcacgccattccggggacgggaacgcgccgggcggcttgcagtgccgcatctccttcgacggagcgagggaaaccgaccgaggataccggatacacgacgcggaaaaaacgcatggagtaacgcgaacgcagccatcaagaggagaaaaggcggatgcgagggagagagaaaactctgcgccggaagaaaaacgtttttcggtcagcgggtgacacttctcaggaggggctgagaccgccttatattcggaaaacaatgtccgaacaacagtccgtcggctctgcgggagacgaaacgcggagactcattggattcgacgcaaacagcccagagagaagcgcaggtgtgtcttctccgatggagaccgggaaattttcttctctgtattctatttcttttttttgttttctgggatccctcggaggtgaacatacgcgccgagaatgcccgctgagtcgactgtgcgcacagagacaggggggcgaccaacacagcatctccgctgcttgttctccctcgttttctcctttgttttctttcctgttctcgcttgtggcgtctgagcgtggagagccgcgtcctctttcacttttttcctggagggtgtatgagtactccgtggaacgcgctgggtccgtcgctgcttcgcgacggccgtctccgccccccatttcttttgacttttccctgtgccttcttcttttttcgtgctctctttggccttcagtctgaagaagagatgtgcatgtagccacacagaaacaaggcgcaaaccgcaacttttttcacttctctagtgcggatcagacgatttccagagctgataacgcagtcca

SEQ ID NO: 1811 - DNA, 2282 bp, Toxoplasma gondii
  source 1..2282: mol_type = genomic DNA
taatattactgaaggtgatgaggacccgcctgagacccaaagacgcaaagaccgtaaaggaagcagagctgaacaccccaaaacaacaacctgcagaagttttttcacctgctgaaacacctgccacgacaacgaagacccgccactctcgccgaaagtatatttgaaaaaacgctttctcatgttgggagcaatcttcaggctatctccaactagtatgtgcatgcgggagggggagccgaaagaaacaggacgctgtcgaggaaaatccaactgctccttgtatcagactccctacggtacatgtatcctgttgtcgactaccaagacatgctatcttgtgtgtacagacgaggagtgtttgagttacttgcatgtaactggcctactctatcgggggggtttgttagtttttgtccaataccgtcgtccctagctctgttctttatcagctacgtttcactggcagatgtgacgcagctaagccgatggctctggccagagcgaagccttccttcatatatgagtataactcgacaaaacaaaattaatagtcgtcgagaaacacacactctgagtgtttcgttttaatcaatggaaggtctggtgaagtggtggtgatcagatggtaatgcctcagacacatgcatacatctttgctgctgtgtacctcgtccgaagagtggaaggcaggtgaactgcattttgccttttgtttcttcgttactgggagccaactaatatttccaaaaaaacttttcacaattgctagaagctactccctacctgcgctacccgtagttttgtcaacactgacgctaaaccggctacccgacatttcttcgtgtgtaaaaagactaacagtctcagccgcgataagaactgttgcttttggccgcgctgttagttatgcctaactgaatatcctccgtgaattgcctttccgcttacaatattaagacacctggcacattcgaatgttttccgcagcctcttttggacaggccgccacagcacggactcatgatcggcaccagcatgttcacttacgtgctcgtcaataactctttctcgtttgagtgtcttgtgaccctcacctcttggttacccgagatacctaagaagcctcgtttgacgcagtgacccttgtatttcactagcgacccacgacaatctccgacgcagagtgattcacatgtagaaatactagtacacaggaaggagtccggtggaggatgaacgttcctgcccacagattttgttcagcagtgtagctcactgaccatagtggaagactttttgagtgaggtctgttccgcagcaggcaggtacattgttccgtgccgaaagccgtcgtggtctctaagcacagagttgttcggtggatgtaaaaaaagcgcaagaaattgaccacaggaaagtcccttaagtccagattggatctccggaaacaaacgggacgaacagcgttgggcagcgagacagatctctgcctgaggtccggccatggcggcagccgtgccggttcgagcccgtaaaacagtggtcttccagccttaaaaaaagatcgattctcgcctgctaggaaagttcgataaagcagagtggataccaacagaacggagagcagacagttactacagagaccgtatgttaggcgaagacacagcgtggcacaactggacgaagaggcgggtgagacgcgtttcatgtctatgccgagcaaggatttgtcacgcatgcacgcgccactgaaactcggccaccgccaaagtgtgcagtgcgttcttgttgggaaaacgtttaatcgtttgagtcaagacagaaaatattcgcaaagcgtttgcttttgtgacgaatgcatgcttccgatgctttctttgaaatgatggagacgtagtgtcatgcctttctcgcattcctttttggggagcagactttgtcccgcgaagggccattcggggctgctgggactctgcgcttttgccgcgtatacccacacaaattcaatgcgtgaaaacggaagcgtcctcaaaagagtggctcctatgttctttgggacggcgaggactgaagccgtgtccttgttcaaggaccagaaggctcatgtaggttcgtgctcccctccttttctggacaagaaacttgcgggagggccgtttctcagtttttttaacgtgaggaactttaaaggacgtgcttgaaggcggaagtttcggcacggagacgcttcggtcaatgttcacatctctcttccctgtataccctcgtacccgacacga

SEQ ID NO: 1812 - DNA, 2684 bp, Toxoplasma gondii
  source 1..2684: mol_type = genomic DNA
ctcgcccaggagcgtcccataaaaatgagctgaagtaggcttacatatacaaatgaagatacagacgtagtctcagagatttacaaatgacggtaaacacagttttattcattcaaatcagggcacatacatagtttcgtatgtgcagaaatgaacgggcatgcatatgagcgatgcttcttccggcttctggatctttctggaagactttgtttcggtcgtcgatgagctcccccagtgttccactagcggttcagctccaacaagctatctacttgaagccagtgtctatcttggacgtgttttgattctgcaaagacccaaactcattcagatactgttctccgctgcgacgtggggcttcgcaactccgctgtcaactttatgtggagaatcattcgagaacactttgtttgctggctcgtctgctggctttccgtttgagacggacgtttctgttctcagctggacaagccgctgtggttacaggagtgcacatgagcacatgcaaaaccaccttccaagggtcaactgccgcagctgacgatctcaaacacagtggaaatagacagccacttgacgggtgcgtgttccgtctaggaccctgtagatgcttaaatgtgtgctcagaaacgagtgagctcacgtatgagacactgtgttgatgttgccgccgtgtctcgtcggcatctcgtggtctggcgtgccacttccagtcttccgaatattcagtagtccgtcgcttttatgcattcagaggggacggcgcatttcccgacacacatgttctgacaggtggcttccgttggtaagaagaggaaatctgcaaggcgctcgacagagacgtctcctgatgaaccccactttcttcggagaagtgcgttgacttcagtcttttccttgcgaccctggttagcaacgcaaaactgtagggatggaaacatgtaatcctggccatcccttcggagaggcacgaaatttatgtcgaccggctccgatccgtcccgaacgcctgaggataaaaggcagcttcagttgcgttatcaacaaccccccgcaccacgtaagagacgtaaagctgctcagggtgtaaccgttggggcacttctatttcaccgatcaagatatttcaacccaaaaacatattagacgaaccacatatactggtcgagtttccacgtgactcgcagacaccaggagactgcccagttcgacttcgtgcactcgacccgaacgattcgttgtgcctctgtgcttgcagattttcgtttgagttgaaaaaggcgaaagaggaataatgagtattttctacgtctctgccggttaaagcaacttgatgttcaggcatggggaggcatcacacacgtttctcggtttctgtttccatctcctctcacttggcgcgcgtgcgccgccattgtttctggaggcaatttggcaccctctcacttttattcgttttcttcgtctggcttggctttgtatctatatccgtctgcgatcccgctctctaccatagccgtctgtttcttgacggtacgcgctctttccccatgttttctcttcttccagtctcccccgaaaacaccctctggctcgggtatcttcaatgtgctaccatgaaaagcacgcgagaacctgggtcccgtaaagacgctcaaaccgtaaacctatagtcaaactcccagtaaatcatttccaaaaaaggataatgaataaacctacgaatccctacgtgcactggtgcggtcacttcgctggctgtcaccatcgcgagcatgcttaggaacgcataccgtgaaaactcacgcaggcacacaccgccgctggaaggcaaaagtcgcgcagctccgaattccaccttctttttgttcgaggcacgttgctcgccgtttcctctctgcgaaaggcaacacaaagtgcgccttttctctcgaaaatttccgtgttctgcgcactttgaaatccggtgtgtgcccgcgtaccccccttcccccgatctgcaacttccgctttcgtccgtcctcccaccagcgtccacttgtctcgtagccgcaggaaaaagtgaatatctgtcaacttctcgtctatgtcgctgcttgtttggttttcccatgtcctctgtttccggttttttgtctcggccgccctctcgcacatggcgcacatgacgtgtgtgcgcctcgcggagatcatctgaaaaggcgcctccccttcacccggcaaagggaacttttcctgtctctagttttctgtctcctcgtcttggccgtactcttctccaccagaagtccccaagtcttatgcgctctgtccttcacacttccctgcgcatgtgccggatcctccggagtaactgcggacatcgatctagccacgcaacccaatgcggacgcatgagtctggcaggaactgtgcctagtttctgcatgcgcctacatctacgctctgcaacttgttttcaaccgtactttttcgtgtgtctgcgcttcctttttctcaccttccgacagcgagaccccgtctcgttttctgcgcgcctgccgcgtgtctttcttcggtgccgccacccttctaaggctcgggaactcctcgaaggaactgccggtttttttttctctcacctctttctcttgggaggcaacggacaagtccgccgacagacagccaccgtttccccgcga

SEQ ID NO: 1813 - DNA, 4059 bp, Toxoplasma gondii
  source 1..4059: mol_type = genomic DNA
gtatcttctcgtgtggtttcggattgctgcagaatgatctgacgtttttgcggataaggtccaaaaagcatgagattctggttgcaccagacaaagattacgttctgattgttatccaagacccgaactcagagcaaggaacggcaaattgacttcttgcggagatcggtccactgttggatcgatccgctaataaaaacttttttcctgtctgctttcgcaacgcgtccaagcaactgtcaccgaaccctcttgttaattttttctctggaagcaacgatggttactgtctcacctcatctgcggtcgtcaactgggttccgcagaagctcatgacttcccccaatactcggaagtgaaggatcgaggcgcaagtaaaatttgggatcaattccagactcagatatgtttgcgatgacctcatggttgcttgagttcaaaggcccttctctaatgactaggatccgtagagttagagtgcttctatccagtccatcgcggcagtcgaccacagagcgctacatgtctgatggcgccaactatgtcgcgagctgcacgagagtggcgggcgcggaatgcagaaggccgaacgagacgaccgtctttgcgtagacgtcactgcatgtgacactacagaagaattacaggatcaagttgcaggtgcctgcggcaactgtgttacgggctcaaccaagcgcacaattaagtgcacgcctggataggacactttttgcgcacgatcgcacattgtctttgcccttggaaacagatgacctgcggttgcttgacgacccttactaaaccttcgtgggtagcgagtttttacatggccgaaagcctgcgggtcaaagaaggcagaggcagaaatggaagaaaatggcaaatctggttgtgcaggacgtaacaagtgatggtcctctgcagacggacgactacgtcagcttcgagtcagtggttacgtggtctgtcctgtgaatggtagaggcaccctcagcgcgaagcggatgggaacaccttcggttgacgacccccctgccacagcatgctctaattccgtttctactgcagctgaataggccttcgcttgcccacgaactgtgttgcacgcaccgttgataccttcgttagtctttaaggttcactgcggaagctgtatcaggaatacgtgcaacgtctcttgcatacgattttcgaacggaggctcgaccctctcaaacgaagtcgcttcattgctgtgacgctcaggtgtacagacacaatgacaccgctatgcaacattagggacggcgcgttccaccacagtctgatgctcagtgtttgaaaagagctttacgtgtcagtaggcaatcgatcttctgtatctgggttgtccatttgcaacgctttgtagatttcttgttgcctgataggatatttgcaacaaagtagtacctacctttcaggtagacacatttgccgagaggagttaaaatgggtcgcacgatgaactgtgtcatagttgccgtagcctgcgtggttgccaccactggagtacgaggtaaggagacttagaatatgatcaacgaaggctcaaatgaaacattttgaacatatcaggggccgacgtgcctgtagaggcaatgaataccccaacagaattcgagatgagcgccccagataggcaaacaggaaagctttccgatttaccgccatttgctgagctgccacagctggcagaaataccaaagctctccgaacttccgaaaattgcggacatgccgaagttttcggatatgcccaagatggccgagatgcccaagttatcagacatacccaagatggctgagatgcccaagttatcagatatacccaagatggctgagatgcccaagttatcagatatacccaagatggctgagatgccaaagttatcagatatgcccagaatggctgacattccacagtttccagagatgcctaggatggttgacatgcctcagtttccagaaatccccaggatggctgatacgccgcaatttccggagatgcccaagatagctgacatgccaaagtttccagacatgccaaacgtcactgagatgccaaagcttgcagatttgccaaggcttgctgacatgcccagtattgccgacatgccccggctctcagacatgcccagtattgcagacatgccccggctctcagacatgcccagtattgccgacatgccccggctctcagacatgcccagtattgccgacatgccccggctctcagacatgcccagtattgccgacatgccgaaattctctagtaacgagttcatggcaaagttaccatattctggcgatatggacaccgtcctttccggactcaaggagttttttaccccgctctctgacctaatcaagccagaagctgcttccctgacaagcctggtcaagccatctggagttttctgagaaccctgttggcttgatgagaaaatgtatattgacaaatggctgtatctccatagttatagtgagaatgtattgacttattcgaggactctatactgaaccgcgcatacgagggaactgacagttggtgatgtgcgtttctgacttccccgatacgcataaatatgaccgtcttctttctgcggtacgagctgttaacgttgaggtggaccgtgtactgccggccgaaggatgctgcagtcacgtagttgtccttcaacttgacttctgattacgcagtaattttgttgccttcgacggcaaacataagcaaacatctgaacaaaaagtgtttgcaagtgggttagtagcacaatcagtgatggtcacttgcggagttcaccgacgtttgccttgtgcgtggcttcgctggaggatgtggctgcggagccagcgggcccgccacacgagacggactaagaaacagataacacaatagcagatttacttcctccaaattacattcatcagctgcgttagtgaaattgtaatcttacatgtggcaagatacacagtgttacgtcgagaaaacaagacaatgacaacggagtagtgttttgcaagcagggtgcccatggagacaagctggacacgcttccctgttacgaccccgtaagcgcgaatgacagaccagttacacacctttcagggaatttgatactccagtggtgaatgtttggaggtgcatgtgggcagaaaagaaagcgtctgatagaatattttcttgcacagcaaggagtttccttgggacctcccaaggctggccgctcgaaaagccgctggtcaaaaaactcgcatgcggaaataaacccttgcaagcccttttcgcgcacacccaagttgtattttggatctctatccgagttttggtggttggcagaagctagccttgcacacgtgctcacgggcactgatctatgatgagcaaatgctgtctgtggacggagcctgattatttgctttcatgtcttctgggtcgaggaggcagttgtgttgggcagttcgaagtcttcttgtctaacgggactttgatgctgctttaactgtttggaactcgagcacagatgacgtacaaacgccaatgaaggcagctgctccgtatgttttgcaccgtataaacggccgtggcttgcctgtcgtgtgttgttctctacgccaaatgtgaagagacgcgatctaaagtgcgcagccctcagaagatttctcgctcttgtctcttcgttgctgttgtaattttaggctgagagctatgttgcttattcgagcagcattcccctgcccagacgggcactggctacgaaccgtagttccagcggtacttcatcggcaccgtgcctcgtgatccgttctgagttagaggtaccgcctgtcattgtgagtagtctttcagcttgcacgacagtgcgctaacgtcccatgttttctgtcgagtattcgctcggcgtttccttgtgcccgctgtgctgtggccctcgacggtgttctactatttttggggggcgcgagtgtctttgaacaattgaatcgcgggtcctttgcccgctcttctttttgaccgttccagaacctccgagcgcaa

SEQ ID NO: 1814 - DNA, 2656 bp, Toxoplasma gondii
  source 1..2656: mol_type = genomic DNA
agagtcacttctttgctgtcgttgtggtagaacaggcgcagacgccgcgcttcgatgccaaggcggtctgccagtaatagcttcacgtatccaacctcggtactgctctttacctgtgaaaaaatcgctcatacataaacattgttcgacatggaggataaaaagtgcaaaaacactatacgacactgaaaaagctcgacattgtagcggcgcttgcggatatcaagcagatgcgcttccctgctttcacttttccctcccaaattcgcccacataacgtctgaatcgtagcaagtgtgtcaaaatgtggtgcgttttaaacgaaactgtcacgttgcacttcctgtacagtgagcagatgctgcatggtctaccttgtcagcaactttgtttgcgacctgcacctaattgtcatttaagaagtgtgttttgcctgcgttcagttggtcagcttggctcatcacaaataggctacctcaatttcaactggatttctgtcggcgagcgccacgatgagtcggagatcatctccttggagtgcagcatcctctttctcccgcagttcggcattctttggcggtaaggagaggccgctactgctgtctgtcgccattgtaaactctttatgtttactgatacgaaaattgccgtacggtcacaagaatggacagatcgtctacaatgaagcaagttatccagccgcaccgcagtggtgttacccgtacctcaccgacgcttagggacaaaaaaagcgtccgctgtaaggccctggtgtgactacgtgtgacactagaaatcttggcacagggcgctcatatgaaatctggtgtgagatcctcttcagcagaataaaccgggaatacgtccaaaacacttccccgtcaccggggccgaagctgagatttttgaaaaagaaaacctccttgcgaggtaggttcgagaactccactgtccaagacacgagtgaggtagtttctcggaagataaccagcaactgacacgagaaatcgcaagaaaaaaaggcaagacaggatttcgttgcgagggagagaccaaacccccaactgtgtcagcaacacgacacaagcgtggcggaaggctaaattaggaattgttcctaaacttcagtaaaccacaatttcacatccaggtacatgtttcgatccttttccaacggcaaattctaggaattttaactcgtcttttgagcatttcaaaacgaaggggatactgtggttccctgaatctcatgcactttcttcgcggcagcgtctgcgaaacggaataagccgtcccggaggtccccggaccgaattttcaagaggaaattggacctcgatttcgacagaaacacatcagtaaaagacttggtcctggagcggtgcgaagaggaaccacggatgatcccaggtttttaatctcacctccgcgacgaccgtacgcagaccctctggaactgtggacacggaactcgccgctgccccgtcggcgcaggcagcgggtaatcacaggagtgccgtagtgtgaaaaagaaaggcacccacggttcaggacacggaaggctccaactgagacgtcggctcgttctttaatgtgtttgaaagcataaagaagcctactatcgattatgaaagattatgttgtcaccggattgaaagtgtgtgtgggtttgtggctcatttctctgcgctcacgctgtacggcctgataccacgcatactgccacatctcgacgtggtgtgcggctagattgactatctgaggtagaaaagcgctcgtgacaaaggaaatgtagtaggcttgcttgcagaaatcaggttgaagactggggtgatggttggtgatactgcaaagaaacgatgaagcgagtcagattgtcttgacaagctgctgtgttgcattgtttttttcctctcgggcagcatgcttgtacaagttcaacggagatgctaggtcgtcaggaggagtgacctgctcccactggccacgcgaggacaccgggcgacggcgtggtgccggccatcctgttgcatgcgccgtccacgaagggggagctctcaagaatctcactcgttttcgtatcgaacttgtttccgtagaatcaccttccgatgtggtttattttttcagggtatacgattatctcttagtaactacggtgcagacagtaggtgtcactctgttagaagctggatgtcttcgttgtctccggccacgcgacatgtggtggaaacatcggcaacgtaactgaagcatacaccggcatgccaactcttgtgctcattgacctgtggtttacttttatcgaagaatgaagcagcggatgtgtttttccttctggttgaattgtctgtgataagaaccctccaagcggtggtccggtttttagcacgcgttggtttgtaccacgactgccgtggtttccctagtccaggtggtgggccactgacaatctcgtggcaaggcaggttgcccccgcgaagtcgacgactgtaagcattttcttcctcacactttcttcgcctctctccgccagcactggggaggtggtcgcgtgttcgccacaggtcacataggattggtgtcgacgatgcccatttgttcgcggccgagtagcgcccccgtaaacagtcgtcgaaactgtagcctcgcacaa

SEQ ID NO: 1815 - DNA, 4126 bp, Toxoplasma gondii
  source 1..4126: mol_type = genomic DNA
catgcgattaatggcgcactccagagatgctcgctcgacagtcttcaccgcgtcccgaatcttctcgtccccgtctgtggcgggtgtacgtacacccgagtcagaggttgcgcgtgcgtccgcagagagagaggaacgcgaggcggaagacgaaacctgagacgaggggagaccgcgactgaagttttctgaacagggctgcgaggcagctgtcgacttctggatgttctctctgcaggcgtcgctctgttctcccgaagtctcctcttcggtcgcgctcgaaagattcggcttcgatgaatctttatcttctcgcgactcggcgcctcgacgtccttcacaagctgcctcatcgcaggcaactgtctgttccgtctcacctctctcacttctttcttcctcttctctctctcttgttgccttttcttcttcgttgtcctcactccgttcttgcgtcttctgctgcttctcatcttctctacagtttacacagacttcaccttgtatgcttctctcagcgttctccgttgaggtctcttctccttcgacctcgtctgcgtcgtccctgccttccccaccccaagagccccccatgagagaaacggttccgcttttctcttcttctctgttcgcctctttttctttgttgttttcttcatcgtggcttccttcggcttgtctctgcctctcagtgctcttctcttcgagcttcacttcttccacccattcgtccctcccaccgtctccctcagcggtcggccgcaagcctcggcgcactcccttcttggattttcctgccatcgttgctctcgcggaaaactccccgactgtccctcgccctccacatgcagagggagtttttagaaaagtgaggacggccggaagaggcgagaagcgaggaagcagcgcctcgtggctcgtgctcgaactgtctgtacacctagaagtccgcagctctctattcgagagacacaggtgaacaagggagagagcgagagcgagagagcgagaacaaggagggcagaatggagaaaattacggaagagaccgagaaagtgaggggaaagacaggggaggaacgcctgcgcggcagagccgcgctccggtttgacgaggaagaggaaggtgagaagcgtctgtctgtgtctctgtagaaagagagactcggaggcagtacagaacgaggaaaacggtctttttctccgcagaagagcagcccgaagaacacgcagcaagaagcgaaggaaagcgggagaaaagcggacttccaaggtcggcaggaggggagagagaagcagcagggagagactggagaggccctgctcgagttcgagagaaggaagacacaaagagacaggacgaaaatgagaaaaaaagtgagaaacgcttggaaagattcaacgaccagctaagcctgagagccgcgaagaagtgagctacaagagcagagaaggtgagtctgaggctgccgcgtaaagacacccgaagtgccaagggcctttcaccgttaggaagaagagaaaagatgcagggaaaggagtgaaaaaaatggtcgtttttctagcaaaatggagaaaactccaccaggaaactccgctattttccagcaagaaacgagagggcctcgcttcgcgtctgtgaggtgtacggacgcccgagcgcgtgaaggagaagagcgaggcgggcagaggggggcgtggaagcagagcgttgaccgagctcgttttcttcaaatgaagagagacatcccggaagaaacggaggcgcagctttcccctgagtcaattttttcttgtctcttccgagatttgtcatgaaacgagaaaacaccctcagcgaagaggagagaaaaggaattctgctgcaagcggacggagggcgaacacgggaaatgagggaactggaaacttcgttggttgtcttctcgcttctcgtttgggagaggcttttttcagaacagccttcacattttcgagtgagagaagaagagagagagcagtggaagcgagcgggagagggagaaatcgaggaacggcggaccagggattccaaccactcgagatgcgcagcaggaggcctgaaattgatggagactactggaccggcacacattatacatgcatacagatcgacagagatgaagaatgaacaagtagttgacaggaacagagtatcatagtggcaggacgcgcgtctgtagagagaggtgatttgggcactgaagatcagtttctctgcgtgaaaaggcggcgtcaacgtccccccttggcctttttctttttgcggttctcctccaacagcagcccaactgttttctctgccttgcaggtcttgctcgcacgcgacgcctctctcttgcactcgcgttcgcctctccacagccatctctgcacagttgttcactccttttcttgagcgcagaaacacgcactggactgctagttcctcgacttttcctgttctccaaatcccagttccctcgcgctttgcgcggcctctgttcctgaacaggtggcgaactaccgagagttcgatctcagtatcgtccagccaaacagccaggcgagcccaacagggaagtcgagtgactgaagagagagagaccggcgtagacgcttcctctttttttcagtgcttcgcttcccggtttcgcagcgacaacacaacagctggcttctcaactgggcactgcagtttctctctctttttccaccgccgtcgcgcttctcgcactgagatgtcgcagctgcggatacgacatctctggaagacagaggtcgacggcgacgcctcaatcagagggcgccttcagatttatgctttcatgttcttgccgaagacggctgtcttttctgtgcgggtgagacaatgccccagcgaaaaaagaagtcgaggcactctgcttcttactccgacaagacgtgaagacagtgtctgttgcgcgccccggccccgcgacattcgactgggagaaaacatgcttcctctcctccacatggcaatcaagtgtcaacactgagagaaatacgtttcgtcgacgacgcctcgaagacgacgcgctgcgtgacgctctcccaggtcctcactggacggtttgaacagagagttagtgcagtctctgggagcgagttcctctcgcgagtcccttcgttcagggaagaacctgaacttgcttctctcgctgccttcatgctcaaaaggtagggcgcgcatggttccttctttcctggtgtggagcgagctaaccatgtgcagacactcgtttcggcataaagtgaagagttttggacaacggagaaagccagtcgaaagtggtttgtgagaagcgcgtgaagggacgatgcagatgtacaatggactatcttaaagagagtcttcctacggaaacagctgctgctgctacgtctactgcctgtataatacagctcggtccgggtgtacttcgactgcttcagcacagaagcgcgattttactcgctgctccgcggatacttccatctcggcaaagcggatctcagaccgatgaagatgtttccatgtcgatcattcgtgtagaggtgtatctgtttccttttttcctcggtgtcgaaaacagagtgtgcgacaccgctccatatatgctgcctgtgcatgcgtttcttcccagagacagtggcaacttcactgtttttctctggcttctccagcttttttcgccgggtttcccagacgatttcccctcgacgtttcagcgaaaacgcgtcgagaaaaatccgagaagtctctctttcccgtttcagaaaagttcctcaccgggcgccgtcccaagcttcttggctgtctcgtaggccagcgcgtttcggagtttgtgacgaccagttttctggactttttctcctcgaaaaggacagagacgccccgctcttctgcgtcgcctcctcccgtgggctcgtgtttctccctttctcgctgcaccgggtgtcttcgcgcctctcttttttgcggagacatgccgcagactgcgacagctgctctgcagcaaacatggtcgtcccggcttttgcttgtatgtctcctctctggcttttctccctcaaaagaaaatgaagtgagagcgatttgacgatgtgcctctcttgcggaatca

SEQ ID NO: 1816 - DNA, 1433 bp, Toxoplasma gondii
  source 1..1433: mol_type = genomic DNA
agtttctttcttgttgctgccgctcacagttgcagtcattaccaacagtgggacagcgcgaacttgaaatcagtacggcactattaaggtatacgacagtggctcatctcccggggatcataggaagcgtacgccctcgtttttgacttctttctcgcaggtgatccttcactttcttctgacgctcgcagcatccctccatcacactcgcagaaaaacagcgtgctggagtcgtgaaaactgtttcgacttttttcgtcagaagatacttcatccggaatctctgcaaaactcatcttctctgtcacgacacagttgggtgtgcgcgagcctcaattttgcgttttgtgagggaactcctcgagaattcaatattcccagacacgacatgcgaggcagagaacctcagaaaaaaggtaagagattcggctagaaatttcgtctcgtgagacgagaaacagataacgtcagttctgctttgacaagacacagagagaagcccacttggtcgtcagaaaaacgcaaacctctttttctaccttcctacatcccttcctctctatctctctctccttccttctttgtacttcgctctatctttcttcttgtctcttccgacgcctttccacctcgattcctcttcatctgtttctcggtcagttcagctctgtaaatttctctcctctgtccaggaaacacaagaagagacttgcaagagagtccgagtgcttccctcgcgtctccatgagccagagaaggcgcgtttctccaccctcttcgagatggccttgcgccttgttgtatggatgaaaatttcccctccttttccttcaaaagggaactaccgtttattgcaagacacacgccaagggtgttttacctcataccttttttttcgttctttgattttaagctaccgagggggagacagggaatcgaaggcggaagggtgagagaactgctgcagaggaacaagtggaagaataagaaaagaggaaagggaagaaaacggaaaggaaaaagtgaaaatgcgaaagaaaaggaatgttgaaggcgtgagggggtggtgtgtctttcgcgatataaagtattgcatgcatgcggaagcgatgaacaagcgtgcattgtttctctcatgctcgtctggagcatctgaacctgagtcctttgcttcgccttccctcgtcctttcttcttgcttctcgcctcatttccttttctttctgtgcctgcactttcttcaccctcctgaccgcgcggcggagaccttccggagcgtctctctcccttctcccctgattcgtttttcacaacgctaaactaaggatctttcttacgcttcttctggatttgcctcgcttctcagatgcttcgcttttctctgacaagcacacgccgcttcgacggctctccctctctatttctctgaagaa

SEQ ID NO: 1817 - DNA, 2690 bp, Toxoplasma gondii
  source 1..2690: mol_type = genomic DNA
ttattttccgttgtttggtgggtgacagaggaattactctcttggctgtttaagcgctgcacgggagcaacgtgtgggtgtgttgattcgcatgcatgcagttgggccttctggccccccagtggcaatgcaacctcgaacgggctgtcgggaatttgccacgagaggtggaatgtcagggactggtaggaagtcagtgaaagggtgaagggtttgtgtgtgcggttcacgaagcaagactgggacgcgtacggggtattgtggacacttcagtcctatttgagcagcttcccagttttttggtatgaaccaaaaagtatacagttttaaaaaaagacaaaggaatctatctgccatcactgatagcgcaggttcattgtatgtgttgtgtcaggagtggagctgcgttatgtgaaatgctgtctcgtagaacccgaagacgcatgtagcccagttgcgcgttgttctcatctagctcaagactttcttgtcgaatgcacactttggagatgcggcggagctggttcatcgcagatggtgcacgtacttccactgaaaatgaaggcctttgttccctaaaggcaatcgctcgtcgagcaattcagttacgccccagaacgtattgtcatttgcggtctaatcgcacgagtatcgtagtaacacgccggggggtgaactacgggaggtagccgcacgccacccagcagcttttcgtggcagaataagagtcagagtttgagatgataacgctaaaggtcatcatagttgagatggaattcgagaaaagaaattcagttctctcggaaggccacctcattccgaagagcgacgcaacaacagcgagtatagtgcgtcatttgattctgtgatctgcctcgtctactgttacgatgttgcttccagcgttttgggtgaggccacagaccccttgtataaaaaagaaaaccgaccacactgggtgactctcgcaccgtgaaacggcccacattgggaccacaactctggggcttttaactgcaaacagatgacaagaatatggcactcaggggtgtaacgtctcgacaaattgcagatgctatgcgtgtgcaaagaggatcggtagacgctgtggaccgagcgtgaaaactgatggagaaacttcgaaagctcgagggtgatcaaaactgaaagcaacaggacgacggacccgttccttcggaaggactgcgatgtagcgtgtggtacgccttctttggtaattcggtttgccagacacacattttcttattatcgatggaaataggctcgagcctccggggtctgctggtgtgcagtcacatttatcacatctgcagtgtggtccaggtgacacaatgtgcttcaaaatcggacagttgtccaccaggtgactacagaggcgaagaaagtttgttgttccccttgactagatcgacacacatctgtttcttgcagaaataatgtgggaaaacacttggcaagaattcaaagcgtacgactgtctcgagagtgtgcactgtcgttcgctgtagcagttctctttgttgtcacgcctttagcctgctgaacaacctgagctaggtcgattgtgtactcatttcttttttctgtatattcgaatgtccttcggtttggtacggttgtgcggtctacctgatggaccaaccatcccacaggcgtacacccgtatttcacattgcacactgaaagagctgatattcgacatggtattccagcttaaagccttgaaacaattgagcttccgttaacagcgggttatttcgccctacatgtgatatgatggcgcctcatcgggatttcgtttactgctgaggggggagactgagagtgtggctattgagggtacagcatggagccgagacggcgttacacaatctagtgtgcatggaatgacgctgcacaaaaatatctgtttgaaatgcacatggtataggattcgaccatgcaaatcatcctcacccgtttgtgtggagagaaactgaaaacggttttattgtccagatgtgcgaggagtccgttgacctcaacagcctttgcttgtgcacgcgctggcttgatgtaagtggtcgggcagcccctatgcaaaagaagagctaccccacggtgcttaccaggagtttcacggtcgaggacttttcttactattgcttagccactccatccacgaaaactttttctccacggctatgacaggcaaaaaattcattgtcaacgtttttcacaagccgttcctttgaaactccatatttttgcatcgttgtggtccagtctcgtttgccgctgcatcgggctgcaacggtgcttcctgatgaaacgttgctcactcacagtgcaaaacccatgtcctaccatcgaagatattttctttttgaaaacccgcctacatttgcttcaaggctttctccagactcagttaatggtatttcactcacctgcaatacgtcaaaagattccctctctggagagtgctttcgcagcgccgcataaaacgtgttgcgtgagactgggctagcgaaggcatgcgccaagccgcagcgaggcagtgtaggatattcccgcacatacggttctcgtactttttaagttacgttcaggttttcctttcgcttggcagccatttcggtcgctgctgttgaaaagctcaacaccattcacccaaaagttgttcaaga

SEQ ID NO: 1818 - DNA, 1793 bp, Toxoplasma gondii
  source 1..1793: mol_type = genomic DNA
tcctcaacagcgctgagtatttccttcgccattgagtcgaaggaacaccctgctggacagcgcagggctctcctgcgttctcctgggagtctcttttttctttttttcgcgcgtttctgcacgatcttcctcgccctgggacgacctcccacaactcgagcggcaaacagaaagggagggaggcgtcgaacatataaacatggcggcgagaagatgagaagagagggagactgaaggaaagtgtagattaatggaacaactgtcgcattctgcagtgaggtgttgcgtacagtcttacaaggccgaggagcggcgacggttgaaggcattagctgaaagaagagtccttttctgcgccgaagagggtaaagaagaaagttgccaggggagaaagagggaaaaagagagagaagaagagagagaagaagagagagaagaagagagagaagaagagagagaagaagaggagcgacaggcgagaaaggagaggaacgcttcgaggacacaagggaaagcagttgaggaggaggaaaacgagggaggaatgcactcttccggaaaaagtcgaaaagtcagttgagaaagagagtcaagactcgcagggaaagccgggacggttgcgagcaacagaaaaaacgaagtcgcacaaccgaaacagtacataaacctgtcgaactcgttgccgatgaataataccttgaacgcgttttcaagtatgttctcgcttccttgccatgtaaaccactacacagagagagctacaattagtcgtaaatgaggaagtatttgcatgagtgcaagtctgggcatgtatctgaaccagcacacatgcaaaggcgttacaggaaggcgaatttccgatctgttctctgacagatggactgacgcggcccctccacctcgaaatgcgtcgcgtttgccctttatccgggagcgacgattaggcgattaggcaaccagaaagcggcaggtttccttcgctttcctcaacgacgcagagagagctgccctcctcctagtgtcttgccgcgccgaccaatgtgaccttcactgcatgcatgggtttgcgaacggctctgccgcgggaaaatgtcgaaacctggaactcggaaactgctgcaggtttacctgcgcgaaaggccattgaaaagcggaggagagagaaggccagagatcgggacattggacccgctgcgaggtcttcagtaagactttctctcgcaggaaaagctagcgtctttgcgctagcccacggccgcgtgtcgatgaaaatcgctcgagagccagctctcagggtgccggagaaagcggctgatttgagtcgtgtggcacggtttttcgcgggcataagcaacccttcgccgattgagtcttttaaaacgcattgattttcaaatcggacggatctgccgagtattttgaagactgtttcgtgatcgaattccttcgtttcgccgcatgcaggcgatccaacgtcgaggtgaggacacttataccgcaaccctaagaagagggtgaattgcagctcaaggcgaaccagcgcgaagaagaaaaagagaaaactcgaggctttgttatcttgactttcacgaagcccctccggagcgcattgttgaaagcactcggcgccgaaatcctgcagtttcggtggtcggccgctcttgcacgggtgaccagtgggaagccagatcttccggttcctctctgttaacgcgatcgttcaacttgcgactctccggcgagattcatgattcgatttgtgccacggcaactcttctcgctgcagcgcacca

SEQ ID NO: 1819 - DNA, 2682 bp, Toxoplasma gondii
  source 1..2682: mol_type = genomic DNA
tatttaacacaggagtggaaggtgttattgtgcggtgaatcgtggtccatgtgcaagacctgcatcatgcgtttttgggtgacgaaccctccgatatagctccttcggctgatgtgaactagaaggataagatgggtgagaaacgatgagaaaactgttttgttgatattgctgcgtcagtcgtgttacgagaattcaggcaagactgagaagcacatgattggcttgtccatcgcataccattatagatttatggtgtcagcggctttcgtgtagacttattgagtgtttttgacgcgagcatattcgcgggactatcgaatacgcttagagggcgcgagccggggcggctaacgtgatcagcatccttttttcggagtacggaaatcgaaaccagatggtaacactgtgaagggccatgaaaatttccgaaagcctaggttcatcagagttcatagatatgctcgcacttacttcccagtcaaagaatgttcagaaaggcaccgcttcaatcttctttgcattctcaggattagacagtcgcactgcagtactgtcaccgctccagaaatacgcgtcttctcaaatcagaaagtcgaagtgctacacgtgtctcacgcagggtgaaggagcatgccattaccgatgtagtatcatctgatcgtatgctggggtgccgccagtaaacgtcgggagcgggcagccatccttcacaggatccccagaaaagatgtggacgtttgtgttgcgcgaacctgtgaagtccagctgattaggatttgagaactgagtgaacgattgaagtgcggtgaaacggccacgccacgctggtgaaccggatgtgttatatgcctgttgccgtggtgtcagtcaaattcttaaaaagagaactatcattgcctcccgatgcctcagatatttctgcttacacgatttttagtcgaagttttctagcttgctgtagcccggctctcgaaggactgaattgttttaagagagaagccgaaaatggttgcctcatttttgcaccagtttttatgtttttacgtgtttgccaattagtctaatctgttttgtttcctgcattcaggtgtgcggatatcatatgtgtgtgtgtttcgaggcttgtgtgtcacggtcgctaatttttctgaagcaattcaggaagccctagcccttccttcagatccaaggacactctaggaccccttcatacagtgggaacccttgactatgcaggttctgagcactcgctgtgacactcactcacattcatgaggggaataagaataatctcgtcaatgtataggcttgcaaatgaaaagccagtatttctagacgcagaagtcatcgtttaaatgacactacaatctggtaaatattttaccctcgctcgtggccatggacagcccactcagcaaaacggatcaaggaaactgtagcatgggggacgtctccagagtccactcatggagcaagaagtcatacctgggtctgggttctttgacaacacacccgatgcagtgtgtgcgaacaaggagtgagtgacatttcctttgtggctgctcttcagcacgcgacggcgcactccgacctcaaccggcgacacgatgggattgtgtccacaatgtgcgtctgtctccccttcgcatgcgtggaaaagtgatgctggcgcgcgaaggatcaactataaaggggaaacgtgtgcttctgcgaagtgattctccccacttggcagaatcgcttgcgtcgaatcaacttcgcccgcgctcccctgtgcggcggacgatggtggatgcctgtctgaagacgtggtagtgtcttggcgtggtgccatttcagcgctatgccaatccactaggagacgagaatgcaacctcgaacctgaaatttgaagatacttttacaaatctgccgttaccaatacctatgtgcagatattccgacggttgttcgccacttcggtcgtcgatattgcattgtttgttgttctctcttgtgccacagtctatggactactcagctgcagcgctcccccagctagctgaaacaccgagtgactactttgacttcggacgaggaaactccgttcaagtggccacctttgtgaaagagtccttgtcgtgcaggatgaaaggaagccgtatgcagcgggcggacttgtttgctatttctactccatagtgtcgcagaaatcagccttccgttgtgggcacggtctctgggtttacgtatttcgttgcgccttccttggccccaaccacgccgtccactcgggcgttgcccgtttccttcgtccgtcccagcggtgtctgtagggccaacgttttttccatggcacaaatcaacaaggtgccagtacaagtggtctgaaaagaaagtggcctcccttttctgttggcgtaggggagaatagtttctgcaattaagctctccggcggcagaccacatgcgagggtcgacacggtgcctctcctcgtgttcctgccacgtgagttcaattttcacaggtggcctcgaacctgtgcattttgtgtttgttcagtcacgattccacttcaatttgcgagaaaggccttaaaccccctcagccagtattggctttcttccgttaacggcacacgtgagcaatgggcgcgtattcatgttttccattctccagtccgtgactttgaagaccca

SEQ ID NO: 1820 - DNA, 3242 bp, Toxoplasma gondii
  source 1..3242: mol_type = genomic DNA
tctctccgtgacaacggatttgcaacgcgtttttcgtgcactggaaggtgacagcggtcaaaatgaggaaagtggggttttggggtttcccagtagtgatgcagtgctcgtcccgcccttgcgtcatttgcttcttcgtatttgtctgtgagaccgacggaaatcttattttcaagtgagtgggtgagacttcattcggacatttctatgttagcgcatcaaccccagcagttgatgtgattaacagtgaagtttttcacgtgttcgtgtgtttccgattatccgagttggctttgtccacgcgtttgcgcataagagctgtcaagatgacataaattggacgcgtatcaaggtaacagagatactcagccgcatgtttctgtagggcctgtcccgaggaaagatcctcatttcctgtctggttaccggagatgcgggtgccacggtgaacaccccacgcacactcatcttttcaactttactgtcgtcttggtgcaaagccctttcggattccttgtgttcgttgcgacgcatttggggggcgtgagcaggcctcccccaccgcataatatgatagcaactaccaatcaggtacgatataaatagatagctatgatgttaaggagcataggaaatgctgcacacctcagttcattgtctggagacagagagcagcagcgactgttgaacggaggtatgatgcacattactactcatcaagacctctgtggatgtcagcagcggcatcttctcagagcggcgaattcaccgttgttgcttcttgtcttgcgaacactctctgcttcgaatgatgaaacccagagaacgtgcggccacggccggcgctaaggagtatgtatcagcggctttgggaaatgtatactacgagttgaattcgtacttcagattgcggatgcctttgtttaccgggtccagatctcctgcgtaagcagaccggcactgacacgaccggaggaacagccccagcatttaaagcaaaccacccgtcgagagatggtctttctgtttgtgtcggctctccgtgaaacgggcgttcaaagaggggctgttcagttcgttgaaaaatgcgtcatttgaagagaatttctccagctaagccgaacgtctgttaccccttcctgtcggcaaagcattccacatttgtatctgagactagagtagccttgcacatgcagtggccattttagtgaacgtcgataggcttcgaagggggtgtcaagatgtcctgccttcaaccttccttcccttgaaccagtgaagccatgcatcaaattactttcgtgttcatctgagaaatacgcggcggctttgttggtggagagttccgtctataacagaggctttgtctggagtgctcggcatggacacatggacagctgcgcatcatcatccgactacgactggtgccattgttatacaacacaaaagagacgcactacgtccccttattaatgtcatctcttgcacgtgacgggcatcagcgaaaatctggatcttgtctgctggtggatatcacaccagcagacaaacgtgaaaacaagcccccgttcgcaaaattgtatctgtgttttcaagacctgtctggctgtccttgatgacctttgatctcgccgtatcgtcaatgtatgctgttcgtcgaggtggaggttcatgggagtttcacacgctttcaacttagtcccgcggcatgagctcttcacgtgcacgaggacttgtccaagtctgccactgcatcccggaaagacttccgacaaagcggttcctgtgcatcgttgtcgtgggagaagtgcggaaatgtctctcagcattcgcactgaaacgggtgttgactttgtccgtttaagttgaggaaatccctggaagggacaagcaaacgtagtcacccgttgcgggacgtaactccgcggaaaagagaaacgcgtttgatttttcggaagtgtcacctttccccaatggggatttggagaggtgctttgcccgagtctcagtgcatcaggtggaggagcaaacaccagcgataactggggggttctctctgcaacttttgaagctgcgaaccgcaattcctgcgcatgtgtcacgctgtcacacgtataacactttccaccacccacgtctgtgaagacatgcccggactgcgttttcttgatttccagcttcctttcccttctcaacccagttgtgactcgccatttcgctgtcctttctccccctctcgtggtacctttcttgcgtttctactcgccagcaccatcgcgacaccgtgcctgcgcggagccagccgtgtgttccacatcgtgagaagacacgtggcggggacccccccttttcgttttggtggggtgtacctccctagttttggactcgtttcggacattgcccttgcgtttttcccacctttgccttgaaatactacaccgtggacttcactgccgcgttcctttccttatccagtgtttaggttccccttcagttcactggagggtggaagaagtgtcgcgggcgaggtcgtcgaccacgcggcgacctcggagaagggaatccgagacactttctctttcaggtgtttgcggaacgcacgcaactgccgtctcttttttctcgcggctaagtgcatttgttcgttccctgactcgttgggggatcgtcaggctgcggctagcgccctcggtttgtctgcctcgtgagaacgaatcgggaaagcagcgggactgatgatcccaagaccgtcgtcctgtggaatcagggtgttttagggcggtcgcggtgccttggacgtttcgtattgcgaggaagccagactgacctgcagttcgcttttgcctcttcagccgcctcgcacacactgaggtggacagaccttcgagcacacagttggcatctaccttcaggttttctgtcggattccgcatctcttcatccgcaaaagaaacgcgtcggctctctctcttttccatttgtcctccactgcacatctcggattctccctccctgtccgaccacctctctccagtgtgtccggttgtggtgaccccgactgcgtttttcccttgcgcgttccccttgttcctctctgtctcccatctttctgctcagaccgtcgactcgccgcctctcgaagccgtcgacgttccccactgtttgtctgcgcagccgcgtaccccagcgcgaagcctttctctcgaggtctcgctctcgatcctctccgcgatttggcctca

SEQ ID NO: 1821 - DNA, 1574 bp, Toxoplasma gondii
  source 1..1574: mol_type = genomic DNA
gcattccaagaattgatggacatccatgcatggcagtatctatgcctatatgtccaaatatgacatatatatacatatatatatatatatatatttatatgtatgcaggcaattgggctttagtgtgcgagccgtatgtgtgtggagggccgttggttgcatgcaagtatgtcaagctttctgtgtctcgatgtcgagaggtaatgcggagcttttgtttgggatggagacaaagcattcagttcgctttacaggattcgtgtttcgcgcttgcagagaaatcagacacaggccgtaaaagcagaaacagtctccggtctgctgttttttcgtcgaatctcaggggtcctggggagtccagacgttcgaagagtcattgagaaaggacttttcagagacagaaactcgggagcttcccgcgatggccagggtgggaagaaaggagactgcagtctgcagaagcgagcaagcgcgtccgctcatacgcgtgtgtgtctttcgtgaaggagaaaacatcttgccagacaggagcgaaacgaacgagctgtgcgaccagcgaccaagggggagaagaggctcttcacgaagacctctaaaaaaggtttctcgctgattgtcgaggaaactacggcatctccagttacatctatttgagtgtaaatgtccgacactatctcgtagatctttgtgggctgcgagagagatgagccggtgaaaaaaagaaaagttacggagtgccttttcttcctctgctccttcgacacagccttgaaagaagcgccaaggtggcagagacgtcgagaagtaacgagagcgaatttcgttagaaactccgaagcagaaagacagcagaaatcgaggtttagggtggaggtgcctccccccccccccccggcggcagcccaccgctctctcgcagaaacgtttcttcctttgttttctcccttttccttcctacctgcctcgtcgtttctctcctttttgcctcgattgtgctttgggattctgcttcctgtctcttttgttgtcttctttccgctcgagtgactcgtgaagactcaaacatgtcgatggtgccgacgagcgaccttgtctgcatgtgctcctgtgcatgcatgcgcgctctgcagtgtgaggaaacgtttgcggcttttcccttttgacaggacgaagttgtttctccccttttttgtccaccgttttctcttctcttcagctcgcgtctcccttattccctcttcttcgaaaccaccatttcgtcttttctcttcctccgtgcgcctctctctccccgctctctcgctctgtccgtcttctctccagatccttttcggccgcttgcttctcctctcccgccctcgtttctctcttcttttttcctctctccgtgttttgcctctccttctctgccaggtttttcgtctcactcgcagcggctccctgccttcttttcgagattccccttggctcacgcgctcatctttgtgtccgcgcatctcgtcttcgttccttcttctctcgtcgtttgcctctctctctctcccttttaaagtatataaatatatacatatata

SEQ ID NO: 1822 - DNA, 1837 bp, Toxoplasma gondii
  source 1..1837: mol_type = genomic DNA
gaacctgtacgtccgccgtttcctttcaacggaaggaaagtgaatgcgcacaagttcccctcctcctccttagtctttcgctatgttggatcttttaaaacgtttcttttttctctttcccccctaaacgttccgttccccacctcgcaggaagagcggcactgctccaggttctcgagggtgacgccagcgtcacccggggcagtcgcttctccgagacatgcgaagaaggcagttgctcgctcctcgcatcctggacagaagatgttgccgaaagaggcggagaaagacagaagaagacgcaggtctctcagtgcctcttggagcaggagactaggagagccgtccagcaccgcgcgagagagaaggcgcgcggcaggagagtaagaagaagacagacgaagaaaaacaaaggaacgcacggaggaggcgagaggcggaagccggtgtgcaaaacatgagagaggaagaccaaagttggcgaagacacaggaaggaagaacaaaagaacagcgagagagccagttccagagagggaggcgggagaaaaagagacacaagaaaaagagaaggatggacagtagaaggacaacgcagaatcggagagcaaagaagaaagaagtggagagaaacaagtggagagaaacaagtggagagaaacaagtggagaaacaaatgacgaacggaacgtacctttccggaccaaggggaagaaaggagggaagacgaagctcgaagaactcgatgctgaggtgacagaagtcgtcattgcttcctttcttttctctggatcctattctgttccttctccttcgtcttcctctcctcctagctgcttactctgtcttcttcctctctttcttcctctctttcttcctctctttcttcctctctgcagctcgcttctcgcttttcgctttctccactctgttgtctgttctttggagggcaggtcaggaggcgcatggccctcgtctggcctggaggaaaacgagagagaagaagacaaattgcgaaggagaggcggaaagacggagaaaaagcaaggcatgaaggagaaacgattagcagacgcgccccttgaggaaagacatgcgaacacctgcaggtgaggcacagagtggaatcgaaggaaacttgaaaatcggtattcgtgtgctcgtgatggaggcctgaaatccgtttgcgtttggaggaaaaatctggagaaggaatagggatttccttctcgtttaaaaggagagaaaagcggcgccttcgcttctctgcacacggttcgcgcgcttgcatgcgtccggggtctgctggctataaaaacatgcacaagctgacttgttggagcttcgaacgaaacgagggaatttgctctcatgtttctggaaatcgaggaaagttttgtggtcttcgtcactgagaaaacatcccgatttctcgcgctttgacttccctctgtgtgccgagttctccgtccttctgtccattgcccctggtccatgcattctctgccgtgacgcgcgcctttccttctgccgttctcgatcttccttctgcacacaaaggagtgaagaacgcaaagactcagaaaaagagaaagactcaaggacggagacaacagaggcgttcgcgaacagtaagaagtcacgagcttcccggtctgcttcgtcctcgtttctcaggtgccttcagtcttcccctgtctgctttcttctctctgtctctgttgcttcctccacatttctttttctccttcactcgcctgtccctttcttgtccctttcttgtcccctccctgtccctttcttgtccctttcttgtcccctccctgtccggaccaaga

SEQ ID NO: 1823 - DNA, 2386 bp, Toxoplasma gondii
  source 1..2386: mol_type = genomic DNA
gttccttcctcagctgctccttctgaagcagccagagctgctgatcgcgctcggagacgccctccgccgttgacacacccgacggcgcgtatacttcgacgtcgtgctcgagggcagtgaggcgcgcaggcggaaggtcgccttcgctctccagtacttcgcgcttcgggagaacaggcaagtcgacgtcgagaaagttcgtttttcgcaagcagtcgtccacgaactcgtccatgcaaacgatcgtgaacttcccgtcggccaggcgcagccgcagtttccggtagtccgcgagcagcggctcgaggtgcgtgtacacctcgcaggcgcggccgacgaggcgcaggtagaaggcgccgacggcgcgcagatacttgaactgctcctgcttgatgaactcgagaatgatctccggctctggctgaatctgcagcagcttcaacaccaagcagagaaacggcgcaggctgccgcttcccgccgtacgttcccccaacgtacgtcaacccaacacagggctcgagaacggtctctgctgtcaacgcgaagcactgttccttccagaaggcactttcgtagatctttcggcgaatgatccgcgacaccagcgtctgcggattgcagccgtggacctgctgcgcgagtggatctgtgcgattcgccatgctcggacactggcgaagaaaaacggggcagaagaagaagcaacgcgaaggagcggagtcttggtacgagcgcgaggaagtggagagcagagacaccaagagggagagacggggaggagagggagaggagcagaagaagaagaagccaagaagcacagtttactttgacggaggagcgaggaagcgacggaaatcgagagcggtggaggaggagaggaagacagggggaacggaagacgagcgtccaggaaacaaaaaaaggaagaaagggaacacagagctctcttaaacagttccaggcagcgaaggaaaagacgacgacaaagagaaaaagaaaaagctaagagtttacattcacgaggcccggtcaaggacgacaacgaagacagggacggcgcgagaaggcgacgcaccgggagggagaggggaggaaacgcgaaacgagaaggaagatgccaacgtggagagtggagagatgcagaacagaagaggtcgtcaggaagagaaaacggcgagaagagaggagcctcaagagggtggggagaacggggagaagaagcatgcgtagtcgttcgtttcttctccccggaaaaagggagaaaaggagggaacgttatccattcacaacggaggaattcgcaccgctgaaatgtttcctccttctccccacctcgcagaaggaccccaagtcggcttgaaacgcgacatgagttttctaccgcaaaaaaggaattttcacagcgcaccccagggaagaaaacgaactcggaaaacaagtacttcaccgacgctctttcctcgcgaaatcgggcagcgagacaaggaagaacgcatgcagtttttacgcctcgactcgagccgctctcgctagacgcggcgcagccagcgagaagagcgacaagacagccggcggacttggcttcgagaagggaggaaagagaggaaaacgaccttcctttccccgaaaaaagacgcacagggcatctctgctcaaacgcctagagacgccgcgcctgctctctctctttccttgcccgccttgaaaaagaatccgaggcagaagctgccgacactacactgcaggaccggcctcctctcttgtaccgcgagaaggacttgggatttccccggtggttgtacacccgactttcgcacactgagacacagggcgcgtctcccgcgttgcctttttcgctcttcactcgtcaacaaggccaggctgcgccgctccggtctcttcttgcccgcgctctcccgccgaagccgcgagactgctgctctctcagagagaagagcggagagcaggaagaagctctactcagcgaggcagaggcgagatggcgacgccggcagcgaggagaagagcgaggacagcagaagcctcgcaggaatggtgaagagaatcaacagataaagcgcgaagacgagaatcgagagaagagtaggagggcggaggacaaacggcaagagaaaggaacagagcgtatgaaaatacgcaaaacaatacgcgtcgaagcgccggaaatctcgaagaaggactccagagttgaaagactctgcttttcctccggaggaccttttgctgtttttcactccaaaacgtcaccctgttcttctccgctcgaaataatgtctcctctccatctcagtcgtttcttcgcaagaaaaaacgaccttcccagttccaccacgaaagagatttcttcttctccttcgccgcca

SEQ ID NO: 1824 - DNA, 3271 bp, Toxoplasma gondii
  source 1..3271: mol_type = genomic DNA
tcatgcagcactctcgagtgttctggtcttctacagccgaccgcgtctatttcctcttgagtccgtaaaccacgcaaatctcaattcccttccctgctcggtttgtcctcagagagcagagcctcgccacttgattgcatgctgcttcgcagcggctgcgtcattcgccggaactccacactggcacgcggcgttgcttttccacgcgttccacgttcccgtcgcaggacgcgctctcgccgcgggtgtatgtacaccggagagaggacatggagcggccgcaggcgaaaaaatggagcagctccgagatgcgtccgcagtttgtgcgtccgccgacggcgaaacttcaaccatcacgtggccagcaaaattcatgcaaccttccctgttcagccttctcacttgtcactcagaaacgcaggctcgtaactccaccggagcgggcgtttcgttccattcctttacgactcctgcgagcgagacgcagttgcctcgccgtttgaaggcgcctgacaacgtgcagtgggcgactgccgtcttccgcggccagactcaatccacagaggcgggcgatgccgcatgctgccttagttctgcctccagcaacgtggcggcggacgaaaagagacagaaacaaggagagagtccgatatcggagggtcgagaactgcagcgtgggagccgtggacaccctgtgttagctgcggacagatcagcgtgttttcaaacagggtttagcaccacagaaacgataaatgtgacgacgacagttcaggcactgagtgcatgtggtgtgacagtacagacggtctctcagcttcaggctgtgcttctgcacttggcttttgagttgggtgatatcggaggactctcagctctccacctccgtgtcctgcgcgcgtcaatctccattttggattactttcttcacacttcgctcccttacgaccagatgagggacgaacctctggatgacgggaggaaaccgtccaagtcccttctcgagtgtcccgacacaaaatccgatttgccgacgttcgtgggagaacacttgagttcgttatcaccttcgtacgatagggaagtctgtggaaagcatgtttcttcctttgattcatgtgaaacggacgggggtagtcagcctcacccggcaatgcagcaggcatgtccccgttctcccattaaatctcaagggaacgtgtgtaaagcaaagttgagaggccgcggcaatgacggcaatgccataggggaggtcagtccccactaccctgatttacagagtttgtccaagagggtgaagtcgtctcgtttacactgtgaggttctagacacagtgcgtagcgtggtacgagtggaacgaaaatgtgagagtcacggaaacacgctgaaacaccctatgcagaaagtcggtccgtgtctgatggtgtccgaggcactgattccgccgtatgtagtcgacatagcggtcctccctgtgaaccgttatcgagggagctgtaattgggtgtgacaaatggagaactgcgggggctgaggaagtcggcgtactttcatggttttctcgaaaaaagagtgttttgcttttgcgtatctgttccggtatttgcgcctctcgtttctcgttttttctacaccacaggcgtagctgctcactttttagcccgtttcgggtccgaaagaaacgatgtgtcagcgtggtcgactcttggcaagaaagtcacgcgtttgtcgtctttttccgcctcacgccggtcgaaggatttcagtcgaatttatgtgccctttctagatcacagaactgaacgattcgatagttctctcgggaaacatgtctcagtcaagcctatatgggtacgagatacactttgcgcgaaagtgccgggtctctgcttccgattcctgtagtggaacgtggccgttctctatcatcctacacgcggtggtttaggaacaacacaaaactgcgtctttgtggcagaaacgcgctactgggcagcagctgcccgcacatacgccgcagagaccgcagtcatctccgacccacaagaggctggaccgtaagagtcagacacttgcccttcctaattctgttcaggagatagtttttttttccgataacaagacccttcgacactctcttgctgttctagatggcaggaaacgtgggcgttacttccggctgtactcgttgtggcagtagattacggcatgtacgattcaagggtgtgagtgttgtgattttacgacgtggagaaagtcctctgttcgcaaggagctcacgcgttcttcaccgaagtacggaattttcaaaagacgcgttctaacctgctgcagacacgtcaggcaacctccggtgagacggtgagggtctctcgctgtcggtcatcgctatgctgttcacagcactgcgagcctctgcatgcgcttgcagtcaccagagagaacatcctcgaggcgaaaaagctctgagaataaacacaccttcgcaagtctccgcggaaacatgcgtccccttactcgtgaccgttcagcagtcagcacaccttgtcttgtgctctgctcgccagcgagataggacactcacagtggaggcggcgtcggcgcagaaaatgggtctgtacactgctggatgtttctcagtttctagccgatctggctgccacattgttttcctgtccggcaggttcctccaattgattgttttggaggaaacgcacaaactatgcgcccgaggaacaagagcagcggcgtggccagagtggacctccagtgaggggcgatgccttgccttgagcgagacagcgcgttgacgcgacaagcgtgcaagcgcttttcttcgttgttttgaccaggcactcgtttctctgtcgcatctttgacattctctctctcacgtagcattccttccatgaaaactgagactagtgggcgtacccgcgagctgcgttctctaacatgtcgcccctccacagcaccgcaggtgacgtcgtttcctgatctcgaactcaggcattcggaattctttaggaaaagccgcgtctcaggacctgcagacgccatttgtatcgcctttttggggctatctgccccggttttggccgtgttatctcgccgtgtctgcgagactcgcgtggtgtggggacgcgcagcaaacggcgcgtttcctgcgccgcggaacctgcagtgcgttttgacctagcccttaaactagaaggcatctgagcgtctccgcacggtctccttcgacgaaaaacaaagacacaagcggaaa

SEQ ID NO: 1825 - DNA, 4789 bp, Toxoplasma gondii
  source 1..4789: mol_type = genomic DNA
gcgcggcacgttcgctgcgaagacgtccttcgtctgtttgtcttcttccccgctctcgtgctcgcctgtctctccacgacgaggagacgctctcggcactacctccggtttcctctcggtcttccggagaaaggagagactgcgcagaagcgagttggtttggcttccgtcgatctccacgccttcgcactctccaaagcttctctttttaagacactgcgactgcccgtgcatgcgtcggccgctcgtgctcgtcgggctctctccttccgaggaggaaagaactgtgaggtcgaggaagaccgtctcatccttcttttcggattcgctctggagactcggcgccgctcccggttgtccacaggagcgcctctcgctcgtcgcctctgcaggcgtttctcgcggacgccggtcgcgtctgtgtggcgttttagctgtcgaaagatcgctgccgacgcaaccgctcagcgcccccatccacagaccttcttctgcctgccgggcggggacccaggacgaccgcgaaggcagaggagacgacatgtctgctctgagggctccatgctctttaactggatccagagtcccgatagagagcattcccacccgactgcagctcctggccgggccgcaagccgtgcgagcgcggccagccaccagactccagctcagttgccggatttcttctcggctgcatgcagcggaccaagagcgagttgacgggaagcagagcacgtctgtttttttaggcctgcgactccgagagcgtttcttgtccgtcgtccgtcattcctttgtaccgcaacagtttctcacttgtcttcttgcaaggagacgcacgggagaagagggatcacaaacacaggcaaaggccaagaatgcggttaaaaacaagtgtgaggcggtgaagagcgtgagacaagctggagggagaaaggacacaaagagagcgagcaagtctccgcgttgggagaacgagaacggggtgggtcttcactgattgtggagtagtcactcgttttccttgacgctgaggacggggacttttgcggcggcagtgcctgtagtaattaggcatgaaagctccgaaggagagaaaagttcagccggaaagcttttcacagggaccttttggatggatggaactcttgggaggcagacgccccagtggatgttcgcttgcagcagcgagagcgtctctcccgtggcgaatgagcagggtgcctgtatagaactcaacgaggcgcccgagagggcggaacctcgccggctgaagatgtgatgctagatcgcatgcgggagagatacgagacacacgatgaagcgagaaagccgaacttgtggtgaagaagaatatcttggttgcctgtgaagtaggggtaaaggggaatgaaatacttccggacggggaattatctcatctaggtttggtgggtcacccttgtcagtcagaaaaagtcccgccttgtgacacgaggaaattccttgtgtcaagtggaaaaaacggatataagacgcaagtatgaaagatagcgaaggtcgcagtgtgcgtggagtgtcgttacaactgggttgcagctcacagccgctgtggcttgcacgacgctgggtcggcaaccgacgatgttaacagcaagaggaggaagacttcactcagcacgactgtggagagagaagatcgataatgactttcaagcgtcagctgccgaagcggtagcggtatctgagactcggatgcaagtcgacaatcgtagaacagtgttcaaagcgatttgctggtcacttcctgccaccatgcacacagcttgccaccgccgggaaccgcgactacgagggggcagccaaggaatgcagggccccgaaagggaaatactcgcatgagacaagaagtagtagtattttgtgtataaaaacttttcctgacggggactcgaaacgtgtgcttcaaggtacaaacctctcagagctggaggcgcaaagaagaactctcccgtgaactgcatgcacgtggttaccctccagagccgaagagcgccaggaaatcgagttagagggccgaagattcgccattttcctactgttgtgacagccaccgaagtccaaacggaacgatgagaaggatacagccgtcataaataacgacgtagcatcgcgtctcctcaaaccgaagctcacagtggcggtaagaagtacagctgctcgggtgtgctgtgccagtgtgaaattttctctttccgttctcaaaagctggatggaggcacagccgcagtacttacgcgcaagcgactatgagagttttgcagctggcgcagatgctcgttggacgcacatccagtcgtttcgtctcgcaggctgcgctcgtcggaaacgtcgaggtgtcacgagaaagccacggaatgagactctcatattgaagagaactgctgaatggtacaaatagacaagtgacagtctactccaagtggatgcttatgaggtcactgaacattcactttttcgtagcccttcaaactgctaaaggtgcgcaaaagaattccgtgtactgacgggaggtcctcttaaccaaggcatatggctgaaaggtgtacgcaccttgcaaatggctcgcgcaatgtctggactgcccatcacgtttcgttgaccatgtggatttactgcgattatcgcgtgcagaaacgggattatttgcttgagagcctgcgggggaacgggagagtagtcctctgtcgcgattctcgtttctcggggcagagcgaccatcagcagtattcgctggacaaaagcgatactccgggtagtttgagcagaaatccattgttcccttttcataccgtcaaaagctgtacagaacttggtacaaagaagtaccagcgaatgcggtatttctgaaccaacccggacgcaaaacaagttgtcacaccacaactgttgtttagcatcagattcgaactgtacattgaccgttcaacacaggcctcgcttccccgccacgccatggcatctgtgcctcagtttgtccgatgcattttggtcatattgcgacttcgcgtaattaaagagcttctggatggaagatactgtcaacgcgttaactgtggcccagcgttcgaaattttgcaaggaaatgtccatcgtggggatgcttccgacgttcaacccttcctcgaacgctgcgtatgttgttccgctaaagactattgatatgacgtatgtgatattgaggtgatcgggtaggctcccgcggtgtattgtgacggtcgcacatgccgggacgatcgacagaatctaacggcggcgaagttcactctgtgttgagactgcgctaacagtatctcagccaatttgtcttgcatgcgagcatgtgcaggttaagccaccgaacaatgacgcaaagatgatcacaaaataagtgctggctaaacgagagggaggccctcgaactgagcaagctgcaggtgctgttgaagaggggcaccgtgcctgtagcatgcttaccagaaagttacaattaggtctggtttggtagccagctgcaaatgccgtcaatacccgcagttgtgtgcgagccaaaacactgcctgtcgcctacagtggcatatgcgaacaaggagggtacatcgcagctacacctggtgtcagttacaagagtgatatcagaagctgcaagtagcgcaaccgacatcgagtaagtgttcaacaagtaaacagtaatatgggagaaatgagatgtgtacgcattacagtcatgctttcaagtgttttccgcaaccatacacgagaattgcaaagcccctgcgtctcgagtaaaccaataccgggtgggtgtaggactgctggaattaaggagataacagcatccacccgcctacatgaagacagcctacaaacgtagacgaattcggaggctgtcggcagtaggcgaaagcaacagcgattgttttccagcacctgagacgagaacgcttgtgacgaagcctcatatgccatgcttgttgtccgtttcacctgctggtcacgaaccatcttttctctgcgttctctattatgcacactttgtggcttgcagttctctggcgtagacgtttagccagaagtagagtgtggctgcggctgtgccgagaaaaaggccacacccccgtggcaggctgtttttcaccgatccgtgaattctaagctgtccagtacccttctagaagctacattgctggacgaagactggctagctcaagaaggggaaagcagaagtcactaagtgaactggaatggatgtggatgtaggtctccctacaccagagccgcttgccgcgagcacacagcgggaagacctggcaagacgggttgctttttggttctttgcatgaacactatggctgcgtaactctttccaatgtggtttccacccagctgcattttgtgttggaaatgttgttttatgttttgtatcatatggtgaccatgcaccttcaattgttcctgttatccctgttttttccatcttagcggcactagcagcacgccgttggtcagcgatgcgtcggctgagcttatcccctggtgtgatcacgctatgcgcgaaacattttccgcacgaattcttccggctttccacacgctgtttcaatctgtccctccgtcaagccactgccctgtaggtcgaccacacgttcacctcgcaaaacgtcaggcggacgtcgaacacgccagaacgcgtctgtgtgtggctcaaccatattcctgtcacatttggctggcttccactctcataactcatgcacggctaccgaatcga

SEQ ID NO: 1826 - DNA, 4984 bp, Toxoplasma gondii
  source 1..4984: mol_type = genomic DNA
tcaggaattgttaggagtgtgtgtccttgtgtttgaatcaatgagttccaaaatacaggcgtaacgactttttttccaggatgccagtaaccgtgagagtatctgaaagaacgttatgtccattcctatttgcatacatcttgacttgtgcacgcctttccgcaataatatgctttgcggtggaaagttctttgtgggcaaagtgctgcagtacaccgcaatggaagcgactaattgtatgtaggggcactgagacactcgatttgccgactgtcgtgcatggtgcacattggtgcaaatgcatttttttggcttagctcgactgagtggaatgttctacgcttgcaaacaacaaacccctttttttatttgaaacaagcgtgtggaaaatcctggtcctcatggttttgactctcgaaacagtctcctgcccaccccggcgtcaagcgcaaactctctggaagtagcactacactaaacagaaactgttcgtgcttcacagattccgtagatcgtggtagcctaaaagcgctttgggttcacatgaagccacgcgatgattcacaaagacaagattccctgatctccacgggaagtgagaactgtgactaggcaacatcgggtcttcttgcgaagatctcaaagtactgcgtcggcgtagcagctgctttttgtgaaatgggttctcaaatgctagcggcggatgtgtttcacatccatatcctgcaaaggaactccccaaacctgcattgtagaaatttttgtcacgtctttcccaccttgattctcctcaataaagagccacagtgaactagtcacaccgaagaggagcgcagggagggggaccgctgtcggtggcaaattgcgtgccgatgctataggtccgagggttgaagaattgaatggggaagagcctcgcttcgaaccagagtttccaggtttaggggactgggcagtcgagtcgtgagatcggcagagatcttcaggcaaaagatgcagcgtgtggaggggctttacggaaacggcgtcactgaaatcaaaggttggaaggtccttgtacaagtggatgacagatggcccgtgctgcacctgaatttcgcaagagcacacgtaggcgggaaaggacgttagaatcaggacaagtgagctgacaaccgaagaaagtgtgcttatgcgcccatgatattcttgtctgtggtaaactcatccttgtagactcagggatatgccgactgagtgcagcgttgaagttgccacgagcaatcacagattgtatggcagacgaccagtgaccctttttgccgaaaactccggtggtgattctgtgttgtgcaatgaaggattatctttggctttttttttcaggttgaggaccgtcggtccctagatgagttgggggtaaagagatcacgcaagaactcgcggtctgtgtgcttctgcttcgctggtacaaaagtgcagtttcgtaaaacatacctggtctgggtggattccgagggagatacccatcagtttcaccttgcggttgaatggaatgtgaataatcagctgagcatcatctgcactggacacgaaacgttgtccttttctaggtctgccagctctccaatcacgagacgggaacggttcctggcaactgtcattcaggcagtgcacattcgtccagtccacgaaatgctcgaacaaatttacacacagcctttcattgacctggaacttagcattgtgctgaagaccggagaacagatactcttcccgatgatgttcgtctacctccagttcccctgcatcagacgcttttccagttgcagacgcccggggaatacctgcaaaatcgcgtttatccattgatgcccaacaccaaccgaactactatatgttgtctctattcagtgtacagttccatgaagagcgttaatcgctactcttttgggccaacactttacacagtaggctcttctatggaagagtaaccaggataacgttatgttgaaaccggcatatcggttcacgtgtcactggtaggcgatgtaattccacccagcccccaaagtacggcttcttccatgctatggttgaaataataagcatcaaggcgggtgattcgcgttcatacaaaggacaactgcttttcaactgccatgcatccggtggccagacgcaggaaagtgtcgtaatggaggcggcagctgatgcgtcaccgaccacaaagacgaaaacgtctcagaggcactttagcaatgatttagaacagccaaaaagctcaacaaattttgagccgtggagtatgcaaaaaggtgcactggtgagtttgctacacgaaatgaatattcgatccgtgaatgcatcactgagaaaacccggcttgtttttggttagcgtgtttcgcctgtgctgttatgacgctacaaaagctgtttcgtcaccataagcccccccacgtacaacgtgcagctgcaatacgttcaaccttttacgagagtttcatcgccatgccgcggtcactgttgctgttggatgcaacccagcattatgaataaaaaacaacatttctgccgtattttggattcgggagcagggacgcgccccggtatcgtatcatgtctcgtctggatctattccatccctatctgaggccacacgggcggtgtttccttcaattcgaaataacgtcagcactctatgaaccaaaaatgcctctagaaaattgtgtgtgtgtgtgtgtagctgacgttgccatctctcatccccccttgtctgtccgccttctgcacgccagcgatcgggtacggtcacaagaagagaggtaaagctaatgacagtgttgggtgttgcacggttctctcccatacgatcgcagcgtagtgcaccaccgtttctgcgaaaattgttatttgtagccggagccgaatttcgcctgctcttcctttccatcgaactgaacttacatcctcctccagcataattcccccccacccgaaacttcatgcagctgaacatcaggtttctgaccctgtttagatactgaaggggtctaaactgaaagctgtagcttgcggttagtgtgttgacgggggcgtgcgatgaaagtgctgatgtgcattggaactggaccacacgtctcgccggtaaagatggccgacattgtggaattccccgaataccgactccctccgccttaacactgcaacatcatagcaccaaaagaagactctcgcgcgttacaacaaaattcgcttgcaagtggatttctgactgcttaaaaggaatgtaccttacttcaagcaatccagtgtccactaggccgatgaactcgtgaccaaagagaaacttacagtgtgattcggacacagtgactgtcgtgagagaaactacattcgccccgagtgcaagtttaactatgccaggtgaccccctgtttcttgacatgtaagcgcgtgtgtggatcaggcaacgtcggaatgtcttttatacaagtgaagaagtaaagaaggtagccctcccgctctcccggcacgtcacacgagaactaccacaagcctgtgtcgtgctgcagcaagtgagcgctccgtgccaacggacctcacacagtccgactagtacccactgcatactgcccttacaaaaccaaccactacaagcgtgtacatggtggaacctcgtaacgtctctcctggttcccttccttcaacttccgtcacgtgttagatctgacaagcgagagggcataaggctcagtgccagccgtgcggctgccgctgcaaacacggcagccacttcgtaatttgcaaaccacactgcatcgcaagctaagcagagtggatcttgtgtactggcatctgaagataccagatggaaaactaatcggaaactcagcagccgatacggactgttacgtagtctcgtgggaagatggagcttcgctagcaccctcaaggcactcctaaaagactttcgcaatagagacgcaaggtaaactccgcgacgattcagtcacgatcatagcggcactaccgtgtccaccccagctgcgggcgacaccggtgcctgtcctacggggacacctgccacagtgggaagcgtttatcacagtcgcgtttttcaagactctgttccaccacaccatccaatgctatagtgtataggaatggcgtggttgccgtttggtgtttggttttcgtgaacggaaagtgtgcaaaggctgtgacaagttccattcgcattgtggctttaacgtttttcctcttcccatcaaccatgggaagaagcttggcgccctcagcgtcttccacgtggcgcttcgacttgtttgtggattggcgctggtggtagattacaacagataatttcaccatattgtatgcttggaatacttttttgtgataagccgcagtcgatcgttctgctgtgcaagcccacactctgtcccttgtgcatgtccagaatgacgtagcctgggtttgcgacgagggaagttcagcgatgcgaccagtttcctttctaccttcttgcgttccttgcgagacgtcccgtagtgcatgatttttcccttcggtctcgtgaattttaagcaagagaggaggctcgcagaaatttttgtgtggtgggtgaaaaccgatgctgataggggtggccaagaacagacgcttgcattagagaacgacttcccgtggtagatatctgcccttacgagagggcttggtcacgttaagacaagcagcgtattccagtcactcttctacgctcatgcaacagttctgttgaatgaggggagatccaaatctttttcggagccagaagcacgtggtatgtgtgagggaagaccaatccgagttgtggaaaccggaggtgacgcagttatagagcagttttccttaggcagaccgcctatctgcttcgaaggtgttcagaattgaatttcactacgtgcattcattcctggtggaaggttcgaagtttgcacgggttagacatcgcatcaaaa

SEQ ID NO: 1827 - DNA, 1623 bp, Toxoplasma gondii
  source 1..1623: mol_type = genomic DNA
gctcaaaatccagaaccacaccgaagagggctagggcagagtagttttttttcgcctgtctgtggctggaatgttgcggtgttctccgcggtcaactaccacgccggcgggtcgttcaccgcgtgtctatcgacagtgtacgccattcctgtatattgtgaccgcgccaactctccgtccgctgtagagtagtgtacatgttctttgccatcacaactcggttagtgtgttcgcgccacccactgcgctgccttggcttctatgtgttcagtccgttacagccggggtctgttggcctgaacagtatcgtctgacgagattcgacggtgatatagtcccgtatggtgttggtgtcgtggatgcgtggagctgatcgtcgaaagatctagtcttccgggctagcgagctactctagagaagaggttagcacatgtctctttatgaatgtatgaccttacctttttccatccccctcaacaccttaacgggactgcacacaacttcattcacacattgcttcatcaagaaactgtacaccaccaccccactggactgcttaggacagctgaaagtgttgcctttcaatatactacacattagagttattccacatcagttaaaaacgcaggtgtcgccagaggacggacagcgacgggttcgcaaagccgacggtggacgcgagcggctcaatcgaaaagtcgagttcatggagtgacgactacatggattgtgtaccaagcattgaagtggcctgagataaaggaatgaagagaagcagcatgtatctcgaaaacagtggacggtttgcaagacactcgttcagcagatacatacttcatgcaagtctgtacgcaagcgtttgcctggttacgacgtctatgtggatcagaccctcgaaaaactacaggtagaatctgttcgaaaagatattcacaatcgttaatgtgggaagagaaacgccgtgtgttggagcacgaacacatgcgttgtcatatagttccgaaataggggaaaagggccctctaggtggccgtcacaaccgaagagacaggctgaagcaccgggtgaacctgccacaacattacatccattctcgtcctagaggcctctgattcctttccgtacgcaagctatctatgattcgactcttgaattacctccatcttctatgaaccaacgcatgacgtttttgaatgtaggaacaagcgcgagcgactgtgctcggaaaaagcgttcgttctacacgcatgcgtctgcgacgcgccagtgctgacagtgactctcttctggggtcaaggcagtacgaaaaactaatgaagtcaacattttgactctctgcctcacttttcctggaatggtatgaaatccgctcgtgtagtggcggcatagcaggaatctgagtgtggcgttctgtgctcatctgaatgacttatgtttggcgggggcatgcagatcgtccgattgcattttcacctagcccaccgatagatgtcctgcgggaacttgagttccgccttgaggacgacggtgagtttgcatagcagtttatcaatgttcgtgtctagtgcgaggcttcttcagcaacagcgtgtacggtgctgactcttgtgctcccctttggca

SEQ ID NO: 1828 - DNA, 3127 bp, Toxoplasma gondii
  source 1..3127: mol_type = genomic DNA
gaagaactctgtcgaaagtgtttttccatctgcgtgggtgaaacgcattttcatgtctagatgccgactctttctgctgttcgtctattgtccaaaacatgtaaacagcatcaaacgccctctgtcgggactggacggcgtcgtcgcgaggcgaagctcctgctcgcgagtctgtctacgaaaatcgacgtgtctgcatttcttgccagcactcggtctctggaaaagcatgtgtctgtgtgcagtgtgtctgtggtgcttgggagagttccttcactccggctgtttcgttcgaagcaactgcgtcgtccaggcacatacgtgctaacggcgacttccagtccggttccgaaaacccgtccacggcgaaaatttatttctgccaaatgcgtcagaaaaaagtcctggcgaaaacctgacccacttcttgcggaggtcaacagccgcccgggtgtggtgcagttgccggtcgttctcgcacgcttcacctggaaagccacgactaaaaagagtcgacagccgaatgcgaaaggcaattcgcagagaaaccacacgaattcaggacagtcttctcgcacaagcgtatacttgcggaatcatgatcgtcgcttcggtaggcttctctcacacctccgaagcatagagacacacacagcaattcccgaggaaacagggagcttctagggtactgacgcgttcgttcctcatctagtcgggaagtactggtttcgatcttaaaggtttttgtttaccggatccagcttctgtggtgtttccatggtttcaaggtcgtggtagatgggacgaccttccacgcagaaaagccgacaagacggaaagaggagtttgcaccgcgatctgtgtcgaaaaacagaacgtcgaaccctaatcgcaaagacgcgttcccaaaaaacatagggacggcatttttgttgcagactctggagcttgcgcgccggacgaaaaattcgctcacagaacttggtgccctttcctggtggaaaccccaacactaggagtgacacacgcggctaaacaccttcagtatcgggaatctacaattcccgaatgtagcgagatctaaacagcgagactcgcgagcacgatttcaaatgcgagcagtgaactcttacatcctaggaggtgttttgtgtgtgcggggacaaagaagtaggcagtctattggttttacttcttcgctcagacactcgcgacaagcggaaacagggaaaggtgagttcctgctcacccttttgtctgcttggtttctcccggctgcttttccctcctggttgtgttacaccagcgcttcccgttttttgacggggctcttcagcagcgaggcagtccgggatctcataggatttgcctttcaggctgcaaggacctttgtaccctgtaaattacagacatcacatttctgtttctattttgaaggtatctcccatttccataccccatccgctctcgacaaggagcatggagcggcagggcagtgcctcccttgaaaacagcacgaggcgtctcaggttccgaatttatcgcctttacaatgattatccggtggggagaaaagacctctttactctcggccccagccatccggagaccacaaccagaaccggttcgccacttttcttccctcctgcgaattccgcgcgtaggattcgccggcaaacctcactacagcgtataattggagaattctgcagatgtgtatgtacacgggtgaagaaccatgtacggcgacaaccggaaagaggtgtaaatagcacgtattattgcctctggctggaagacgtagaggacgagtggcggcgacgctgctcagcgtgagacgtagaagggcgcgtcttcgtttacgtgtctcaataaaaagacaaagacgaaaagaggaaggaagcccagccctcatttacaggagaacgtgggcgagggcggaaggacagttttttctgttcggtgcgagctacctgaaaaaaatgcgttctacatctagatgtcaactatgggtttccgttgacggcgaagagaaaaacaggacgcaagagcccaaatttcctgccgcccctcctcagtttctataatcacctggaaaaggaagagagaggaaaacgctctgcctcttcccatgaggacaagccccaactgctgccgctgtggaatgatgaaagtgtcaagctcatgaggtttgaggcggtgtctgcgcctttttgatctttcgtctgtgtttccaaacgcgagccaaaactctcacacgatgtcgcagagttttcggagagctaacgcagacgttcttgccgtttttatttccaaaatcgcgaaagtgctgcggatctacgtggagatgtctggatgcgtgtctgcccgcgcccgccgcaacccccagaacaaaatcgcctcgcgcgctacgcaaaatcgggagcttctgctgtcgctttttgctgaacatttgtttcctatagttaagtatcctaggcatttggctgcgcgccacagttttgacgaacaacggactctttgttcgcttcgttagactgctttcttgtcgcctcgacttgacaagggctcgcgaaatccgaaacgctgcaaggtgattactctcgaggtcactcgccaaggggggaggatggtgaagctgacgcttttgtttttctttgtctcttctccttttcgtctcctttcttttttctagtccagaaggttttagatacccggacgttccttgcgaccttcgcgcgaacagatataggtggtttcaagactcgtttgtttttccacgaacaaaaaggcatgcgacttcgagagagcgtcgccggcaatcgcccccgagtcttcttcgctgtccgcgtcgctcttttcttttccctgcttctctttcttcgcctgtgtcttctccccccctcgccttggtctaggccttagtctttgtcaccagtgctttccaggactctcgctcctgttcagtttccgctcaaatttccttcaagagtgctttcgaggcgctccgccgttcttgcgtgagcgcgagaggtccgggaggtctctttgtccagccgacttgtctcgaacgcatgtttttccttttcttggcctctctccctctctcctcgacggctaccgaaga

SEQ ID NO: 1829 - DNA, 1642 bp, Toxoplasma gondii
  source 1..1642: mol_type = genomic DNA
aaaggagagggaagaatgagacacgaacgcatacagagagagaaagacaaaaaggagaaagagacgaaaaaagaggagaaacagcaaggcagaacaagcagagaggcgtgaggccgcccaggagtatcagggcaaagtcggaagagacaaatatggagagagacgaaatcgttttttcaatgaaactcacccttggagaggtcgcgaaacgctcctccggcgctggcgtcccttgtagctacacccggcgtcatcgctttccccggctgcttctctgtttgaaagtttccaatcgtacggcggaaaaaggaggaaagagagacggagacggtgagatgaaagaagatgtgacaaagaaaaggtggagaggaaagagcgagatgcagactggggcggcgtcttgtcgcaggagcgtcgactctggtgaagaaaatccttttgaaaaaggagggatcaccaaagaatccgacgagatagaagaagcagttagtcctcgtcgttcttcaaataagaaggtcgaagacaagaaacaaaactcactttccttccttcctgcctcaacaccggaagaaagacctccaggatgtcgaccccacaaaccggaacggcgcggtctttgaaaaactggaaatccctgaaaaattccttcttctcgctctctcctcttatctctcttctctctcttctctcactgctctcactcttctccgacgacgcagaaataactgttttttaggaacagcttctggtcttctcgcaagtgttcggaagactttttcctcttgcgttcttttttccgagcttgaaaaagccgacgccgagagtcaaacgtctcccaagcgcccttcaccgagacatgccgacgcgctgctcgctcgtctggatagctgtcgagaggccgagaacttggaaagtgagaggtcacaggagagagacgaaagaacctctaaaaagtagctgagcgcgagaaaggagagaaatctgctcgcagaacggacgagaggaagaggcagaaggtcttcgcgacgatctagctgtgtcagtgagagagagacacgagacgcgcgccaggactcaaaaaaaggagcctgcaggcgaaaaaggacttctgcaggcaaggaggggataagcctcgaaagacgggaggtgaagacacacaccctctttttcgttcaagaagaagaaacaggaaaagcgaagaacaactcagcgaggcaaggtcgaaaaaagcgaaagtggagcctggcgcggagaggagacacgcgtgagagatttttcatgcggttcgccatccacgggggggagctgcgcatcttccggccgttgggcgtccagccgaagcagacctgctcccgttcttgcaggctgcggaaacgcgtggaaacctcatgagaaggaaacgaacgtcgactgcgtcggtttctgaaacatcgacgcgtttcgattgcgctggaggcgtatatatagggggagattcgacagacagctgaggaaacatcgaaaaaacatgaacagaagatctttttcttgtttcgaaaaaacctggttcggaacgatcgaagaaaacaaaagctcactgcagagaagacacccttctactcacttgttgctcgccaaccggctagcagaaaaaacagcgcca

SEQ ID NO: 1830 - DNA, 5008 bp, Toxoplasma gondii
  source 1..5008: mol_type = genomic DNA
ttgatggaagtcgtgtgaaagggtgacagcgtggaatgcagccgaggacggaggcgaagacgcgcagagatccagtggcccgaaggcaggggcgtaccacacagcggcggcgtcgaggcggttcgttcgcaggaggaaaaggaggaggagacaaagaagagaaggaacgacgtctgcatttccccgtgtgctgacagccgcggccacggggaagatggtccagcagagcgcaggaagaagaaaggcgctgacggcgggcgttgccgacgcttgtgcggagcagggagaagaaggtcgcggggacggcggagaagacgacggcggagaggagagtgaagaagacgagggtggcgaagagagtgaagaagacgacggtggcgaagagagcgaagaagacgagggcgactgcagcgaggagagcagcagactggccgcgttcgcggaggaggcgagaggagaggctctgagggcaacgggtttctcgccaggctcctcgcgagggatctgctctgaggcgaggagcagcaggagcttctccgtcaacagcgagagaagcaggtctgcagccgcgaacaggatcttcccgcatgcagagtggagcacgacgttgcctacgcagagaaacgcaatgagtggtgtgtatcgataggtatggcgtctgtagggcgactcgaactccacaacatgtcgcgcggcgtcgctgtacaccttgtagtcgatgtcggtgaacttcacacgcaggttccggtcctgccactcgccgtagacaatcaacgccgcccggagaagcgccgcgtacgcgtacacgtacagccggagccgcgacgccggcgcctccctgaggtgtacgcacacccggtggaacggggcggcgaggcgctgagcgacgccgggggcggccgacgaactcgcagagccaggcttctctttttttgcgtctggacgcggcgccatctcctctgctgtcgacacgagagaagtttcgagaaacgcagccacgcggctgccggcggactcccaaacagcgcgggtcgtccgacacaaacacagaaaaaggcgcgtgcagtcgaggaggtccgtggagagggactgcgcggtattttttcaccaggtcagcggcgcatgcgcgcttgagacttgagagaagacaacgcagcgatgcggatatgtatatgtgtgtgtgtatgttgtcgcatgcagggcgactcgaagagccacagcgagcgagaagggaagaaggggagaagcacggagttgcggcgaggtggagaaaaaatgggtgcagacgcagcagaaattggagctcagtgatgactggaaagggcggagctcgagggggcaacctggcaggcggaggggagccaggctccgcacagcgactttcggtatctttcagagaggtcgaaaagcgcgaggtgaagtcggcaccgcaggtgtgactgcatagacaaggatcgagaaaaagagaggatcggaaacggaacgcggaggaatgggcgactgggcgagggcggcgcgcgccttcatctcgcaagcctccgcgggagacgcgcagaagaacgcctcagtctctcgggagacgaaaaagaagagcactcggcgtcaggtgtacagacagcagagacgtcgacagcgctcgggactggcggcttgcgagacatgtgcgcgtgttccgctttgtccggaagagctttcgcgatgtcgcaggtctgaagcggctcctgctctgcaatccccgcggcttgtgcaatttttttctttcggaacgccctccgcgacaaacaggcgcgagttcctcgcacccgcttctcgacctcgcgccagagactgtcgcgctgtcttggccgcgcatgcagccatcgatttgcaacacgctgccgcgccgtcaacgaggtccccgcgaagaggaagggaaacgaaactcttttccctgcacctccagaggggtgttccggtgtatgtacagctgaagacggagagacacttgcaagcagctgccgtgtggggagagctgggcggaagtcgaggggctgtcggagcctcgacgcgtctctgcatgttgttgggtgtgtgtctgtgtcgagagtcgccgttctggaaatgcactcgagtcctgtttaggattttgggtcctgggctcgaggtctgcactttccggagcgtaagtggcgacacgagtcccacccagctgttggctttgaaaagaacctctgttgacgctgcgcgatggcctagaaattgcaggtcacgtatgaaaaaatggagagctgggatgctgagaagctttgcctctttgaaattcggcagagaggcagcgaatgtgaaagtcaaagtgtccgcaagtgaagagaagtccccaaagtagcgcgtcgtcgctgaggaaggcagtggctgagagacagacacaagcctgaccctgcatccacgggtgtagttacgcagctgcaactccagctgtgcagtccccaagtcttgtgaatgaaaggtcacaagacgagagaagctgtcggagcgcgcaacatccaaagtgtacatccgcctgctcaggcacactgcatcgcaaactggtttctcagcgcgcagttctttgtgagtgtgttctcgacagcagctagcaagttttggaagccgcactctgcgaactggtgttcacgccagaactagttccatgctctggtcgctggagaaaagctcctaggcaacaaacgcgcagttcaggacaggcacgcacactcgcgaattcgatcaagacggcgcgagaactgtggaaagcagacgcatttcgccgtgcaacaaaacgtaagaacttcccttcccctgtattccgtcccggacggagtcttctcccggagaatcggaggggctacgcagtggaaaaaactgccaagttacagggctgcatctctgtttcttgatcctcgagtctctcgcctttctcggaaaaccggcgaagctcgttcgcgctggagtgtctcgacaccgcagaaacgttcggtgactccggatcgcgcgtttgtcgtccgttccgctgttctcgtccactcgtgtttacaaaagacgtggcgacacctggggagatttcgagggatctctctctggagtttataaatgaagtagagcagagcgaacccctgcccttgcagaggagatattgcaagaagtcttcacggaaaagatacttagcggaacgcctccactcgctgcgatgtcgatcgttttccccaggtcctccagctccttctgctcacacacagtacaactttcatccaacaacaaaggcgcaatgccgcgacgaacagttactctcattctccacatgcttggagtccagtcaacttcgctcttgcggccagctcgcacgtacatacagatacaccgcccttccaatgtgttgacatgagtctccttacacaaataagtgttttttgtttgaatacgcgtacatatatatatatatatatgcatacatatatactggaagacctgtcaatagatatatatatatatatatatgtgtttgaatgcgtgcacacaagcctgcattcatcccagtacctctgcttgaatgcctgtgcacatatatgtaaaacagatatgggaatcgaggcctgtttgttctgtgcttgacgtcaaactgaaaaagttttctgtggcatgtgcatttcccttcgcggtagaggtgcgatatggcacagaggcgcttcctgcgcacgagtttcctctgccagcttctgtcgcgtttgtcttttgttctgcgcgactgtgctctaagaaaacccagtgaaaaagtgacggaagactccccacttccctcgaagtccctgtgcttttcttccctcttcttgtctgtaaaaagaagttcccctcactctcttcctgccagcgcatccggcctgaccggcgacctgtctttcggtgcggtgaagaagacagaagaagttccaactgttcagtacactcacgaacaagatacagaagctgctggacacggagattacagggaactcgcagatgccgttttcacttgtggagtctattcacgaggtatttccgtccccgaatcgttatcaaatcgtttagcacagcattgacaatgtgcagctgctgcagatattgttcctgactcgagagagcaagtagttggaagcgtaaacttgccggaagtgcgttgcccaggtcgtctcacggagagatgcttcgcgtggacaaacagcggcgggagacttttctctccacccccctttgtctcgcgcgcgcgagcggcgccgtttcctctgtttgcgggaggtgcccgcgaacgctggagaaacttgcgctgttcgcgaaagttcaagatctctgaaagcattgcgcaacaaatgcgttccagtgaacttcctgacagccgagggcggcgtcgcttcttaggggttgctgtctttcatttcaacaacgcgaacagcgcaccgcgtgtggagcctctctgctggcgtttgtctttcgtagtcgcttccagcatttcgcgtctctcgtgtctctgcagtttcgtgtctttttctctcttcttcttgtgctctgaggcttcccctcgccgggacgcaacttgtttctcgggagtacgcacaccgcgcggtcacctccagcgccagcttcggttccgcttttctcccgtctgtccgcgcgtttctcctccggcccgacggccctctgcagagtgtatttgaaagtcggcgaacaccgccgttgtgagctacttctgaccacgactgcgacaagacacgcagcagctttctctctgttcgcgaagacactttgcagccggcttctgccccgcgtcgctggcctcacggcagttttacatcccgtccagctcctcccttctgagtcgcgtttctgcatgcacggtcttcgttgtcctctcttctccatctctgccctgtctctcacctcgctgtttcacgaggacaaacgctcgccgatcgaaaagccgcaaaccgatatccgaacggatcgtctctcccgcagacca

SEQ ID NO: 1831 - DNA, 4250 bp, Toxoplasma gondii
  source 1..4250: mol_type = genomic DNA
ccttgacgacaagaacacgacgcggctttcccaccgatggcaagagccgagcaatcgcatttctgctggcctcccgcagcggtcaacaacgaagcccacgcttccaagttgttcgctgttccccgactcgtcgcgcaagtttgccgcgaggctgcaaccggaggattctcttgcggagcgaacccgggacacccgttcgcagagttgcattcttcaaggcgaggacactgctccgtgatggaagaaaacgcgccgtcgcaggctgcgttgtgggagcggggaacagaaacttgagtcccgcgaacggaaccccaggtggaggcggcactgttgtccgcgacacagcgacacgcagggagccggacggcgtcggaccccccgaaacaagacaattttcgcattattgtaaaagaacaacctcggagcgacgcaaagaaccccctgtgcccgcgagcaggacgtgccagggtcgagcgcacggaacggcgggcgtcagcgaacgtcggaacgacaaaatcggaacaatgtgtagcctgaaaagattatgggccgagtaaaatggaaaagcttcgaatcgacgaacggcgagcgccttagccgtcgaccaagaggacaaccaacaagacacacgctcaccacacctcagggtggtttgcacaagatttaccatagcgacgaacgcacgctgcgagaaatgctaggaagaggcaaaatgaacgcccctattagatgcagagcaacttaacccggaacgacgacccacgaaagaggttttccgcgcgctcgaagttaaagtgacagcagagttacggtcaaagcaggtcaggaagggaacaagacgtggtatcgtcgacctgcagggtgtgttgtgagtcatcgcgaccgtttatggtttaggactaaactttatttctgcacgtctgctaacggacctagaaacgcgacaagcactcacgatgcttggctgaaaatgggtttctcaagtttttctcgccgctcgacgacggcgcgtagcgtgaaacacggtgttaacacacacggcaaacaaataagtcacaactctacttgggtggatttcacaaagtctgccgcagaagtcgtcctgatcatgctctggttcacctgctatcacgcaagcaaaggcacactgaaatcaaatcctagtggggcgcaacccctagcaaattcctagttgtgagaggacaggaaatctcgggattctcagcaaacaacggaaacgacctgtaaggaagatttccaggtcatacaagctcaaaaatgtaacattttagacagggaaacagggggaactgttctgccgtgtccgacgctggcggtgaagacgcaggcgctggggatgagtgccgtcgtttttcacctagccaagaaggcgaaaaacaaagatatccgacagtaatataccgctgcgtggacggcaatgtgcctcccaaagaggtgaaactactgcattcaaataacacccccgactatgtgaaaatgagcggtcgacttttcccatgggacagctcgaaagctcgaagcgtcgaatgcgagcacgcgaaaaggttccgtccgggttgccctcagaacgacgaaacgcgggattctaccagttgccggaaaagagtactgccatcattcctttcacttgctcttcggaatggaactcggctcgtgtttttcctatgcaagcgagagaaagtgttgcccttgcacaaaactttgcagctcacaagaccagcgcgttacagccacatccatgccaggaaggtcggtttctctttcacggcagacatcaaaagtccttatttttcgatttgacaaataggtctgcggaaggcacaagcgtgcaactgtgaggatgttaggttctatgcacaaggaacagaggagattgccgtgaccgacaaaaggggtcggcctgtatcgagcttgaactacgccgtccaatcatgagaagcttgaaaaagtctcccgatgacgcacgttgtgtttgcttcttgtcactattcagcatgtatcttgaactcaacgggcacgtcctacacttctccgtatctgtcttgcggtacaggcggtaaacaaaggatttgttgagaatatgctttagcagctgacagcagatttgtgttctaccggggttgatgtcagaagcagcttgcgaccgtgtagccaaccaacaggaaagtacacggctcttacaggtgacggtggcgaaagaaagcagatgtccgcaaaatgtgaatatccaaacgagagaacatctgcattaacaggtctcgtgtcctgccaaacgacttggtgagaaccccagggaggccagcaaggtcatcagcgcattcggatgagaagagaatgcatgggcaagagggaaggaagtgtcacgaatactccagtctaagtagcaaagcgacgcaaaactctggttgtccgagtatgagggacacgtcgcaatgaaaaaaccgctaactctcatgatgctccaaaccgggtcgataacagggaacaccgcaagaatctgacaatacactcagggtcgcatgacatgagactgcacttttgcaagatggcattgctgcgacctaagtttttgtggggcagtatttgcattggacgacaccccctgtttctagcttagaaaacctgagcttctgaacactgaagagagaagtgtcctcagcactcaactctgacgtggtttgaaccacagtgtatacaaacagtggaaaaaaaagcagatcctcccagggaagacatttcagcaataacggcaagcacaatgcattgcaatttgtgtcacataaacctgtcacatgatgcgaagggcatatcgcagaagcatgcttctctcaataaacttaggcacagatgaggggaaacacgtaacgcgctcagcacgcgaattggggtggaaaggtgtcttgaaccgcgacacggcacggaataaagagtaagactcctgtcaattgggaagctaaacgaaagagaaatggctctgctcctccaattcatcacacttcatccccatgcttcacggtttgttcctgttctttacagttcattcgggtcagcatgacgtatatagctaacacgtgtgtgccgcaattgcctggtaaacggataccgacagtctgagtttcctagacgatagcgcgctgaaaccccacccggtgtgttgttcccactgatgaaaatagttcttgttttccaaacactcgcattcgtgtttcctgaccggattcgttgcggtatgcagtgacccaagcgtcacgcgtcggttttcaaacaaacatgcacagtgcgtttcatgaacccaaagctctccttgcttcccactatacagaagtgatactaaaatgcagaatctgaggggcaagaaattgttgaatcttcatttgccagatgggtgctcgcgacagcggaagtaatgcttcgcggtcgacttgcgcccgcgcaggaaactcttactccggctgcttggtgtgcagctcctctgtcagcgggactccatcagttcctgcccgacagcaaaaagacgacacagccatgggaaagacacatgttatgacttttaagccagccacagggtctgtcgattgactcggaatgtaaaggctcatttttggcaactgcgcttttcgccgctgcgcagccgggcacagtcgaagcgacttcttgtcgctgccacgttcactgcggtgtcttgtctcgccggcaaggaaatgagatgcccacttggcgatgtcagaaagggcagtctccagttttaaaaactagagcgatccacattctccagcgcgtgacgacatctcgattctctccctcagagtgtgcaaggaacgattcctgtttacccgccagtgaaagtcgctccgccggccgcgggtatccgtgtttgtcttcggtattttcgtcggcctacgaaactccgcgttacctccgttccgtttcccagaatctgctgctcagaggtgcctggttctgggaacgacgcatcgtgtccctcttgtaacaacggctccgccattttatggtgtggccgtcgagaaataccgccaacttgtggagttcacagccgtttcgcggtcaagggaagaagcgttcagggtccgcgggaccagaaggattgggggtgtatagacaggcgacgcttcatgcagacgcatccgacacggctttccgccgttgccgtggaagctgagaagagcgttcgaccactggatgcatctgcccactcctcgtctacttca

SEQ ID NO: 1832 - DNA, 4094 bp, Toxoplasma gondii
  source 1..4094: mol_type = genomic DNA
ccgatcagttcgagatttatccgatacaggagcggcagaatccgcgctgcatcgcgattcggagacgccgcccgacacagggttcgcagtgtcgcctctttcagactctgaggagctcggcaaggggcctgcctctccgctgagggaagcatcccgaggaacggggcttcctggagtggctccgtcctggcttgaaaaatccgacgccgccacagtcgaagggttagaggactggtccggcagcaatttaccagaagctgaaggcggcaggggagtagtcctgttgtattcagaggaaagcctcgaggcgggatgagcacctgaagagccgctaggtctggaggcggcgccgctctcggaagcggctgcatgcggtcccagtcccatggcggatggaggcggacctcctggaggcatgccaagcgaggcactgtgaagtgcgtcagatcaggcggacgccggagactgagaggaagactcgggagacaagctagttgtttctcgatagtccttctgtcttttcttgttaaacccgtaaaccgaaaacttggaggcgcctcaccctccttgacggcggctgattcatcccggcttttctccctctccaccagaaggcaaaattcccaattttctactccgtgcatgaaaggcgctgaggcctgcgccgcagctctcggggaaccggggggttctgcgaaagattgtgcagggcggctctcagacggagttatgggcagggtacgccaaaaattacaagcttgcagaagcccctcgggcaaatgggaactggaaaaattccttcagaatagcgtgagaatggtggcagtgcctggacactgaatcttcgtgcgacgacccacagcagacggcgttgtgaacgctgcgtagagtggtaccccgtttctttggagagagtcaggtgacgtagaaaaacaaaagacgatcgcgcgcgggcaggacacgaatttcaggtggcaatttgttcacaggagatttgtcagctcctccagaacaaggggcatgcacgaaaaagccgaccatatgcacaggagccgtcttgtgtccgacacaggaatcagcgtcttacatccaaaagacggagtcacatcaggggccgtggagcgtccagcacaattagaggcaagtcctggagacgagttcgacggatacgaagacaagaaggaaagggggaaaacaaacagagttggagacagcgaagagcggcggccagggaaaagagagggggggtagtgagaggagatctggcgcccgtaaacgaggagcgcatactaacacaattgcattcggcccaaacaaagtatccgcttcttgacaataataatccatggatctgtcgtgcaaagatgcgattttcaacggcaaccgcctttctttgtttggggctttcctccggcttctagaatgggacagcacacaaagacaggtcaccgcaatgcgccggattcgaagccagcatggaaaagacgagcaaaatcctcatcggcgaacatcgattccggtcactcttaccgtgtttctcttagtatttttccccaatcagtcacgcagcatttcacggtgctcttggctagatcggcggtagaaaagacgagggttcatgcgtgcatgctcaaagtacaaaaaacagcgtgtcaaatcactgggcgcttctagtctccgcagagtcacctcccctgaagcttacctgcggagggttctctggtgcctacgaactactgactgactctgcgtttaatcttgctgtgtttcaccggggggagagagtcgttcttgactttggggaaggcgaagatgctaaggcatgcatgtccgtgcctcttgtttttcagaagtgatcacaaaaagtgtgagatactactccactcgcctttgttcctcttggaagttcccgcggagtttcgtcagtgctttgactcttccaacgtatcagatacatacagaacggttttcttctggtgcaccttgttttttccacagcggctcagctacacccttatggtgcgccaccgggaaactagcagcgactcgctattctacctctcaaacatacagtttatcgaacactgtacgtatcgtaacaaacctccaggcaattaacttggcattatgttaccgttcctcgtgataagcacaatcgccgaatggcagaggacgactcctcaactgtcacacgagagatattcacctcttgtcagacttttgaggcagtcctatcacgctcaacctttgcttcctggtaaatatcagagtgttgggtagcatttcccttcaaaggaaacgaggcaactcgctcctaggcttcgctgtttttctttcgtgttgctccagagcaaacaaacatggagggcagtaaactttattcttctccaaggatgcaagggacagtcgcagttcagatgcatgacaactgatccgtggcaactttcattcactgggttgctgcagctttgagacagcggaacatgctgcggcaacctccatcgactcagaatgtaacttatcacgaccaagtaacggagacagcgatattagcaaccatgtatcatgtaaggcgtcaggcttctgtttcgatatatactcgacacagaatttagtagcgagcgtagtgacagtcagggtggcaaagagcgcacggtcgttactcctttgagatttgatcgtctatctatttggaagaacgaactcgactgtcctaccggaagtagattctctacagtcccagcagtagcggttaaatgaagacgctgctcacattcatgccacatacgtaactttcgaggaaccggccccagtgaagtgccaggttgtgtcctgcaggagccttgggcttcttgacgaacgtctctacaagaagtagagcattagtagagcagaatactcgtaaaggctccacccccatactgcaaaaaggaagcctctcttcgcttgtgccccggtcgagaaacggctttgttttacaaccggttggcaatgacttgtagaggccgccgccggtgcctcagaatgaaacttggtagagtctttttcttcagcagaaagacgtcagggcaaatgtgtctaggcaccggctgcggacctaaaagttaggaaaaagctctttacaaaaacgacaatgtacctctccaatgtcgctagcctttttgtactgtggcatgttttttggaactggacagggggaaggctcgtaccgatgcgctccgcctacgattctgaaggcatacgccgtcgaactgcaaaactctgagctctatcttggctttggggtttactcctctctgttcaatatactggcgatgaatggcgtccgtgcccaacagctctgttattgccgactgagaagatctctatttacgaggacgccaaccatcctaagaagtcacgaaagccagagtatttcgttgtcggttcatgttcagcaattctccctcaggtgtacggacaccagattgatcattcttggtcgttcacggcgtcacctggtcactcttcagaaactgtgcaggttcttcttactggctatcgctcaaattcccaagtctcgaggcgcctttctctcctggtcgccctgcctgaattggtgtaacgtcttcgttgaacaaagaaacaagagtcgcgcatcttcctttaatagcatcttcctcgcgaacaccctgtgcaaaggcgcagcgaacgactgctagtcacttggcgattgacagccccggagatgaccggtgccactgttggctgtccctcttttctcaagaatctcttgacaccgtgagaaactcgattgatgactagctctttggtactttcagctatgagaacaatatcgatcacttcgatggctccagtgctcgatcttggatgtgcgcccaacccggcttgcaacagcagtcagcaacacgtgtgtctgttcgctctccgctgtccatcgttttgataggccagcaatagttaccacctgcgttttacgatggattttgaaggctacaggagcggcacttttttctcgcatgtccacaaaaagatggccacttcaaaccggtaagattcaagttgtggcaatttcctttttctggcacttcgca

SEQ ID NO: 1833 - DNA, 2388 bp, Toxoplasma gondii
  source 1..2388: mol_type = genomic DNA
acagacggacgaagcagagtgtgcgcgaataaggcacaggagagaggcgaagtcgagagcgccacacctggcgcttaataacggtccgtcttccagctttgtaatgaaccacaccttatcgtggctgatagatagcttcttaccattcttgccgcagtagataaactggccggtgtacatgccttcaacggcaaccatgcgctgcttgttcagcttgtagcggtaagcatcacggaaagagacttcagcgagaggcgcgccacggccggggtcgtggaggatgtccttcaccagacccttgatgtagccacggcgttctgcgaagtccaaaggacggagcttcgcctctcccttacgcttgtgcgtatgggcacggaaaacgcttccgcgacccttacgctgagctgtaaaccgagacgcagatcgacatgcacacagcaacgaatttcttcacggccggtctcgctttcttttgtggcactccactcgggcatcagatctacaccgacaaacacaaaaagtgctacacgaccacctactgaaagacagcaatcgtcggtacggcagcgaggtgcgcgccgccactgcctcagtacgagactcgcacaaaacaaccagttccgtactgggctggaaacaaatccggcatttcgtaggagctgttcaccgttcctcacgggcgaatgaaaacactggagaatctcgaccttcatggtcgtgtttcagactctccactatgggcaggcaatggggaacacaggtgtacgtacgccccagtctgccgagcctggggcggtgtgttccccccctttccaatccatgagtggtaagtggaaggaaagaaactccctacgtttctgcatatcagttatcagtagcagtccacgcatttgaacgttcttgtttggcatgcagtgcggcgaaggcgttggcggcaaccgtcccccccacaggcggccgtccacgggaagtaattggagataggtattcacaggaagttccgaaaaacgggaagaggcgaaccgtcactttggaggaccacagagaccgccctacgcgtgaaaatggacgccgtgtggtcgccttccggaaaaaacacgcgaaatcagcaacttacctctgatgacgcgccccattttgatttgctttttccggtgcgggagactcgagaaatacagaaaagaaaaacaccgaaaaaagcaaaagacagcttttcacccgaggtgggtgggcttcggcatctgttcagaaatggcggattttcctccgttcccgggaaaacccccacgaatttctgtgcttcttctccccacctaggcgagtggggcagaccctgttcagcacgcgctgtactgcacggggcagatgaaggcgctgccaaagccgggtctgtgccacagtgcatgcatgcagaaaatcgatcctataaggcgcaaggacacttttcttttacgcagacacacgggaggtcaagcaagaaaaacaggcggtgagcgcgagaagggcaaaccacaaatcgacgcgcgtatcgccctctgtcgcgacacgcgtttctcatcgtctgtccgaaggacttacgaggtactctaagcacctttgcctgctgttatggaacacttatggtctcgttcaaagtttctttcgtttctctcgtcgacgtgtgcgtgtagtgacggcattactacgtccgacgcatcgtaaagttccacggacgcgtctcgctcccgtggtacagcctgacgtacgcacacctaccgctagccacgagccagaggagaacgtgtgtatggatgaggaaagaagacacgctttagatcgtcgagtttctaaaatgacgtttttgccatccacttccgtaaggtatgccagcgacgctgtaagcgaccttcagctgacggcagattctcaacaaacgcgcagtgtgcttttcgcttggaaagttcgactgttggaaggacgacgctttgaccgccgaacaagcacacgtggacacggaatatggcatctttgagcgcctctattattgccatcgcggacctccgcccaacctcctatttttttccatagcgtttctccttcagaagacacacgcattcgtcagtagcggtatacgcctctgggtgcgtgaacgcgcgtatctgtaaatcgtacgtgcctgtatacatagtgccttcatgacctctcggtgtaggtatgctacacgggttttcacttgcatatatatgtttgtgtccatgtctgtatgcatgtccctttagggggactgtggtgcgtgtagcgcctgcctcctgaaacaaagcgagttcagctagcgcaaggtattcatttgcttgcgggcatgttgaggtttcgcttgactccatgagaggaacactgtcttcagcagga

SEQ ID NO: 1834 - DNA, 1688 bp, Toxoplasma gondii
  source 1..1688: mol_type = genomic DNA
agaggaaagaaacgattgagcagaggagacaagagagtaaagaagaaagaagagactgaaaaggaaaaaagaaagggaggagatgcagagcacacaagaatctgagagcaaaagagaccagagaagacaggaaaagcgtggagacgagtgcggccggagagaaggagaacggcagacgattcaagtggtttccttcttgatttcgatttcttcaagaacgctgacgatgctccagcgactttgtcacgaaacagcgattcaacagaaatcgtgcgggcacccggcagagaaagtcggagctctttcttcgtttcattcttctcaatcgaagggcctcgtttcttccatggaaactcttgttttcttgtctcgcgaaatccctgtagaaaatgccactcttcgtttctaggccctctcgcgttagcatattcacccggaaacgtaacagtttctgttttcccccagtctccttcgtcctgttttgtctccaccttgctgctctgcctcgctgcttccttcctctttttctccttcctttctgttcgtttctcttctccggtgtgtcttctgttctcgtctctttttcgtccttcctctcgcgggtcgggggccagctgacttgtttctcacgactgcgttccgtgcagttcgaatgataaggcggtgcgatgacaggacaggcgacaagtgccacagtgacaagctgaaaattcacatgaaggaaaagaaatctctcggatattcgacagccaaaagacaagctctcctgcacctttctagctaggaattccacacggtatcccctcgcttgttccctcccttttgacctcttttgtgttctctcttgatctctcgcctgctctctctcttgttttctctcctgccggtacgtaacgtgaggatggtcgacgagcaggcgaaggcgccagtcgagcggcgaggagaaaaacgaaaaaaatgcgtgacttttcgtagcacacacatgcgcggtcgcgactcgcggaaccgttcctctcttcgagcggttgttctcactgcctctcggaaaagaagcttggagaggagggggcggcggcagcgaaaaacggaacgggaggagagatgagaggacggggaaggacggctctggtcagacgaaagaaaagatgcgcaagacacgcgcgccgcagaaaacagcgtggaacgcgcgatttatgttgtaacttttcaaatagcggaaaaaggaaaaagtctgagacaaatgcggtgaggagaaattctggttttggcgacctcccttttttcgtctccgtctcctctccccttcctcccttctcccgccttcgttgctttctcccgccttcgttgctttctcccgcccttgtccccgccgcgtctcctttccttctatatatatccgatgttttcattccgcttcctccattttttcgctcttttgcttctcacttattctgatattcccctcgtgtctctgccccggaagagtctcttctgtacccttcgaatccatgtgtctcctccagtggttcgaacgcaagtgaaaacggagacgcggacaggacagacaagccgagaaaaaaagaaaaaaacaaagacaacagaaagaggtaacaaggtctgaaggattacttccaacatgcgcgagcgcctcgcctcccgggccgctcgggcgcctggtccgatcttca

SEQ ID NO: 1835 - DNA, 5032 bp, Toxoplasma gondii
  source 1..5032: mol_type = genomic DNA
gacttgagcaacgatggtttcggattcagcgtttcttcagagatcattcagcgactgtgaagcatatctcttgtgtccctccagagcctgattcaaaatctctaccatttcgtgatccccaatacaagccaactcaccccgcctgtgtcgacgatcaccctgaattgctctctgcagtcgcctatctctttttctcccgcctccccgcttccgcgccgctgatcgggcgagaagcacggcggagactgtcctgatgcatacgcctgcatgtcgtctggaaactgtatctcccttgtgtcctttgtcaagtgcctctcgtgtcacctttgcaaagtttgtctgttttttctcctttgccaaagtgtttctcctgtgtttgcttgcccagccctctctctctcgcggatacatgcaagaagtgaccgagaaaaaagcgagagagctctttggcgcagaacctctcaagaagcctctctccacagggagacggaacaccgaactgcctcgagaattccgccgctctcgagacaactgcatcgacacgcaggtcctcagaaagacgttcttcgcacaaaggagcgaaagaagagccgaagacactcgaacgatgtcgccccgcaacagccggtcctcttcgccaagatgtcaagatgtgagtcctgtcggtacacccggctcgagcctagtgcggaagatccaatgcacaaaaccgagacgtcaactcccacaagaagaaacgagatctctctctcactctgcttcgataacacacatcgggccccgcgcgaaaacgcacgacgcagcagggctgaggttgcggcgccgttgcagccgcagaactggaaaacgcgcaaagaaagtgcgtttgatggtgcatgcaatctggacacgcggaggattcacacacacgtgaaccgaagggaggagcaaagcaaaccgaaggaagccgagtcccgtgaagacatatattcacatgcgcatgtaatcacgtagctgcattgcctgtttgagactgtatgtggttttctgtctcctccacgagccctgtggcacggaccttgacagagttctggaaaaaagggaactgcgggctttgggaagaaatgggtagacaccttcaaactttcgacagtctccaagtttgctcttccccttctctatcgcatgcaaacgccgcctctcgaagcgacaggaagctcctgtttgctttccgcgtgctccataagataaaaatgggagaccaaatagagggttcgtttctcgtggttttatgcgcggtcgaaaggacaaaccggacacttgccctacaagctcctcaaatctcacacgtctgctggcagacactgaagaagcatcgattccgcgaggcttccctcctcagcgcacggggagaatctttctttggttctctgcaaggtggcgagcagaagaatcgcgttcatgtgccctgtgcgcgaggcagcgactgcacacggatgaatctggaactgtggacccgctgcttcgtcccacaccctcaggtcctggcactcgttttcgctgtacacagaccagcatctagagggaattttcgggactgaagaagagaaatggaacgaaaaccgctactgcacacgcgctgcgcagcaggggcacaaactgccacgctgagcgcggctgtgaagcgcgtggggcactcactcgtgccggaagtcagcgacgaagaaggggagacccgaggaaaccctctcaacacaaacgccgttctcgcaaaaacaatttacagaagccacaaagccccgaacaacagagcgactgcgcgtgtgcctagcgtcgagagaggtgggcgggccggtccgccggtacgtcggaaaaatgcggagtcggaaacggtgcggcagcggcgaggaagtcacgtgcactaacttcgcagtccgtgtcagaaaaaacgagaatgaaccgcagaaagctgtctgttcctgcgcgtgcaaacaacccgagactcgcgcgcgacgggtagaggctcagcctggcggaaccgtccacgaacctttgaactgcgcgcgcactcgagaggaacgcacgcagcaagggccaaaaaacaggtagcggtgtcagcctttcctgataagtgtgttgcagcgatttcaagctgaaaaaaacctcggtgaaaccccgagatctggcgcagcttgctgcaagcggtcgcggcgtgagtgtacatacacccgagaggggggggggcgcagtggcatgttgggtccgtatcgatgcgctgagcgacgaagatgcaagcagacgtgaactaaatgacgcgacttgcgcgcgaaatcgctcatcctctcacaggcacagtcgactgtcgactgttcacacacagaccgtcgaagagggcggtttctcatcgaaacagatgcaaaaggcaatggacgcaaccaaacggcttttgaggtgagggcggaacatcgggtgcccgccgcatcgcgagcgttctacaatcacagccggtaaacgttggaacgaagtttgtgttcttcctggacttgacgaacttacccaggggcagaacagcgggtttagtggaagtgccaaagtcacaacttgtcaaacggggaccacagcctactcgttggggtactggggaggaaacacgcctatttgtagacagtacgcagcagctcaggcggtacaaaaggacagaacaacacggaggagaaagcacgttcactttcagtctgtgttgttctgaaccgtaccttccacatttccacaggggcgacccgcgtactaccttgcctctcccggaggttcgttacagcctgtgtataaaccctggtgtgtgtcaacgcttttctgtatttcgtggatttcgttgttgcgtcgaagctcgtcgacgagagactgccgattggtgtgtcaacggcaagcgcacgtaagctgctccccgctcacggtttcttctccccttcacaagtgagaatcgattgcctgttcgatcgacgccatgtcgctttttcgtgtgtaacttgtgcgtcgcgttgccagctcaaatccatgatgcgagtatgtttggttagtcttagaaacgatgtaatttccatgtagactacgagaccgggtgcgctcgctttacagcagccaccatcgttctctttgggacagagcgcagtgtcagagtttccccgagcgcgggtggaggcagggtggaaggcaaacgattttagatcgattggtatacagcatcatagaccgtctccacggcacagtgcagatgccatgcagcttgatcgtatgtgttgtagtgtgccaatctccgaccgttttgagtctcctagcactggcgcagaaaggggcacggggcacgcatcacttccctgcagtgcggaagaccgagaccaagtcaacctgatgcaagatgtcgccggtgttgacgggtgctgcgttccgtcgccaactggtgggtgcaagggttacagatccgaagaagttgcctccgtagaatcgaaggagttcttggctgtgagacagctcctccagaaaagcagcagcagaaacgacgaggtcgaagagtgcccttatttccgttcctcggtacacaccactccgtgcagcaacggagacagagatatgcagcacggaattcgctcccttttcacgtgttcatagacgagaggatgttcccgttctccgctggtcattcgatcatgatacaggtagttcgctgtggaacaatggacactgcagtctgcttgcacgtggttcctcactaaaacaatctgtcccacgaaagttaaaataagtataaacaaccagaatacgttgacgaaacaaaggcttttcctttccccaaatttatcaaactgtttttgtgccccgtgctctacggcgttgtgcacacttcacgcgccatatctgtccctagaaggttgggagaatcatgtgaatgtggattgaagacatgtagaacgattatagtacaaccgaactactggagaaaaccgcagattgcggcgctacggctgcagagagagtcatactctattatttcatattccgtggaaactatcgcgaaaatgcataccgtcccttagcacatacgctccctccgacagttgaacccctttacacttcgacgactacggcaacagcgaaatctgcctcatttgtcttttcccgttcgtactcgcggcacgcatcaccaacaggtaacaaacgctctaattcaacattttaccggcattcatattgcgtggaagcggcagttctcaccagtgctggttcagtatccaagtagacccagtccgtttttctttgcatccttgatctgcatctgggtgctaatggaaagtcattcaagaggggcttttactgtcgcgcgggttcggcttcaaagtattttaagctctgtgtcagtggctttcgttagacggcagtcggttgttctaacgatgaacgacaaattcaacgatggaagccgctcagtggagacatgacacgcgcacagacaccacagatagaaccgttgttctcccaaaacacaaagagcgactgcttctgtccttttgctgttctcgagaagccacagggagcgagcctttctctactgtaaagcactcaacaaaaaggtgtggctatagcgctctgtttgagtgaacctgctgaacacgaacggtagacagtggagacgatttcctacgttaactacagctctagaatcacacggagaactcagcaagagatggacagcgccccgaagatgcaaatacaggcccaaacacatgcacaagtacggacgtcgaaaaatgcagggatacaaacttaatcacaaatatgcaggcgaggaaacgtgtgaattcaaacaagaacagcaaccattcataccatgtgacgatctgaaagcgtcactgaagaaagggaaggtgctggtggttctgtctcctactacataggaggggaattttcaggagattgctgcatctgtgcctattcgatccaatggaaaacacattaaccctacaacttgatccatgaaagcacagatttgtcgagtgta

SEQ ID NO: 1836 - DNA, 3903 bp, Toxoplasma gondii
  source 1..3903: mol_type = genomic DNA
aacatctctcgtgtgcccactgtcttctccatcctcgaatacatcagctgttgtgggggatagagacggaggacgccatacggcaccatcctcaggaccacgggatgcagaggagccggttgataatttatgagaagaatatctcaatctctgtcgagactgccgttcttcttggacgtgctgtctctttctctccagttcgaggtccctttctgcgactgcggcagaaagttgcttggccacctcttccttcattttttgtacctcggctgcaataccagaagcaagataaaacgaatggacctggactgtacaccgaggtcagttgaaagagccaaactttccatttcaatcaacaacatggaaactgtgaaagtcactttacttcgtatgttcttcctgtagacggtacaggctgcgattgtgccgcaatcaagacagtgtactccaagctcaggtcgaatgaacaacgaacaggcagcttctcatcgctaccataatacgctattaactggggtgctttcggcagttttctcaaagtgaaactcgtgccacgtgcattgacaccaaacacacaaatatgatccacagtgagtccacagcacaaatttatactatatcatgctactgcacggcctacactgtcaaggatttaagtgtcaaagcgacacccagctgccaacaggtttcagtgcagcgtatgctctgccttcttacacttgggaatgttgagctttgtcgcgaggcttcggtagaaagaggtcagcgtgtgcctcactccgggtcttatttctggaccaccatgtttccttccgaaaataagggtggcatacatgagttctcttttattgatcgggtcagctttgtcactgatgaacgaaatcagatcacccgctgcacgaatgcagcaagaacggaacaggcggcggcaaatgtgagctcgtcttcggtgggaaggaactgtcatgttaacatcgaatagctaaaagcatatggcgtgacacgccgtctttaacgtatggcctacctggttccttctcgataaatctttccatttgagcaacataacggtcaactgcaggccagaccaaaaacaccacatcacgcacaaaacagactgtgtacagctccttcgatccgacgatttgagatgttttatagcgacagtctcgcactttgatttgagaagtcttacttttcgaggggtatgcacgccatcccccgtcaaattgttcggaccctaatacatgccctgaaagcacacggagaacgcaagaaccgccattttcataacccacgcatgagacgtcggtgtctgtccgagatacaaacgctgtccaatcacggcaccaatagtgctccattggagaacgctgggtgctccgtttcagtaagctctgcgcggaatcaacgccgatataagttgatgcaccagttatttctcttgtttccctgaagtgcagtatacaagcttacgaggcccgcattgctgcgtaactccggaaagtagaagcagcagcaagttgcatagcgggaacacccgccaccaagatggcattttgttgtggctgattaacggcttggcaaggggaggttcacaaaggacaattcactgttgctgaacaaaagaagtaaaacagagccgtcggctacaccgatggaggtagtaactaaggggaaataagcaaaagtcgagtgcttcggcaggggcctcgacctgggcatcgccatcttccgccgcgtcgctgttgggaaccgactgcgcgcttgtatcgctgaatcacgtactgtttttttctgtataagaccatcaaaagcagcgcgtctcttgccgaccgttgagaaagatacagacactgcaaggagaaaaggcagctgcatcttcggtaactgtcgcgttcacatgtctcgaaactacctcggacgttgcaaaaaaatcaaactcacttgtggctacaacagcgcgggtccctcgtagcgactctatagttcagccatacagctgtagtagcagtcgcatcacagccaacccggaactctcggtgaaaaagtcgcttgggagccgcggggaacgattgagtgtcacgacgatcatttagccacgccacatgcaaacgggtattgggatatttgccccacttgacagccggagagtccgcctcggcaacggtggaacacctctgtatcccgtacggtgatggcttgaaagaaagcatttttacccgatccaagttctagtttgatactcccagaacgatggtgctgatcatatcagcaaaggaaaccgctatccggggatcatgcgctcgcaaaggccacaccgcagtaattgatacattccaagcactgaaaaacagctgcgtaagcctttcgaaggtgcatgccatcatcatcaagggggtataaataacgggagttctgtcagtaagatatttgtctactatccagttgactcacgagactggccattttgacttgtcagcgcagcagtggggacatcgaaactgcaactacaggctagctaaacagcctgggccgatggaagcagggtccggaattggctctcataccgaaacaaatacggagcgcgaatcagtgagagaaaattgtgaactatcagaaggaggaacacacgaacacaaagaaaactgctgggtactccgctaccatcggataacggccttccgtggaaaagaatcgggaaagaggggcaaggcacgggtcagaaaaaacgctaccgcaacatccaaacgacggtattagagctggcaagaattgccggctggtctcggacttctaatggcaaagaccgagaatcacgtgcagggggccaaacgcttggatgttctgctagtagctggctgcacacggtgaaacgaggagacatagaaaagctggtttactgcttcctccggttgtggacctgaagacatgaaagcgcagccattgcgaaccggacgtccgtcgaactaaatctggcggacgagataaaacagtacgacttcagcgaaacaattagggcttgttcaccacgggaggatctgtatgcgttgcggagcctatccggtcttcagcggttttctctagacaggaaaatggtgtatatgggtaacaagagctacgtatactggctgcaagccacagtgtctaacgggtagttcgcccctgcaactttagaatttctccctgtagtatgttcctgctgtttggtcgaaactgccactgacgacagctggtattacgatgcgcgttggtttctttattcgctcgctacgcgagtaaccccccgaaaagtgaacaacgcgagacctccactcaatcgtaccagcgatattatttcttgaaaccagtgggtactgaaattgaatcaacaagccacagctgatgctcggagtaaccgcctacaagagcgacagtcttcccggatggagagacagccacggtgcgggttgaggatggcacatgaccttgcggtgtcttcgtcagacgcagtggcattgcagaaatcactctttcccgttttgtttcaggtcaacattatcgaattaattgctggggcaagtcactgtgtattttacctcgagcttttcaatgctttttaaaggtggccgctgaaaatatcgtatccgcagttatcccctgtcttgtggtggggccgcgatggctttccgacggctgagcaagcgcccattccagtcgtttaaaagcatggcgggtgtcgtgcgtcgaatctagggcatgtgcttcgccagagaaaccctcctcacgaaattgtaccgtgtctttcttttctgtaccgaaagagaagtgcgttcggcgaagacgtctctcctcgtttggagcttcttaccggcttccctggtcatggggattggctctcagatcctactactcccatctgca

SEQ ID NO: 1837 - DNA, 4622 bp, Toxoplasma gondii
  source 1..4622: mol_type = genomic DNA
gtggagactgtgtgtaaccgcagagtaccatggctctcttctgcagccgtcgaatgtgccgaaactgctcttctgtgagaaggggaagcaacgcacagtaccccaagtacgggttgctaggctcgccaggatcgccacgcaaacccagcgacggtggccccaggctcacggggatgccaaacacacctgtctcgagagccttcctctcgtcaccgagagatcctggcagagacgccccccgagcattgaaactgatcgacacaccatcagacgggcctcttccttcggacgatacatcacgtttctcgacaactgaaacaccattaccagatgaaagcgaaaagcccgattcccccacactgcccggtggaggcggcggaggcggaggcacgcgcgacccttcttggccaatcccgccgacggggacgcctttcttcggcagacctggagttgcagcagctgcagaagacgtctgagacgctggatgttgccacggttccgctggtcgactcccaaactgagcatagtcttttatgcatgcgaggacttcctcgtacttggccgcctccacagcggcctcaatcatgcctgcgcccgcgcccccgaacacttcgcgcttcagaagcccaggaactgcaggtacaccagacgcgttgctgtgaaactgccgtctgtgggcacccagcagactgcacagaggctgctttcgcgagggtagcatgggcatcggattgaacttgttgtcccacgatatcctgtacacgccgaacgcgagtccggccccgtgtcccggcaagttcgaagcccgacccgaggagctctgccactgctgcacgacagtcgccgcggcactgtcggcctcggggtctacctgcctcgcgctgttgatgcgagcaaagcccgctattgaaaacgacgttcctccccccgcggaacagaggggcaccacaaaaacctcgtgatccgtgtttttactccccgtggtacgcacttgttcctgctgctcagtctctcccgtcgcggttgtgggtccggagttccctgtgccatcacgcaaggcgccttccgcaggttcccctagctctgcagcggcatcagggttcccgcttccgcctctctgcgtggcttttctcaccagcgcgacggccagattcgaggagctctcgacgaccatcatgtcgtattgtcgcatgagtttcaggttttcctgaggcaccaaatacacaaagtggacccagtctgcctcgctgcggaagctgtcactggctcctgcgctgtcgcctctgctcccgtccgctcccacgtcgtcatcagtctctctatcttcgcagacgtttcctccagaaacccggtctgctacacccgcccccgttgcactgtggctctctccggaacctagtctgctcgcgtcagacggtccctctcggcaagcgcttcgaatcaggtccgttgatctgctgccttctcctggcgccactgcactgctcgcagggtcgcctgcctgatacgcctggacctggagctgcggcaccgcgcatgcggcgccgggtgccgactcgaattccgacaagttcgcgagagcaattatttcttgcaggcgtttgttgcgaatcgcctggcgaaagggactgttgcagaaggggcagatgcgattcggaccgaggtgcgcctcgagacacgcgtggcaggcagactgcgcacagttcgtcgcgcatctgaccagcacggggttcgtcatcacgcggtgacaaaggccacagagccactcgggaggcagccgcttcagccggctgctcagcttccgctcctctgcagttttccactcctcctgagagagctccgagcgcgctttgtgcaacacactttgcccgctcccgccgtatgtgatggccacccgctgcaacacgaccttggagtacgcgtggatcatctggttctcgtccacgatctcagtgagctcctcagcctccgcagcaccgcctggcacctgactccccgccaagaaaatccgaaagtcgatcttccgaccatactcgttcgccaatccgcaacgcgccgcgaggagctgcttcacttctgccagagacagcgcgctacacgacagcgggcactgccggtacgaccccgcgtgctcgctgctcagccggtagtacagcagcatcattttttgtagggaagcgatgaaaaaaacaaggcgagtcacacagaccacgcggcaaggggcacccactcgcactcagccgcaaaaaggctacgcggtgcccgcgtcacgggtatggacacgaaacgaagtctgcagactacagccagtgaccccgcaaaaagttcacgttcccgggataacggataaccagtgaccgttctgtatataaatgcatatgcatgtatttgtatgtatgtagatgtatatgcatgcgtgaccacagatttgacaaagtccttcggcagtcactggggttcgccacagacgcgctgcatcaaggccgcctaaggcggggagactgcgttacggacaggccatcatggagcagtccgtctcacagttttcatttgactgcgtcctctcctgtgaagaggcactatcgacctctttgcggctttttgctcgcagagtgtcatgtgcagactcccaggagaaagtcaagggcgccgctggacggaactagagaaaaatcctccaggtgagcgtgtgtttcctagaaacccctacactaccgcgagtgtgccatttatctgcgacaatcaacggactgcaaactgccacaccctgggctcctcagcagacgcgatctacagcttctcatgagacaatgctaattgagtgatcgatcgcctacagatctggacgccagagagacgctgacacactcgagagtactcctttgtcaggctactcgtataattacgaatgtgaatatatacatatttatatatgcacatacatgtatgtagcctgatgtaagccccagcgtctcagcaatcctggctggtacggcggaaaccaagttccactggactttcgtaggtctccagcaagagcctcgccgctcctcgtgtgaggccaccctatctgtcgagaagcagacgaaaaacagccatttcctcctcagcctctctacggtatagaaggaatttgatcgtgagacatgaatctttccctaccagccgtggtctcggtgttccgatgtactgccactgtgaacgaactgtaaaacctgccagtgaacaaggcaaagagaggcagaaatgtggtggcaaaaaaccgtttttgtctgctggacggtacggtggaaacgaaaaacacgcgcatgcacgagggtcactgtagagtggcggcgcaacacagcaacaatgcatgggtagatgttagaagagacgctgcttccccgcgttgcaagcaatacggaagttcccctgtactcggagttggcgaaaaagaggaggcggtcaaacgaaaaatcccgatggattcacactggaaaccctcgaagccttttaccgagagttgaatctacagagccagacacgacaatgctgctctgcacttcccacttcctcccaccggctggattttcagtctcctcagtgaagcgacaaccgaaaacagaattacttttacgaatgttgacaggatggcatcaaaaacgagaggccggggcactgaccatacgccgtctgtgtaaagacgtttttccttcgtacaaaaacctttctttcgaactgagcggacaaccataagtgcaacaagactccacagaaaatatccaccttctcacttgtgtccattaaaatagcatttccagacacagccgctcattccctgcagagttccgcagaacgccatcaccacacgacggtggaaagcacgtgcccaaaaagccacggctggtggtgagaaggaactatcaaaacatcgaaatgcaacacggatgtagacagcacctgcaagacaggaaaaaagaatcatggtattttcgcgttgagtacgtcagagttgacaacgccttctttgcaaccgcgaaatcttcaaaagatcagctcagctcagagtctccgagtataagccgaccctcgcgctgctcgagttcgttcgtcaccgtgtccttttttgccaggtttctcgaagcaacgaagtcgtttctaaaagcgaactggagtacttctgcgtcggctctagcgtttccactattagtgtggcacgagtcaaattgcacacggtgtcagctgcggatctttgtcgaaaattgtgcgttggatctttccgttgcatgcgcatgtgtgcgagttgcaggcgttctggtgcgctgattgctgcggcattgtcctcgcctgtcttcgtgtgttctttgctttcgtaaaccacgcgcgctcgctgagactgcgtcttctgcacttcttccggactttctccctgatttttcgtagaacccgagccttgccgcccccatcttgaggcgtcggcgttccagctgtcgagcctgctgcactgtgttgctaccgcgctcgcgaaccgcctcacctgaccgtgaaggaacgaacttttcgcgtcgagcatcaccggctttattctgccccagctcccgtcgattcaggccgcctgatcaactcaagcccagacaaaa

SEQ ID NO: 1838 - DNA, 3120 bp, Toxoplasma gondii
  source 1..3120: mol_type = genomic DNA
tcgatggcttgggccagatgaggcatccatgcgcatgacatcattcctgcggtacaccccaaagagctcaaggaatctctgaaatcgacgtcgaggctgcaccgttctttcgacagttcttgagaggggacggatttctgttgattcattcgatttgtataaatgagcacagaattctgacccagtccacgcagtgtggcaatacacaagaaaggtacacacgacaaggaaatgcgaagtcgttctctcgcatggaaatgaccctgcttggccactgtcagattccgcaaaagtggtgtcaggtccacaagaatgcatctgggcaaataacaacttagcgtatcacgaaataagttgaggttgcgacggacgtcacggcacctctggggcacatcaatttgtatgttcccgactgcttatgaaggcatctcagactagtagcctgtcttgcctcgaggaactcccagatcagatgtggtatccttagacataaatatttcatgaggcagcaatcgctacacggtgcgcatgaagcaaaatccaactcacatatgatgaccagtgcctcgagaggtcagggacacgaaaacacacggtggtttagcaaacttgcttatgccactttttgtgagacacattctgcaattcttcgcattgggcttccacgagagatgtgctgaaggtgggttcaaaagtttcgagcggcccatgcatttgcgttcagccagcgtcgacctccgtggtgtacgtaccgtcggtgagcccagcaatgaagaccaacgcgcactcgttcccatcagcataagaagcaaagaggaggacattcgggtgtccgcggcaaggctgtgccagcacacctcgcatgcacggacctcgtccagaggcttcgccgttgaccttttcgttagaagtgtcgacgcaggacattgacttagtcagcgaggaagagaaccctgaagaagccatcgttgaaaggtggttttgtgtggttgatgtcctccaaacaactcgaacctgctaagagctagtcgattggtaaaagagcgtgggggggtttctagaggtgtcacagattcgcgttgccaaggtgggcgaaaatgtccttaataactggagacctacacagccgtcacacttccgggacgattatctccattcaagggaaatcctcgagttcgaaaaagcgacgctaggtctaaagcgcgacggcgaatgacctaaactggagcacctcagacgcacgcgcagatcctcggcacaaagagcctcctggcgcagaacatgccaccagtgggccaggccactttcatcaaagtaccttatctcgaggacgtgtactgttatctattcggttgtggactagggagcgggcccctttactcagcagcagaacgtccgcaacacggtttccggtgctgcttcgagactctgccgggtgcgaagcacgccttctttcctcaacactgggacgagcacgacgcgtttctcggtgggcaaaccaaaaatagaatcaccgaatcttctctggtctggctccagggaatgcttgtgaactttcaacgagttctacggaatcccaaacccagtctgatgggaaggaaaaaaaccgtacgccgccaacagtgaagcaggtgaaaatgacgcccgatacgggaaccgaagtggatttagtctttcttctgtggagaggaaatgggtaacgcggatacgttggtttcgtaaccgaaaaaagggacgaaatacggaaccagcccagggtcaagacggcgttgcagccgcctccgcgtactcggtgtttaaggcgaaaagagcagcactggaccctacgtgttcctcagcgagttcgtcagctccggatagattcgaacgtgtctagcaagagacaaacggcttcctcaaatcggtgtctttttcgtctgcactaaaactttattctcttcctcctagttacggaaatcgcggttttggcgtgtggaatgctgatcgctggtgctacgtactgcaatgaagcgctgtgtcggaccgtacttccgcccccgtttcggacagcggcctttagagtgaacagagactctagaaaagagctcccttctcgcgtgctctctggcatgcacaaaaggccctcagttttgcagttcacaataaaataattgccattcagtggcctttcctttgggatccggggcttcatcctgtcgttgtacgccagctaagagctcctgcccgcagagagaggctggggcgccgcgagctggacccgaactctgggtgtgcagcgtaatgggtgggcaagctaacagaagagctgccgtctcagaggaacgcatcaaaacataaagcagcacactgtttcaatggaacggggtagaagtgcgttctgagacaaaaaagctttcaatgtgatcgcacacccgcgcacggaatccgtttcgtcgcgggcgacactgaccccacaagaaccctccgtatgcagttattcttggaaacgtcagataagctcttgtttgtgagaacactcctgttcttcgcagtagaagtatggatgtttatctatttgctttccccatctagaaaagtgcgaagaggcctccatgtaactattgctgcaacgatgtttccgggcaacacgcttgtatcagtttgccgtctagaaagctgttactctcgggacgggagcagctgagacggcatcgggttacatgcgccccaaattgctgggacgtgaaagcgttatccgcctggtgagaaggtggaaaattccttgtgtgccgtaaatgttgaaatgatggtagtcaagaggtcagagtacatacatgcacatgcagagggctaaaccggaaacgggaagagtcagatgcaagattgcagagactccacgcatctaggatgcgatcgcggtgctttgggtaagggtggggggggaaggggggtcggcttaacccgagctgaataatctgacattaaacgcgtacagaggacatgcgactctgcttcgtcctggcgttacgtgtgggcctgtgcgggtaaggccacaccctttgtttaccattttctctggtttttttgggcttcgccgccatcttcagtccatttttgaacctgcgctctcttaacgggaca

SEQ ID NO: 1839 - DNA, 1034 bp, Toxoplasma gondii
  source 1..1034: mol_type = genomic DNA
gaagagcttgcaagacgcttcgcctcctctgcagctcttcgttttctctgccttctcgcctgtcgtctcgacagaacaggggaaggcgcgagggcctttgtccccatcgattttgtggagtggactgaaggcgtacgtttaggtgaaggcggcgtctcaagagacgccgagaagaagcggaagtcaccagaggcacttggcagaacaggggacctttccggttctagctcaaggggagcgacaggcggttggcccacagaaggaaaggaaacgaagagaggcgatttcctgttttctgcttgtgcgtgcagggggaaatccgctcgtttcccagtgtgagaagtcgagtacgggcgaggagctgccggagaaacagaaccgcgcagaagctgcagagaccgccacagtcgctcacccaagagtgctggggagggagacggagagaaggcgacccacgggaaagacctcagatgtctgccgtcgatctgagcacagcctctttgctgcgacgacaaagcaagacttggagtgaaatactcgtacctaggagacgggcacacacacgaccgtgaagacgaagaagacctttgactcaccagctcggttgcaatgtcttgcgcttttccgggtgtcttgtcttccagaagatcggcagagagtgaccgatcgccgcgctctgcagcataggccgggaagtccctcctcctgcgtggtccgcctcttggtgccttttctcgctctttgtccgcctctcgcgttcgctcggtcggcgtttccctgtcgccttctctcgctgcggcgggggtggacgcacggctttccacgagcgcagaagagaagaagagcggcagtcctgagaggtgggccaggacctcaagaaacgcgttgtcaacttgagatacagagagagaaagaggcacttctttcggagctccgctgtcgtcttggcaaaacgggcaggcagccatcgtgggacttctcttcagcgggaagttgcggaacgaggggctagcgggactggaacagccgacgaa

SEQ ID NO: 1840 - DNA, 1926 bp, Toxoplasma gondii
  source 1..1926: mol_type = genomic DNA
agcagccgccttccaagacgctcacgtcctcatcgtacacccaagaggcagaggaagcttgagagtcgagagagggaaacggacaggaagaggaagaagatgctgaagaaagatgacaactcgacacggatgaagaagacgaagatgaagaggacgcaagtgacgatggacgagagggcaactcttgacctcgtacactctttttttgcggcggagcttctctgtctcgaaggaaatgcggaggacgagctgatctctgcaacttaatacttccaggctttcttcgacagaaaacgtggacgggagtgacagaacgcgtgagcaggggaagagatcccatcttccgcttcacttccagcgggtgtacgtacaccacgagacccttcacgacttcagaaaagtccgcagaaaaactcagcggggggttcggcaagcatgcgcagtagcagacggacgcaggccgcaagcagccgccacagatttctcgtcctgctttctccatcgcgtccttcgccagcttccttctttctcgcgtcttctgtgccccgcactccttcttgtatctcctcctcctcccatcaatatatatatatacatatatatatatatatatatatatgtatatatatgtctatgcttatgctgtcgaacgaagtctctctctctctctctagggttgcgtataacgtggtttttgtgagcactgcaataagatgccagagacggactttcagttcaacttgctcaaaccagcgctcttcagagaatagaagagaggcgccttcctcagttctgcactgccgtagaggagcgcgtcgacgcctcacggagggaggtggagagagagaggagagatgagagaatggaagacggaagacatgagggagacggagctttcctgttctctagacggggattggagaaagaggaatttcaggaaaagagagaagaggacgggatgttttctcgaagttggcagagaagaggaggagctcatgggagacgtggagaaacgcagtgctctgcttcgaccaccccttttaaacaacagctggagagagcgcgatattcggatgcgtttctttttttatcactttttttcaatttttttcaatttttttgagattaacgagctgatttttttgacattttttcgcacatgcgaggacgaagcatcgcagaagaagctgtgcgactttgctcaccggcgccgtgctgctgcgactcagctgtcttcggcgcggacgaattttccttcttcctttccacttcctcccttttcgtctttctgtctatcattctgcttttctcctctccttctttctcggtttcttctcctccacctgatacacctgacggctcttttttttccagcggccgccctcccgaagacgagggaggctgtttcacaggacacagcagagagaggaggccgacacaggaggatcacgcgaagaaaacggagagaaacggtaaacgcaacgacgaaaggaacaagaaaacttaaaaatgtggaagacaacagggaaggaaggttcggctgtgtaggtgctgcagtttgtctcgtttttccctactctttttttattttgccctcgcgagacaacatctaggacgccaccaagacacatttgaattctcggctctgcttctacagcttttttccttcctcgtcttcaccctcgtctccttccttctcttccctcgtctgctggttctcctcacgtttcttccgcatcttcttcttccgcgtcttgttctttttctctcccgtttttcgcgcgctttccgctccattctctccgcgtgcatcccccctttctggtcccgagtctgttgtttgtcgcgcgttcttcctggcgttcttctgcctcccagtttctctctccttcgaccttcggagcgccctctgcttttttctcacca

SEQ ID NO: 1841 - DNA, 849 bp, Toxoplasma gondii
  source 1..849: mol_type = genomic DNA
tctttccttcatgttggagaaaagcggtttcctctgtccctttcgttcggataaaaaaacgtaaccgagaaacaggacacaaaagaccaagacttggacgcagagtcgcgtcgatgctttcgcgaacacaatctgacacgggtatagacgaggcgatgtataagcacaggggggaagattcgcgtttccttgttctgcacagaggctgatgaggaagcagaagtgcacatgtagggaagacagagaggcacggatgagatttaaggaagagacggggaaaaggtgcaaaaaagcaggaaatgcccacttcgaacacgtagattcaaacgagtaggtctacaagcagaaacgcaaaaaaaaaaatagaaagaaagcgcgtttcaacgaatggtacgaaagtgaatcgactctgggggctctgcttccaggtgaacaagtcaaaggggaaggtgcttgagaggaggcattctcagcagccggaggcaagaaacacaccttccgggtattcgtggtggcgagaaacgaataaagcgaaaccggaggggaacgaaaaatcaacgtcagagacggagagagtctgagaacaggcagagcccctcttgcaaagtgcacatagtccgaaggccgccgaactgtttctgtaggactctcggcgaaattagtttacagatcatttataaaagaagcgtggcacatctggcagcttcaaaacgagaaagatttgggaggcggtccaacgtttatccaggtttgctctgcgacaagtgtttcagcactggcgaagcgccgcaacgcagacggggctctttccgactcgaaattttcctttttaggcagcatcaacataca

SEQ ID NO: 1842 - DNA, 1495 bp, Toxoplasma gondii
  source 1..1495: mol_type = genomic DNA
gaaagtgcaagccaaacaaaaggcgacgccaacggcaggagtttcaacatgctgctcaggtggaacgcagctgaatggagcgaagagcgacgcgacgttcgcaggcgcaggctggctgggggtggcgactccgtctcccccggcgcaggcccccgggagttcggcagaagagcttttgctgatttaattcgagcgaaggaaggatgcgtggagaggtggagagggtgctggagaagacaggagagacgggttcgaagaaaacgtgagcgacaggcgggatttttcaccgatgcgtggaatggcgtttgtggctgcggcttgttttcccgcggtcgtttcccttgtattcatagattgtccgcctgtctgaggagaggcacaatgggtataatctttctgttcttctcgcatcagtttccctttttcagtggtgtgcgttcgcgtttccgccatttctttcgtctctcggcttgccgcgcaagcttcccttctcagtcgagccacggtgctgacaccaaagaagaaagctcaactgagagtgtgtggccgcactgttcactggacgtcctttttgagggcagggtcagtagctgaggcagttggaagagagtgaagaaaacgggacgtctttcgttgtagatctgcgcgtctgtcccgaaggaacgcactgtttcgtaacttccggactggatctggtgactcccaccgttgcactgcgcagtctctagtgcctcaaacgagtatctctcgtgtcaagacgtggagaagaatctgttggcgagtcgaacctcaacgtcaaccgaaagctcgcacctcatgtgtaaagaactttattgtccgttgctcgtcactggaggtgtgttcagttcccacgtaaaaaaaacacggcagttccacgcgaggagacgcgaactcgtgaaagcggcatatgcagcggtgccaaagaaaatgccaaggacactgaactttggaagcgacgcagtccggattcgcctaccggtgtgtgagttgacatgtgcgcatcttcacctgagagtcggttatagaactcacggccttgtgtgtcgttgcgcgcatgacacacacagcggtcggcagttgctgcaggagggcagctctctcatgctcagacggcaaacggaagcaagagggggaaactgtgcgtgggaacgggtctggtgacaacatcctcaactatatgtatctcaagacttattcaaggctgttcgtagtcaagcggatcttggcagacagagtgtcacctaggcagtagcagacataagccacgttgcgttttttcgacaatttccacagccaactgcagtcgcaagttaaaatatcgtttggcaaaagcatggaaatcgtgtgtctaggaaatggctagtggtcttaactgccacgatggaaaagggcgtttcggtgtcacgtcgcccccgtagcgcgttattcgggtttgagaggatcccggcgctatgtgtgtagtcgtaacagtaaa

SEQ ID NO: 1843 - DNA, 2253 bp, Toxoplasma gondii
  source 1..2253: mol_type = genomic DNA
gcgaagcggtgagggtatcattgacaagtgtgaggacaaaacgaaaaggagaggcaacgtgaaaagaaccacggcacttgccagagggcgggcaacagtcggtcaagtcttggtttctcgagggtagacacagcaggtactttgagtgagccgggcacacggttcttccactcatccaaaagctgagtgagttctgggaacgttggaaaggagtcctggcgaaagaccacgaaggagaagaaaatccagaaaaaacaagcacagactgcaggaacgccgttcactgccgcgagggtaaaaccaggggtgttattcgagactatgcgaaggcgagtgagacgaaccggcacagcagactctgctaaaagagaagctacacacgcgaaagacaacggcagatttcatcagctgtggagcaccgaaacgaaacacacgggacaaggcagtgagaatgatactgccaaggatcgacacgcagcagaacggagtttgacggatatgcaaaaggataatcgaagggaagaggtacgaacgggagatcctacttcacaggccttctcaaacagggggttccttaggcgtcacagagctcgcaacattgccgttgaactccgagaaaatcatcgcgggacggaacgagagatgactttaagaccgatggctaacgcgagaaggatccctgcacacgacagataaaacgaactgttagcggcgggaagacagagggaatatcgctaagggaagtcgttccgaagagtgaaacgtgatgtcgaaaaggttcgcgccgctttttcggacggggaaaggcactgcaggcgggaaatgaagcttcccctgagcatccgctgggtaaatgctgcggaaagagaaagacctcagaagtaactgagacttgcaagatttgccagcggaatcggaagtattacaagcggaagtctgcgacccgtacatacggctcagcagaagcgtctcaccgtacatgcaactctttgacacgtccagcgttttcagattttcacagtttcttcgcgcagcagctttctcagacctgcagacgcgaacctctccacaggtggcgctatttcgctgtaatttacaagacgagaacgggtcgctttctccgggcacaacgcgacggtatttcgtgcttttcggcctgcggcgttacggcaccttttttttgcgctggagcacccccctctcacacgcttttctgttgaaacttgcgcaggcgacagcggagtaggtcgtgagtaggtcgtaccctctcgcagagcgaggcttccgcgcttgccaggacgaggagcgagagacgaagcgggagctgttgcgtcagtttgcatttccctgcaggaaagcgacataacgttccgattttgccgagtctttttctcaagaaacgagtcggcgccgagacggcaccccgtttttgggtggcgctgctggggcgtgactcttggaacaccaccgcgtgaatctcctcacgttttcagccgtttgtctggacctgcacacttcctttgccttcacaaaacgaggcccttttttcgctcctcctcgcatacgagcacacaagtatgcatatgtagcaacctgtggtctgtggtttatgtggcggtacatccgctgcactccgtggctactccccaccgtggacgcactgcagagagaaaaccgttttcggtgtttttcgtcccctcttttgattctggcgaagtctttctgctttctcaaacacatcgcgttccgctcgcttgcgccttgcgtctgctctgcgacccttcccggtttgcccggcgactcgaagttaagctggtgcatgctgttcgggatctaaacaactgcagaaatttgctgtcgcgtgtctctgtttctctgctcgaaaaacgtcctgctttcttgtgatcgtggtccagtaccgagtttggtacttacatcgcatcttctgaaaactttcctccagacgccagtaccgccagtactacatccgctcgtcggccccacgaggcgtgactggctctctactcggttttcgtggataaatccatctgaaacagacgcaaaaaacatccgtctgcgaggccctctccagaacaggcaaacgaggctttcgtcttgcacttgcgtcttcgcttttcgacccttggaaacgtcaactcgtgaaacggggctgatcgccagcattcacgacttgtatctgcctgtaacgagaactggcctgcctctcacagacacccactgagagcgacaaaa

SEQ ID NO: 1844 - DNA, 1779 bp, Toxoplasma gondii
  source 1..1779: mol_type = genomic DNA
ggaaaactcgcagatacggaaggccgccaaacctgcatcacatccccggtagaagacgagcgagaaggagaaagacaaggaggagaggaagaagcagaacgagggggggacaaagcatgggccggagaactgcgaaacgaacgagactgaagagctgcgctcatgtccgggggatcgtgtagacagttttcccccattttctcgcggcatctgaacgagatctgcttgtgtgcgaagccggagaaaaaagcataggctgctgtctcctgaagcgcttgcatcgaactggataatgccaaggacatcaaagacctctccgacactgactacgttttctcctgttgctctgttctctctgtacttcccagggaggaacgcgcgacggactcgaagctgaaacggagaccctcgcgtcgaaaggagagcctggacggcgaggcgacgcaaagagggaaaaccatgagcaagaagaagggaagaggacaaagagggggaagagcgaggaagaagaaggggagaagacgaagaggaagaagcacagaggaagaagaggagggagaagacgaagaggaagaagcacagaggaagaagaggagggagaatggacactatctttggaggcgtggaggagagactgagaggcgggcgaaagagagaaagcgaatttttgatgcagcacgagaatggagaggaaaaatgagttttttgaggtgtcgagacaccgcgagagtttcaagatgcatcaacgagatgagcgagcaaatccgagaccctccgcggattctcaggaaggaggaaccctgttagctgtacaattgatcataaagcctatccaggaagaaataaatatcgtttctgtgaaagaggcttttctctctcaatccttcaatctctctgtctcgtccgccacccgcgcgctgcatctttcagtcgctgcgacagccgcagatgctcctccgcgtcctcagcgcagacgcagtttcgtcggcgttcacttgagtttgaagaaaggccatccaaaacgcgaaagaagaacgcgcctctcccggcttctctcgctgcgaatgtgtatacaagtttatataatacatgtacatatacgcagacgagagggggttgcgcgcgcgcgtctctcgcgttctcccgacgccgcgagcgctttttcgcatggcgtttttcctcgtttccccgttcggtcgctctccccgctctcctctgtgaggctttccttctcttcctcggcattcgttcacacgtcctcttcgctcttctcgagacgcgagaaattcgttcttcggcgcgagtctccgcaaactccagctctggcccgtccgtgcgacgccgcgctgtcttgcgttttgtcttccggagggtggcgagcttcgcctctccacgcaggaaaggctgcgaaagaatctggcgaaagatcttggagagaacgaagcgccggccaagaaggtgtggatgggaaaaaacgcgggagcctcgtcatacggtcatgtcaatctgacaacgtcggacgagagaaaaggcgtcgcttttgggagggcaaagaggccgctcaagaacgacgcggagagttttgccggacggccaagcgttcctcttttttcgacttcttcttctacctccgaagagctcctcctcgagtgactttccgtccctgagttcctcgcctgtcccccttttttttctctctctctctcctcggctgctcccagcctctcaggccttcacactgaggaaggagacactgggagactcctcctccttctccca

SEQ ID NO: 1845 - DNA, 3759 bp, Toxoplasma gondii
  source 1..3759: mol_type = genomic DNA
cggtcacgtggtgtgtctcgacaatttgctttacatgacgcgtgttcgacggccctgcggtgtacgtgacactccgaagaaaagtgggagccagaagaaaactctcgtcttcttggggctccttccccgcttgttcagggcttcccacttttggggtgtgtgcaagcagtccatctcgatactcaggtttacctatgtcgcgggcaaatccccaccggtatacaatatatctctttatttatctgcatgcgtttgtttgggcatgtggaaggtgttttgagggaacgaagaagagcgcagaaaggtcgcgggaggcgtttgtctgagacggtcgcgtgtccagaaccgggagagcagaatggattgtcgattttgctgctctaacatgggtggtgcggtctcttggtgtcactggaaaccagttcttgtccaagataccgaatgagcgctgtcgagaaagtgtgcttatatgagtgcctgcagagtccgaactgcaaacacacgaactggaattcacctcccggtgtgcaagggaaagcggtgtgtgatgtctgtcacgtttcccgttgaaactctccgtggagagatcggacatgttttcttcgctctttcctttctacgccgaggcagaaacccagtcgtttttccccatcacgcacttttagcacgctgttctcagattttttcgtactgcgtcgcaaacaggcgaaagtggtagtagctcagaagcgaacactccggtttcctggaattcgtatctggtggagtagtattcatttcacttgttagtccaacgtctctgtttttttcgcttcggatttctcgatctggagcgcgtaccattcgtccaaacgttcaatgtctccttacaacgtgggagcttgagaacatcgtgtggatacgatcttcgtgtacttgcagccggttttgtacgttgcagagggaggcatacggtatccagaaggaaaatcgctttcaagaaacaccaaagaagcagcgcaagaacaatgcgaacgaggaaacgttcattcgtgtagacgccagaaaacgcgcgaaaaccagaccccagagagggcgtagaagaaggcttttcctgaccatcatattaactgcactgagcaggtgtccagcgaatacacgacaaaccccacctctcgcgaccaacagcagtgtccgacttgcctcttttcgcagtttttctttttggcgtcttctcggaacactgctgtcactcgtattcacagcgaaaggaaactgctactcagaattgacgcaagcatgaaaaaagaaaacctgaggcacacagtgccgccagctagggcgagagagaagtctgacgctaagggaattcgttgcagagaaacacgataccagctctgggtgtgacatctgtagtttcggtacatctttcgactttccttttagcacctgtattttctgtacgtgtctcatgcctgtgtttgtggtacacatttcgagtttcctctcgaatacacagtagtcttgtctgtgtctaagctgttgatgactccgcagacggaacacacgtcatgcggagaatcgccaccattagaattgaagaaccgaaaaaagccaagaaaccaagacagaaggttgatgcgatccaggaaatcaagggtgcttgaaattaaacactgatactcttgggagtctcagaagccgacctcgtttcttttcaatgtagaagcgacgtacacactgcagtttttcgaggctatctttcacttttcgattctctcacgcaccactgcgtccttgaaacatccacaaaggctatgctctgttgagcactacgacagtaccgttctccacgtaataaaattgtggtagaagaggaaaaactcctacgtttacttggggggtgtttccactaaaactaacacacttgcttcccacgatctattctaggagaccgcgtgtacaacgtttccttcggtgggcactctgaaacaggagtcttttggaacggagcaaatgcaaaggtgcattgtgtaagactttctcgaaaccttttccaatctttcctctacatttcgtgaaaacaggcaaattgcgttaaaaattgcagtcagttgtggccacgccttctgcgataagcgagtgccgtagggtcagtccggtcctgtacggagaaaggatgagcgaatattctgtttaagcttttctggggagtctacaccacaagacggcccccggtttagattttgaaatgtttgttcacaggatccaacttccattcagttagtttcgtttcgaggagaaatcacacaacagaatgtgtaatggatattgcgggagccacacctaatgaccgtcttaggaggctacatggaatccagcgactgtgttacctttgttgtgtcagcttagagtctgatggatcatgaccgtctgtgcatctaagttgatactggggtatttatgttagactcgaacctcccggacaaactgttctttgttctgcgcggacgaatgtgaccacacaagatcgtcgagtacaacggtatgctcctgaatggaacggtgaaaactgtaaacacagaactcgtttcggaagttgaatgcacttttaagtggaagcagtaaaagtagcctgaagtgaacctcttaaactggagtcaaggaggcgcggccttccgacaacatatatgcctgagggctgcgtggcgccttttgtcagaaacggttgaggcgtcaggttgcctgtgttgagtcaggtttccatgacaaacctaccacgtgaggagttgtcgggtatctctctaagtctggcacaagttaccattacaacgtatccagtgtttgaggtttaaagcatctggaaagcgaactcaggacaacatcgatttccgcgtgtttagagcgtggcggagtttcctcagcacaaacgattcagactgcaagttggctttcctgcgcagttttcttctgcagcatagagtctctgccttaactctgactccactatgtagctggagtctcgctaacacacttttccgctaacttctccgttcaaacttcgatacccgagcaatcaaacagaccgtgaagcccaccacaaactgctgggatttcgcgtcaccttcgtcgtttgtagccagaggcttccaaattagcagaagcgactttgttttagatgcattcccctcccatccagagaactactgctgcaaagcgcatccgcccttttttttcaggcttctcgtcccccccgcggtacctcatgacacagccggctctttgccagcttctgtcgccacacttccgctttttacttgcagaagccttggatattttctgcgtttattccacctactaagaaggcgaaaaggaaactccttttagcagagatttttgcaacagaaagtctgcgattgggaaggacccggatgcaacttagttcccccaaatctctgtagaggttcttagccatcgtgaccctcctttttgcgaacgcgtgtcgctttctatgactctgagcgtcccgttttgtgcggtgccggtggcccccgcgggaaatggcgaacccggcctctaacagtttcgctttttcagtgaaggactttgtgcctttctgagttcaactgaaatgagcaaattcgatcctccgcagttgccgctgctgttccctttccagcttccactcggggcgtcttccggtgctcagctgactgtcgctgggcgcagagtgtgtcgagtgggttttttctcgccttctttctggggcgtttccaacga

SEQ ID NO: 1846 - DNA, 1412 bp, Toxoplasma gondii
  source 1..1412: mol_type = genomic DNA
catatgcctcactcgtgctggtcgttttggtagttccgttgctgtcctcagagcctaaggacggtttagtttatcattctcacaaggcaggccatatatgctgcccatagggcatgttctgctgcaccgcagctcctggtgtttgtttgacgtctttttgctcaaagaacacagtagcgccagaaacacatatccgcaatgctcgagcgaattcgaaaaatatgcatttggtgggtttgcctcatgctttagtgtctagtcatggggagaagataccactctgcaggtggtcatcagaagacaactctctccaggggccgggtttatctgccttacctggccagttggggacagtaacattacgggcgcgtgcatagcagcatatccggatatcggtgatatctggaagcgcggattggtttggaccgaggtggagaattcgcagggcagttagttacctgtctgaaaacaggagacgttgatgttagggcacctcgtggcgagaaggtgtacgatgtcggactttgtgccgagggggcagtcacgcggctctcctctgcagggaaatgcccggcagctcttgtatatacggccgaaacgccacgtatgtgcctcatcactcaccaattaatctgcacgcgcacattctgtcgttcacgggagcctggacgggtgccttcagttcgaaaacggcacgagattcgcaaactctgcaatcttaccattacagtcgaaccgaattcgagaaagcgcacagaaggattagcaggcatatctttggcagtggctgtgttccttgtcagagtgccatccgctgcccgagtcaggagcggatgccatgtttggtcggaagcagtctggtgtgtttgtccaacagtagctgcgaaagggaaaaggatacctaaaatcataaatgacttcattttgactcgggagccgttctactgcaccgatcgtttcgtcacatcagttttgactgaagtaagacgagaaccacggctttctgatatacaatgtcgtgctgtacagacagcgcagcaacgttgaagcatgcaaccagccctccgatgttctcgggcatgcggttgctagaaggagttgcggacgaacaggcagcagtcaaagtattaatcgttgtgtatctgtttgactttttgatcagatcaagtgtgttgtagagactttcaatttcagtgaaaataaatggcgggactcaaacggaaaaccgacaaagcagtggaggcatgcagatacccttttttttgaacaatcgctggcttttcattttcagcgttttctttatagcatggctgcattagccattgcattctctttaaatagacgttgttcaccttttatgtgtagttaatttcccgtcgtctccttcgaacgcaggtgtttggggcgtaaca

SEQ ID NO: 1847 - DNA, 2972 bp, Toxoplasma gondii
  source 1..2972: mol_type = genomic DNA
aacttcttgcgcccttcgagaatcttgtagtaccgctgcgaatacggcgccccggtgtacggattgatgccttcggggacttctccgttcgggtacagaggcgccgcggcgacggacgccgcgccgaccgttccaggcaaggccgcctgcgcaggaggcaggccacccggaaacgcgaagccgggggctcggtccgagaagcctgacgcctgaggcagcggtcccgaggagaagttcgatggcttggcctctgtgccatctgagaaacctgtccggcgccgtgcagagtcgccacgaggatcttcgtcgaaacccgtcgcgcccaaggcccgcttggagcccaagtccaacttgggcgcgggaccgtccatctcgagaggggggaaagagagaggagagagggagatataaaaaaaaactgaaggaagaagagaaggagagaagcgacgacacagagagacggcgaagaagacaccaacaggtagaggaagagacgagaagatacttgaggggaaaaaaaggacaggctaatggaacggaagaagagaagaacaggcggaagcaaaagtggatgtgagacaagagtggcggaagagagaggagctgcgtggacgaaagatctaaaagtgagggggtccgcggtaaagaaaaaagagaaactgagaacaagaatgcggagaaccggacggaggctcggagggaaggagccagagaaggaaagcgttgaaaagaaatcgcacgaaaactgggagtggcgaagaggaacacgaaacctgatgtttgtcttcgaaactccgagccaagtgcaagggaaacgcaaaggaacacctgggagagaggaggccgaaaaaacttttttagaaaggtggaaaaccgaaggaagaaaatgacgaagccagatcacgatttcaaccgccggatgccccacgtaatgaaggaagcagtttgtaggggaatgatgggactggtcaaatccccaagagacgcaagacacgtgtatcaggaaacgatagtacgtttgagttgtgcgggagattcgacaaggaaaccgcgttttcaggcggccgacaaaacggagaggaagatcgacgcagagaactggactcggagacgaagtgcgctggcatcaattacagagaagaaacgcgatgctgttgtgatttattcgtttccacgcattgctggagtgtatttcgacactcgagagtgcgtccccgagaaacgacgggagacactgacacgagcgctgcgcatgcgccaatctccatccccgaccctcgcgggtctaacagaagggcgatctagccagcttcagagtttccttcttgttcgagcatatttcctcgttttcccccccaattgttgcagtgtcgaaaggaaaagtcaactgaaaagaggaagtggggcagccctacggcatttctccgcgagaggaagcgccaacgtgcaggagacacgccggagggatcagacgcgtcgccgtcggttcctaccgccttttaaagctcctttctggccagaaagaaactctcaaactcttttcactacccgggcaaagacggcactttgcgcgcggagagcggccagcgggagagggggcgttttcctcgtttgatgcatgcaacgccctgcagcggcgcccggagcctggggcgcgagagcgcctcgccgtgacccgtgaccactgagaaaaaaaggagagacaccattcgacttctttcacatacaattaaacgtttctttgaagcagcacagctgcatgaagccgtcgagaacgctcgaacgacgccgaaaaaaggagggaaggaagggagaagcagtttccgacgtgtgaggaaagggtaggaacggggttcaggcaaagaaagacacaaaaggagggctggagaggcttggctttctacggaggggcgaattcgtgctgtggcatacgacacgttccaggtcgcatcccgacctgccgacttgaaatctgagagtcgaaagccggtaaacgagcttcctgagttacagtttcttaaaggggcgacgaaaaagcgagagtttgagatggatagtggccacctgtccctaaaggcggcaacagagccttgcctcagcagaaaaattgcaactatcgagttgtctctcatgtgctgcggtctgcttcattttgtatctacactcaaccgaggtggacatacaccttaatggtcgaagcgcccggcgctgtgtagcggactcaacgatcgctgctgggaaaagtcaaggttgccggattctgccctcagcggagcctgtagccgacagattatcaggcgccagtgtgacgtttcgatcaggcatttgaggaggaatcgcaaatcgacacttttggtggagatgtggaccctttacgcggcgcctgccgaagacacgcgactgtcttggtggaatcgcaagcgcacacactcccgggaccctgtgagaggcaaggcttctgcgcgcaagtccactttcggaaagtcgttgacacacacgcgtttcctctcgtttgcattttccgcggaaacgagaagaactggatttcgattgccagtgtgttgagagtagaaagaaccggaaatcgacacgtttaacaacctccattcttccaatatatttgcctgtcaatttctgggaggtcaactagcccctgtgctcgcacactgctgtctctcgccctcccgtctcctcgcccgcggcacttgaggtgtacgtacaccccacttttttcggcgtttgcggtcgtgactgtttaactcctattttccgaccgtcgttcctccagcattcccgatttttctcctaagtctcctttttttctactcgtaaaggcgcgccggcgacaaacgagcaacttccgcacactctcgcgctttcgacgcactgtctcgtccggcgacgcctcgtccaaagctgcaagtgacgcgcgacttcctccgtctcagtctgttccatccctctacccacaa

SEQ ID NO: 1848 - DNA, 1990 bp, Toxoplasma gondii
  source 1..1990: mol_type = genomic DNA
aaatgatgaggcggaaggtgaacaggtctcagaaaattgacgtgttctgtgctgccttgagctgccatagtgtcggtgagccagtgcttgaatctcacaagatgtgttagggatattacgtgaacagatcgccggtcgtgaaagttccatgttggcacagccaggccggccacccagttccgttatacagttgcttcgtcagttgtggtgcgacacatcctggtggaggtccaattccctgcgaatgttgtgccgaagaagctttatcccttctggatttcaattttagaatctgttcacccttgattctcctgaagctccatgaacttgaacactgtggccgtttttcactgataaatgagttgtgcacatcccttcccgaaggaactgtgtggagtatcgaggcaaagctcgcaatccttgtttttagagaaagcaatgaatttgaggggctctgctgagtaccaacggacatctaatcggtcttttttcacgacacggtgtcactctgttgtgtggactacagcggcctggataatacagcactgctctgatacagaccccgaaaaacacatcgttggccataagctagctcctcctgtgcctgaaaactgatacgcttgtacggcgggttcgtcacaaggatagtgagcaccttgagagtcatcactttcttcgaaccttctacttgcgcacaaaagcatgatgttgctcatcgctgccaccgctgctgagccaccaggtcatggattggcttcaccttctgtagcaggcgttccgtagtctcaatgcctgacctagtagtcctgctaaagtagccggcacgctaaaacgagctaggtggtcctgtagggttcgagggtgtctagttagaacgtttaaacatccatgtgcgatctcaagaacggaatttagggagtccttcttggcttttgttcggcacactcaccaggcataatattatggcgtctccactttcctaaaaagcacatggcacacggtgcgagtcgacccagtaaccttcgttgctgcgcacgcatctcttcatgtaaagaagtggaagtgcctaaaccaatacgtcatgcatacagggctgagacactaaaatgagcaacgctttgttagactgtgcgtcactttagacgcatcaccggacgccttccctgttcactgtccctgtacttgcagaggatggcccgcaaaagccgatcaggaatatctgcctttcacaacagttcattcaggacaatgtggacctgtgaatgactctgcttttccggatttttctccgccgtgcatgcactaccgttctttttttgcatgcgcgtccaccgttcaagtgtcttgcgtcgtccgcggtatcctcctttaagcagacttccgacaccgcttctccacaagtttgaacgaatgtgttagcacaaatgccccctgagtgtgtcacatgtttccttgcggtcgggtcaacctctaagtggcgacatgagacctggaactcccagcgacacacactcgagtaccaatgcagttgaaccgcccagcttggcggcatctgttcgtctgctccaatcataaagtgttttctttcagagtggaatcatgcaaactcaagcgtaaggagtttcgtagtctccagcgagtggacgcttgcggactttcgactctgacgtgcgtgtcttgttgcgactctctgtgaagtgaccgcgtaacctccgggagggcctcagcacagctttttcgcctaccctagagaaagctgttgttgatgtgcgtcaagttctgctgcagatcctttgagactaagcgcgcgctgcgtgttttgacgtggttttttgcccggtcaattgtgttggttgtttcccttactttgtcgtttcttcccgaactcccgcggttctcgtatttttcggatgtcatctgccacgcgcctgacgctgcgccagcgccactcgtgtccccacgttggacctcctcatttctggcgaaaaaa

SEQ ID NO: 1849 - DNA, 3022 bp, Toxoplasma gondii
  source 1..3022: mol_type = genomic DNA
gactctgaacttgggttcgtctgtctcgttcctccttccgttatctcccgagcagctggtcgctgcggaggaagcggccaaggcggctggggaggcggaaggctcgggtgccaggcccagaaggaagtcctcgtcatcgtcgaaggagagaggcgcgagtcgggaggaggcgcgttcaggctcagaagcgtctgactgcgatccttcttctcccgaggaaggcgccttggcggcgatcccggtggtcttgtcggggacgcaccccgcgcgcgaggagacagaaacagacgagtgaggagactcagacggagaggaacgaagcggctgcggaccaaaggaggcgtcatcatctgaatcctcttcggctgtacaagaggtgggtcgacggaggcaccatttctccgctctgacaggcgaagaagtcgcagccgacgcgagcggctggggtccgaagtcctcatctgaatcctcgtcgctcggcgtctcggcggcgattcttcctcctttagttagagaggaaggaaatccagagtgacgggctcttcgaagagccgacggaccgaaggaagcgtcggcgtcgctctcgcggtcctctccagcttctccttcgtcgcccgctgagtcttcctcttccacaatgcgctgaacatgcgctgctcttgctcgcgctgcatcctcctcccgccgctccgcccgagttttgaactgacggcccacacggatggcgcgcatttcctcttcgtcactcgacatgttttcgaaaacgcggtggaaacagacgggaagacgggggtgcaggctagacggtgccctgcacgagggaaacgcagcacgtagacagcccacagaaactaggaacagaaagctggagcactttcttcgagaaacagacagaaaaccagcatagaccacgtgtaaagaaaacagaccgcaaccctggcggttcgaaaccgatgagacactaaaccgcgtcagccaaaacaatagctgcagactcgaccgcagacgggtttcaacgaagactttttcgcctccaggggcggacgaaaaacactccctatccgactgagttgtcacgttgcgggtccctcgaccctcgggagaaagagagatcacaccgcaaacggaaaacgcaggaacataaaaggggatgaagcaacgcgagaacgggtcctgactgtactgtctgcgaagaggaaagcgcacgtgacaacgaggaaattccttacagacacaagtgaaggctttaactttttgggctgtccagaacaggtcccgaaaatcgactgaacagcgctgtggcgggttgtttgcatgcacgcgtgagaagaggtctttggcacagcgcgtccagactatccgcgctcatcgattcttgggtctctcgcgacgcgaacaggtcctcttccagcagtcgcagccgctcacaggatgctgcaaacaccagcaggtcgtttcactagttcggtttacgcattagcgctacgtttctgcgcaggcgacctgacagtcgcccagaaaacgaaggagattgcacgggcgtccgttgttgatccttcgaacctttgcagacaacacgaaacgccgggagaaactgagacaacgcagcagatgaagacatcactcgcacagagacgatgctggagctgtcgccgttttaaccgatgcagaggcagcatgcatcatcaaacttaacgcagctgcggaactattccagtccttcggtgaacaagagaaatgttcatttgtggcaactcttgctctcttgagaaccggaggggggactcttgctattcctgttctgccaatgaatcacgcttgagagactgctagaggagaccttgcttcttgtccttctggcccacaatgtgctacacaaagtctcgagctgagacgaggtgccaatgtacaagtgccgtccaagtctttgaactggccgtaccggtgcaccgctgcaaacgttcgaggatggacagtcccttaccgtgtacctatataaaaggaaatggttttctcggacctagatgggcatgcgagtgaacttcaggcacgaaaattgtcatgatggtgacggccgctatccgttgactacatctgaaacagtggcgtcggcatgggttcattcatgtagttagcaaagaggggaaaaccagttctcgtgttgtcaataccaagtttcaacggattctgcggggcctcgtgacatcgccaactgtcgcaggtgatgcgaaccgtacccggggaaacacttacaacgttgtcgagcatagatgcttatatttggattttcctggaaaatgtcgtgggtgtgtattggtcagcacatatagagaagctggcgatctcgagcaagcttttttcttggtgttacagactcccgttcgtcattaccacgcccacgtttaaaatggaagctgcggaaacaaggcccccttcagaatattagaaagtcgatctctgtgtcctccgactcacgcagggttcagtggcttgcctgagcgcgaatggacaacgacacgcaaaaactgtacagctgaaatgctctgctcgttggtttttgtgaaaagcctgtagggtcttagctgttgttgcatgtggtaaccaaggctcgcgctgaagtgaacgtgctttccccacgtttgtctctttcaaactgagactttccaaaaaattcaaaaaccagcaccatgttcaagtgtgcaaacatccatgaacactacgttgacagcaggtcatcagcaccgaacttgccgtacaggcgtgctggtcgggttcatatttcctgcaaacgaccctttcttgggtgagaagaatcatgcgttcgtattatcgtaaactgcatcttttagagacacattcacagaagtctttagttgcttttcaggaacgttgagtgacctcccgttctctgtcgcagacaggggctcttgaatgcaacggtacaagctctaaggctgtaatcagaggacttcttggcgtaaactgaaaggagcccagaaagtacaaaacgtacaaggattaa

SEQ ID NO: 1850 - DNA, 3664 bp, Toxoplasma gondii
  source 1..3664: mol_type = genomic DNA
gtctgctgtgcctgtctttgccaagactgcctggcgagaaaggaagccccagcgacccgtgtcctgttccgtcgcgctcgcgcccctgagtcccccgaatgaaccggtggaaactaaatctcttggggaatccgcaggcgaagcagagcgaggaagccccgaacgcgtcgacctgtgacgacgcagaaacgaagctgccgccgcatcgcgtgccttcgctgtcacgctcggcgacggatggatggcctgcaggcaaggagtccacaagagtgggggagcgcgagaggtggagagagtgcgacacagcgcgctggggtaggccaacgcacttccgcttttctcgcgtgttttgccggcaccaggttcgcttgcacgcaagggacgttttttccacgcctccgcctctgctgcattcgtccacacttctccggcatgcttcgcagacgacgaccctgcggacgcaagcacgaagccgactccgagagccgcgcaccaaactggggagcaaaatcgcagacggggcgcgaaaaaagaagacccacacgacagggagacagacaagaaagccatgcaacttctgcgtaccagaaggtccaacggggtgagctgctcgaggggatctttcctcggctgggcagtgggaggaagcgagaactctgcaacgtcaatgtcggaggcggaagcgactttcatgcggcggttgtcctggacgaacctgggaaggcaaaaaaatgcacgcgttgcatggacacagtgtctcgccagcttcaccgaaagagtcggcactccatcgacaacaaagcacaaacatgcagagaccatacttcgacgaccttccccaaacaagacagcgtgtgcggactctgcatgcagtgtacagacagaaacaccgaggaccccaagactgacaaccagtcccagctgaactccagcacagacacacacacatatctgaactcaaatgcccatatctatatatatatatatatatatatggatcccagatttcgcaaggaactgagtgtttgtcagtggagtcgatatctgcgggacacacctggatgtgaagcctgtagggaggtcgcgaagttgcaaatgtctggtcagagaaggcgtgagcaattttgggtctttcttcgcctggcgtcgagctgcaggcgagagaggctggatcctgtctctctttttcagttcctgtgtccagcactgacgaagcaactgccgacaccgtccagcggagggcggcattgaagagacgggagaaagaactagcaaacacgcatcttttcggggaagagggtgccccaggaaaacacccgacaaaagaaactgcacgccctgttcccttcgcgcttcttaggttccctagacatggctgggtatgattcagccattcagaggagctgaagttccacaaaagaaccacgggcgcaacgaatcgctttcccgaacggaaacgaacgacgcaaatgagaaccgcgcatgccttgcgcttagctccgcggcagcactcctcgtagaggcagaacgcggtggaatacgcgacaaaggcttcggagttgtgcgctatctctcgcgaaagacagagagaaaaaaatggtgaacatgaggaactctcatgtcgacctcgattcgtctcccgtgttcagcgggcctgttgtccgccctcgaaagccacagggacactgcggagttcaaaccatggcaagctgttcgctgaaatgcagtttaaaacgaaacgaccctctttccgaaaacgtgcatttccacgtgtttttttattttgctgcggtgtttctgcataatcgcggggatcggaaaaagccacttgttcaataagccatcctgcgcaaagtcgggagagtccgtccggcgccaatttcgtcgaggtgcagtcaactatttcaaaaagagcatgagacccaaagacacagaccttacaaagtgattcaagaactctgtatacacataaatgctacgtaggagcgtgtctgtctgtattccatgcgcgagtctcgatgcaccagttgactacgagtagctacactcgctgccttcctggtcaactcgcgacgtctcacgggagggtcttttccgttgaatccttaaaaaaggcatgtgaatacgtaaatctctccgcatggataagtgtgtatttgtctgaagggaaggggaagagacagccaactcaatctcttgcttatgacaaacttcggaaatgctgcagttcgaggcttagtgcggggccccacggcacggactacagtctcgagtatgccttgcatccgttaggctcgtactgccgtgtagagaagtgaaagggaactccaaggttgctttctttgggtcttctgcatgaagcgtcgtctcctttttgcgcacgtcacctcgggaggtccccgatgaactctagagaaatccgcgaaacaagagtcaaaactgtgagcgctctcaagaccccccccccggaacaaaagacggcccaaatggcttccgtagaagcaaatacacaaataagtgtgagcagaatcgcgtttgtaatcgtgcactttacatctattccttgataattcgtatcgcgtgctggagtaagaggaaacttcggcagtttcacgtgcgcacgcactccgcgcatggggtggctgtccgtccggttctcctttgtttggtgaagaactctgcagagattttgcatcgagctgtgaatagttggaagacggcgacgccctatgcgaagaacatagactagtcttgtcccgtggaggaagagttgcctctttatagcttcctggaaagaatgccagcgacgtagcttaatgaaaacgaagtgtctctgcacagatccagcgctctccctgcagacacttaccaaagtcgaacttgacgacgactctctaactgcaaccctctgagccacgaagaagagcctaactttatcaaaaagacgaacgcagtgctgccctcttatcgcacacagagagcgtggcgtcttgccagttgccaactggcaaatgaggtgttcttcttaccccacctgctcaagaagaggcggaggtagacagcgtatacgaggcaaactcgctgttacacatcgcggagaaggctgggcgtcacgctcagagttgcttcagctggtaaaagttcatcttgtctctacatgtgaaatcggtgcgcgtgttgagctctcgccgtcgcacgcgacaacgaacgtgcttcggaaatttccaatacctggcttcttcctttctctttcgtctccccgcaggcaagtcactctgtgacggcgggggcttatcgtgagcgaccaagaagggtcccgtgggtctgccggagtcgcaagcaggggaagaaaacctgccaacggctgacagagcagatcaaaggaacgggaaagagaggagggagaaaaacaccgtgacggaagggaagacgttagtggaaacaaactcgggaaaaccagagggcctctgtaggcttctctataggttcctcggcatcagcgacgctggttcgtggaattctctggggaaccttctctgagaaggtttagaagaaagcaaaacagttgttctatgctcttgcgggttaggagtgttggcgtgcgtctctctctcgttgcttccctctctctctctcctgagggaagaacttcggtttccaagaa

SEQ ID NO: 1851 - DNA, 2393 bp, Toxoplasma gondii
  source 1..2393: mol_type = genomic DNA
ttccatagctgggcgcagtgccaagttcgtttcttggttgtctttaactgctttcctctaacgcgcggacgcctttctttcctttttcactttaacactgtgtatcatgaaccagagtactgtacttttgtacgcacagaatacatctagctgcgcgtgttcgttggggagaggtcgaaaaattgcttgtcaagccatgccaattactaccttgaagaattcacacgtcattcgcttacggcaagaagcccggggtcgatcccatttgaaatgaaaactacaaggttacgcgtgtccttcgcttgacagactcactccccgatctaggctccacgtcttctgtgtgtactggctcttttcttgctgagttgtgaacagcgccctgctccggcgattccccgcattaattctttgagtcctcgtaaataactagcgtaaacagtgtcccctgactaaaggaagtctgctatcgaccacgtagaagaaagcgggaactttttccggggaacggacacgtccagcgaagcgcctcgtagcaacttgcttctcgctgcacttaccaacggtttctgatcctgtctgtgtatcggcaagaccaagggaatgcccggtttactgacagggaatttggacaccactgttaatggctttgctgggatcacactctggattatgataatgagaaaaatcagtgttgcgcgcaagcgtgtgcgtccgtcaccccgcacaattgccgccctgttaccagggacgccagaagcttactagattgcaacgtcgcttaaacttgttgcttccccatttgcttctagaaaagactcctttcaagactaggtgttgtggaaagggagctggattccatttgaaggaaggcttggcccatgacatttttatggttccttttacacgctcatgctaccaatcatgccacctagttgccggcgacatggaacgttctctggaattacctttcagtgccgggagcgaattcgagtctactgcaggcaaatccatcggagggactgctgatgccacaactgaacaaatacgttacgggtccctatgcgacacaccggtcctgtcttgcggccagactgtgccctgttggcctcatgaaattttcttatcgcggcttactgttttgtctgggtggccacattttctctgtcgcttttcagaagcacccaccacacctggacaggcattcgcgacactgtcacataagctcagtgccactctgggacgcaggcaatgaagcttcgcaaagtttttgcctgttcacttttcgtacacagcggcaagcgtaaacatagataattcgaatgaaatgaagccaaaggtcaccataagacgacagacgctgcacaagttcacattccccgactcacccagtggttaggtcaccacgacttcgtcaccgcgctcacctgcctgctactcttattgaagagtactcacgagaaagcttttgttggtgtaattgtgtgcatttaccgccaacctcattagctatctacatgctggtgaacaggacacataatatgtcaccaggtgtagaatgccaatcataccgagtgaatactgaaccttgagtgcccgttactcgatgcaagatggggatgtctaagacacccttgcgcttactaacaattccttcttccagattcgaatgaagttcgtctttaaatgtgtccaatatcccatcgcgtagcaggtttcgactgtcgaccgccttccctagacaagtgtgccaatatgcctctctccaacgacacaacaactaacggcggcatgcgtccgttccgcctgcttgatttaaccaggctatatttctgcttctgcgggtgtgtgtcagggtcagatcatctcaatcaacaagaatcatcttaaacggtatctcgtgggtctcgtcaactcttcatcgttgcatgcacaaggaaaatcagaacagaaccttcattcgcctggagtaacaaacggcggcctattttcgaggcttgctgggggatgttgccgtcagaaaaggaacctggaacgcgcttctctccattctttgacgagacattccttcggttgtggaggacttgaattcaaactcgaagagagcagttcggctgccggggccgaagaagctgaacttgaaagagaaaagttgccccgctgccgtgctaggactctctgcatgtaagactcggtgggtccgcgtgtacgttttgaaggaacgaatcgaccttttcgcaaggagataaacttccttctttacttagtatcttcgtttcgttttcgtggatttggaatcgtagacgacgggctcgttcggattcggttgtgtgcagaatgttcttgtcttgccagacacgcctggctgcagttcgcttcttctgtcgacagaa

SEQ ID NO: 1852 - DNA, 2389 bp, Toxoplasma gondii
  source 1..2389: mol_type = genomic DNA
agatcgtcttcgtgttttctgtcaagaattcgggaaggcctttcgctttttcacagagcgcatgaaggctgttaaatgagcggatttgcctcgctcgtgtgcggcgagtctttgcttttgaacgtggaaagacccggaaaagaggaatttcactcacacatgctgcggcagtttctgccacggcttgttctgccaacgaaccgactcaaagtgtacacttttcaaacaacgagcttgcagttgttcactcgtgtatacgcttgaaccgaatgcatgtgtatgtatatgcatgcacatatacaatatgtgtgtgtcacgacccttcaatgtattcaggcgtgctttgaaaacgggttcccactgtcgttctccagtgattctcagtctttgtcggcaaactcttccttcagatctgacgctggtcttcggcgatttccacctgttttccctggaatccctgtggttcgctcgaaacctcagttccgcttatattcagagagccccctggacacacaggtcgtgggcggaccacctcacttcaaggtgcgcccgttgggagttgctatgtggaggggttctctagaatctctccaattttagaaaaatatccttttcaaaacaaagcagagctacggattcggggaacgcttttctcttcctgtgtcggctgtcgaccagaagcactggttttctggagttgatcgccttcccgccggagacgaacagaacaagtctgaaatttaaaacgagaaacgcgcatttttacgttcaacgattaggccgtggatttcgaacatcagcacgcttgagacacttctccaacttcagagaggactacaaactggagggagattctcactttcttcgacactttcgaggcacggtgaccatttcaacctttagagaccgcaggtagttttacacgaatcgtaacgggacacagtcttgaatgtatgttcgtgctggattccaggggctgacacagcgccgtcaagcaagctgaagcgcggacagtcgagtgcagtttggagcattgattttcgcagtgtttcgtttccgtggatcgattgataaagtgtggcttacagatgctgtagtgcctttaaaagcagtgcacagcatagctgtggctccgtgtacctgcaaagggatctgcattgttccaagggtcgacactgcacatgatgtcgacgcgactatctccgctctaattgagatttctcgccctctgtagacttttctcctcgcgctaatttgttgacgctgtcgcatcaatgctaaaggggtgtacgtgtgcgcagaggagcagaaatccttgttcggttcgaagtcctacaacatgtcgaaacggatctctcgtagtccccggtagggcaggtccacacccgcacccgtctgtcggtcgcgaggattgccacgttttccccacatatccacagttacaaagtcctgcgcatgttcgacgtgttctctggttttgtacacccggacttttcccccccttttgttttgttggaggaacccgtggaaatcatggactcgtcagtaaaaactggggtttcttcgtacgaagaacgaccagcgctttttccccattgaatacatccttctcatcacatgtgcctcctcgtccaggactttgttttgcggcgagagttgataggcaggccctcaaattgctcgacaaggtggcagccgtcatgctaactgttcagtctgtttggcggaacctccggatagcctcgcgcactacaagaaggccgcgcgaaatcagaatagcttcttccttttcttttggctggcatcctcgtcaaatagattcggactgcttcaagaaatgccagaaaacaacagcgtcctttctgttcttcgctgttctagctgttccactccaagtcattggggcgcgtgcgtgtcttcgggtctcggttgtgacctcgtcgctgtcttgcggcttgggaaccctttccagagtcacctcatgcggttacactccaatgcttttcttttcgaaagcgcgaggattctcggagggtacagacgcgagaggattgcgaaagcgtgtttccatctgttcatttaacgccgtctggtttcgtttcacacgagcggtgctagcgtcgcgccgccgtccacttccttgctcaacttttcccttccactctcgtcttgctatgacgcgtgagattccctgtcgccctcgcagatatttccttctcaaccacagtagtttccggtttcaacgcttcttcttcggaagcggaaactgtcgcatcgagtgcgctagctagtttgcggtgcgccttgccgcaagagttcgggacttctccctgtgtctctcgcgaaaaaaccctgggttccaaacagagcaatttcgggaaatttttta

SEQ ID NO: 1853 - DNA, 2862 bp, Toxoplasma gondii
  source 1..2862: mol_type = genomic DNA
cctgagaacggtttttcgcgattcgaggctttctgtgaacagagagcctgtctcccatcttcgtctccatctgcgagagccgcggcggagaaggtgggggaacaggagacggccagcggttctggctgcggcaggccaatctcagttcgctctctcgcgggtcccccgatgttgtcgcctagcgtctccgcatcagaccgaccgacctccgcgctgggctgtcgggagtccttcatgcgcgaagttcggaaacaagaaggcgctccttcagctccttgctgggagacagacactacatgagcagaagaacgggggagcgaagaagacgcgagcgaacaaggagatggaggcgacagacgggggagagaggagctcggaggagaaagcggagacggaggtgaaggaggaggagaaggatggagagagcaagcagcacccctaagaggtgaaggagaggggagaggttggttttcgagctgcggagagctgaggcgagagagaggcgaattcatggaagaaaattctccggaagccggcgccgtcggagcgagtcgctctccgagcggcgaactgtttcgggccattgcttggcagagaagaaaaccaaagacacctgaagaacacaggggtctcgtcttatttttatcgagctgtaaaacgaggcacaactgctctgaagatgtccccgagagaaacaaccagccacgatcggcgcatgtccacagttgcttccgtcccccgacctctgcctgcaattcttcttcctctctgttcagacgagtctcccaggactcctttgcgggtaagttgtgagcgagacgctgcgtgcatgccgcgcagcctctgtagcaggagactgtgaggaggtcctgcaagcgggagagcgtctgttggacagaagcagtggaggctgagtggggaagaaaccgagaaggagaccgacaagggaagcaggttttccgctctactcctggtatcggaggacaccccactcttggcggctcgcagagtgggcaagagaggctgaagaggaaccgcgtggaggcttcttcgtcctctcttccggcggcctcagaggcagcgaaagcagatccactgcggaaggcggcgactcgaaggggagacacatgagagagagaatgtccgagtaggcgcgagaaagctctggttttgtgtggctggaagccgatgagaccgaagaaaactttcagacagcaagctgacgaggcgcggaagtgcaggggaaaacgggattggaggcgaaaacgagcggtggtggggaaaattatcagggaaaatcggaaagacgtcgagaccgctgcgcgcgatacgaaatgttttccaaaagttgtgtgcgaaaaactgttgtcacctacgcgcgcgcgtcctaggtccgaaaaaaggttcgatggttagatgaacggctacacagacggtagacatgaaaaggagacggcgactcagaagcaaatgacgactctggtcgagtgacgacagccatccatttttcgtcttttttaaaaatacccttactcgggaagaaagtttggacatccggtgtgaaggcggcgggtcacctcacgattcaaggaataccttcaggaaatccaacaggtaaacagcagcactaaacaggtccacatctgtggaacaccctttccatttctcttgcatgagttcgatcgttaaatgcggtttggtggccgtaacggagagaccatcgcttttttcgccaggctagttgaacgacgatgtggacggcaaacgcgcgaaaaggggcccaagtgttatcaaaggaaaaaaacaaaaacaggtagtttcttcaaggcttcgcgcctcttgttgtgccttcgggaaattaatgagctcaggacaaagtggctgtttctgccttgctatgctgtcgtgtgtctcgtcgtgttttcctcttccttcttgctttgttgcgcgcggggacccagctgcaatgaggccagactcacgaatgcttcaggtcttgctctgacgccttttttctgttggaaatcttcagtgggctcacggcctggatgacaaaggcctcttcaagagaaacgtggttgttcagacggcgtgagtttgcttttcgccagttttaaggtgcaggtgtgcagcaagaaggaacgcgcggctttgccctcccgccgtttttttccgccgataaggcggactgtgcatccttgcaaatgaggcgggcatgtgcagtccagctgtcgcgcacatccaacgcgaaaggcgtgtcggcgcatgtgctggggtgaagcgaaagagcgggagacacagcaaggttcgaaagaatagaacaaaaatctttgcaggcaggttcctagagcgttgagagaggggcgcctgagattcttttccagacgctgtctgcgccgatcgggaattctcggggataagggatagacgagacaaaagagccggttgtttctgaactgtgttgtgaggataattgtcggatctctgcctcaaaaagagaccgtttcgtagttcagtttctgagtttgcgcgttcgccactgtcgcccgtccgttctgcgcgaacgtttcagcgcgttcgccgcagccgttcccccgctccccatcgttcagtccacccgccatctgtttcctcgccccgcgtttcttttccgtaaacattccctttgctgtccatttccgcctttctttccgcgccccggaacgaatccacgaactccctctctctcacggttctccgcgtggcagctcccgccacacactcgggcgtccatacacctggtggctcgtgtcagtttcccagtcacgcgagctgtcacttctattgttctgtgattttcacgagtctgcctcagagacaaaa

SEQ ID NO: 1854 - DNA, 4652 bp, Toxoplasma gondii
  source 1..4652: mol_type = genomic DNA
gagaacagggagacagctgtggagcacaggacgaagagacagggattaccggatgtttccttgtcaccgcgtgtctgctcaccggatgtaacgggtgaaagtgccactgcagctcgctgtgtttacagtgcacgatctgcgttgagtgatgaggaaaaggtgacaggggaagttgaaagccacagaaagggagaatcctcggtatctgataaatcggcgtcggaaggactcgcagcgagtgaaacgagagaccccagagaggcaagacaacgcgatttgaaatgcgaacgagacacgctttgggggaaagaggagaagggtagagtcgccagtttgacagagagggtcggtgaaaacgatctcgctcaacacacaatgagaggtggcctcgcggaccgggggaaaatagaactcgataactgcgctgccgaagacgaccaaaaagcgttgatgaaaaggctgctgttgatacgaaactcggtttcgtttgatgccttcgctcctcctctcagacatcgacggcgggagctgccttcgaatgtcactgcggcggacctgcacggttctgggggggcgacgggggaaacggagcttttcagcgagcatgaaaagcctggaaatgaagcggaatgcggcgacggaggcggcatccccgagagagaattgcggaaaaaagagctaacccaggaagacgtcgcgaaggaacgcttgagaggagcagaacctgcactcctgggcgggaaaaagtatccaaacatctggagaattgcgattttttcgcctgagtgaggtgcagggacactcgagcctgccatcgaacgaggcagagcaggaacatttgaactttttattgtacgagtttttgcgcggctcaagaagtgtacccgcacagatcttcacattcgacagcaaaaccagtggacacacatcttgtacggaacctggaaatcggcaggcaattgcggctgcgagtcgcgtggcaagaaactgcgacgtttcacaggcgacgaatcgtgacaacagaacagggtggtggaatctccaggaagcggcttggagtcatactcactatttcacgtactacagtgtgtctatttagtcttcatttcagtcatacgagcgtgaacacacaatatcaccgaatataagggtagaagagctaatcagtgtttgctagtaaaaaaattccatgaggttcgccttcatacagttggagggcgatgagctttctactgcatatagaggctgtagtagactgactgcggattgaccattgaagcagcaacctgattaaggtcagcttgcagaagacggacaaatgtcgcattcactcctgagtggaaatagattcagatgacagggaaggcatttcaacgacacaaacgcaaggtattcttgcttctagaaagctccggaggaacattcgatcgcttgtcgtcggattcaatgccacggcatccttctgagagcagcggatgattggcacccgagtgctgggcaagaactgctcaaaatgacttttttccgtgtgggcatttcagtcagcgttgcggacgcgttgtccgctgccaaacagctttccagacactctttgcagcacgttcgattcagttgtccggagaccttctttaaagtactttcactgagtaaaagtctttgctcgcagcaaacggaaactgatctttggcttcgatggttgccatggcggtgaagcctgaaaggatgatgctgtcaattgagatgtccccttgtcgatgcaaaaagtgagacagacctaggtcgacaggcccgagtctggatggtgccgtagcgtgttccccgtctggcatatgttagcatatgctagcattaaacagtttcctgtgtaaagcttgaatgtaaaatcttcaacacgccttttacctacgacaatacaaacgtggcaaaccaccaggccaacccgtaaaaacacatccaccggcatgtagtgcacggtaattctttttgaggattggattcatggtgacacctccacgtacagttgccacactactaccgggtttttcactgtacttcatagtccggacgtcgatccgcaccggacctacgaatcataatgagggcaaaagctgaactcacgctgctaccgtccagtgacaactgtcccgaaacctactggacgcaagaagtgaattcaaaactccgtacggtggactcctcgggagacgcacgtgttcatggccagacttccgtattcgtgagactgggaacacaagaatccaacaactaactagaaacaaaacagtggataccggagtgtcaccattgtgtctgacaccacggcccgttggggtatggtcaacgctaacagaagagttcagaaactccacagacctcaagagccactacacttcaatgtgctttataaaccagtggagctgaaaaactgtaaaaagcctttttgaaaacgatcccaataataattccgccgccgggacttgaacccgggtcgcgcgggtgagagccgcgtatcctaaccacctagactacagcggatgttttctgattggtggattaccaccagagaggcacgaacacgcacctaacaaacacagctgcgcctggtacacaagtcactcaataatctgcaagagccttttgaagaaaaagtatccgtgtttcatataatgtagaaattgaacccgggtcacgcgggtgagagccgcgtatcctaactacctatactacagcggatggattgacccatccacttttcctcaaacgatttacgttctcatccagtttatccatattttccacagtgaccaattctgaaatcgcttgcgttttctctcaagttccatttcctccacagcagctccattatcggacaaaagtggtccaggagccaccgaagcatcgatagccctgcagcaacagaaaggacggaaaacaatgatgtgatcccatctctggatgctgtacacggttccgcgcacagaaatcgccatattcgcaatgcctatggccaaacattcggttcgggaatacatgaggcacacgaatccactggcggcttgcgtaccgaatatgggacacacagggggcacctgcagccatgacagactgaggatcaccaaccggtgaggcccatacaagtattcctgagatgcgaagagagaatggagctgatccgcattggacttgacataatgcaaaaatgatagtgaggggaacgcaacaacggaaacaaacgtatattccgccgccgggacttgaacccgggtcgcgcgggtgagagccgcgtatcctaaccacctagactacagcggatatcgactctcaggcattgccctgccgagctatattttgaccctgcggacagtgcttccctgtacctcctaaggtcgatgtgttttcgtccaagaatgcggcaagtcgatagtgtacctcagccgcttttacagctctgctgctaaactctgttcgattagaccctcagttctccgcctattcgccggtggactatgtcgcaagaacaccggaatcctgttcgcagaaagagaaagcggcgtctgtctgtttaatcttccctgcatcatggaagtgaaaagtatcggcgcggagatgttttcctcctgtatgaagtggactaagactcccgaactgatcatatagaagacgacagtgctggagagacgctcctgctcgaataggaactcctgtttcttaaaacggcaaagagtaaccttcagcgagacagtgtttatcgaaagaagttagcgtttcggctgcatccgagaaatccacgttgcagttgtgcttgacatgacctcatccttccgtgtgcatgcagccctctgacaggcagctccgtatcagtctcggagttgaacattaccgccgatagcgacgctctgtggagactttcgcctgtcactgtcttgccttccatttttgcttcaccttctcaggcaaagttgtgagcaaaagcagctgaagcacgggtgggttttcaccgtttcgtttgccgtgccgtcggcgcatgcgcttgggcacccagcgtggtcgcagatgagaaagatacgacatcggtcacctgtttctctgcacccttcttcgagactcggagcgtttaaaaaaaaggtcgagatatgcatctgcttccagttgacaagtctcccttgaagccgcgcggagcccgccgtcaaaagacaggttccgtgagcatcctcctgttggttttcccgatggtggagaactctgaagcatcctaaaatgcgagatccacatgaatcggtgattttctcacttttataccttgaagttatcggggtaggcaattgggatacgtagctgtttcagattctggttgccggctcgctgtgcgggtctgtgacgtggtcaccacactgtggcagcggcgccgaactttctgtcgtttttctctctttcgattgattcttttccactgttgccacctcccggaacttttttcccagtctgtctcgcagaattcgggagaaaacacggaagcgctcccgggtacgcgcagcccaagcagctgcatggcaggcagaaaggacggacgaaacggaggcggggtccgttaagtctgttcgtgtgtttgcctgtccgtctgtcgcgtctttttcaagagatttccggaacca

SEQ ID NO: 1855 - DNA, 1985 bp, Toxoplasma gondii
  source 1..1985: mol_type = genomic DNA
accatgcacagctgactgaggctccttttgtagtagcttgagactgggcggaggaaaggcacatcggacggttgcctgtagcgccgctgagcatgagttgcctcggacgcagtgagtgacaagttatttgcttgaacgtaccgctgccttgattccttccatacgtttctcttgtctctactgcagttgtttttgcgggcgagtcaccatgggcgtttgctttcggggaaaaggggcgccagagcggcgagggaaaaggaactctgcctcccgaagttagcctactgataacatgatgtcttgtttgtcacttccaatatgtaagtggaagaggacagcaacacaacccacaggcgcagagttcaggaagtttctagtgagcaggttacactaggatgaagtgctgaaacgacgcgtaggaacacaggcgcatacgggctcacttgtacgcgatggagcagtccctgaagccagcccctggtacgcagtaaaggcatcgcggttgtccttccttcaggcaacgaccacactgcttctgtgcttccgggcgtattcgcgttactgtgacttgaaagtatctctatcagcacgctagtggagtactgaacaggagagcgagtgttgcgagtgttctggatgagccgctacgccaatagctcgaatagcccaaggacacggcggctactgccgtcagtggccgcttgcacagagagactgaaagtgaccgttccgtcagacaagtggctctcgtttgtaaccacacggggaacgcctgaccggagtaattttggcgttccctctgtgacgcgccagtgcgtcaagccgagccttactatgtttctattgaactgcaacagatagctcttcaaagatttgggtcctcacttccggttttttgacgtgcatattcgtatcgctgtcacacgaaacccgtcccaaaagtcgacccttcttcctaagtgaacgtgaatgtggcggacgacggtgctatcgctggagacgtggctgtgaaaacgcagtcgagcagcgccgacctgcaagtcgattttcaggggtgatcgatattttttttctagcgtttaggcatcccccacgatgttcaacggcgaaatggaacggcagctatctagtcaggaagctgtgtagtatcatgccaacagtgtcgagtagggtctgggtcaatgagtatagagacctcgagcgagatacaagtgtgatagcctctacaatatgatatatgggtaatcgtagaggccgaactgttcttggtgccgttataatgctatactgacatggctcctgccgatcacgtaatacttttgcattgattcccagcaagcctaacggaataactgtgatgcctcacaccccaccaccggcatctcagttcgcgacgcactaatcgaaccagcggttcttctcccaccgtctgagcgaggggacgaagagggagctaaggactcagcactctttgagcgaagaacaaccgctattgtccacagcaggcgaagccggaaaagcgtttctgattccatgtgtagctgccctacaggggatttcctgcacgcaggcaagatgctctcagcaatgctgcttgtcgcaatcgcgcacatgtatgctgtcgaggggtagagacgcagctgctcgacccgcagaactactattggcattgctgtcgatcctgcgttctttcagttcgtgcagagaacgaaatgttattggtcttggtctttactcaatacaccgtcgctggggggtcacactggcatacagacgcatcaatgcgtcttccacggatgcaaaatcttctgaagcattcagggtcttcattgcttgtttacgcccccacctcaactgttcatggttacgcttcggcaaacacagcctccgtttgcctttgccgcagcctgtgtctgttgatagcggctcttgaacgatccccagtaccgcacgtgctgctttgtcgagcaagaccactcccacaa

SEQ ID NO: 1856 - DNA, 3907 bp, Toxoplasma gondii
  source 1..3907: mol_type = genomic DNA
catgtgcaggaacatgccagaccggaaggagatgaagatagagaaagaataggtgtgggagaggagcgaatcgtgctctcacctctagccgaacagccgggagctgtttggacgcatagagcaaaagagaaggaacccgaagacagcaaggcggaagtggctgaagccattcgccaggcacaaattgatgccatgaaacgaaatggggtcacacgcaaacttcccacaagctggctccgaagagcttgaaaacatgcatgtagggaactgtcggtagagcgcgctggttttcctcagtcgtgtcagaagaataccggatccgctggcacccctttgtctggcggtgagtctatggaacaaacccacgaataaaactcttgttcaccatctgattcgatagagacagacagaaaaagaacgtgccttgacaggcagaaccaaccgtgctgggctcggacgaaaaatccgcatccacacattcacggaatgaagaaaacaaagaggcgactcctctgatagcagagagaggaactcaccaaggcggtcgtgtctctctcactggaaggaaggaaaagctgaaaactacccgcaacagtgtcttattactggagcttgaccttgtgtcccgtattgttagagcatgtcacatatgcttgcaactccattcgttttatttcaactgttttacgtgccgtctagacgtcaaggtgaagttttgtcttgagttatcaactcgccactgtgagtctactcttccactcgttttccattagccctgtgctccgcagctactgtgtgcacgagtgatgaaaataattccttgcaaagcggttttttacatggcctgaacagtgggatctcgcgcagaacattctcactcttattgatgcctcagaaaaaatgaaggtaggaaagacgagggagaagttgcgcagccagatgcaaggaaaagagaatgaagatcggagcatcgggctgcggagacactcatgtatgattcgacacttgcagcaaactgagaacaacgagacactgtaggattcgcaggacagtgaattcacgttttcgaccaagaggaaggtgcgatgataaaaaatgatggcacaaacagctgtcgcaagagaaacggggattttttttcgttccctggtcgcaccggcagtatctattcaaattcgtcggctcaggtagaccagctgatataagcgacagagaagcacacaggcaggcacaaacgaagtgaacagtttgctttgaatacatgcttaaataactggattgctgttgtactccacagtgttgtagaaggaaacctgttcctgacacttcgctcgtttgtcaactccatttcgacttctctattgtatctgtgcggctgtcgtctatgcggagtttcaagaggaaaaagatgtagaagtcaggtttagggcttaatgtgccgcattgtcagcgctatttcgatccttttgtctgtgggtaaacgtaaattttccagtttgtacttgttggagcttttcggttgcttttcgctgttactcttagcctctacaacttttgtgtgttactttttcccagtgtaatcgaagggaactgcgccgacgagcagacctccctcaacactattcccgcgttttcgcacatgtggcataggatgacatctggaagttgtgtggtaccagtcgcgaaaaaagatcagtacctgctcagacaggagtattttcttgatcagagatgaacaactgagagtgatttgtgacatgtaaaggctttgtgacatcggtgtctgcgcgtaggtagaccgtgtctctaggcgagatatagtcctacaatagttggcagatttgtttcaggttttgagtacgcggatcctcagcagaggaagaaaggtggaggttgtgttcagcctcgtcctacaagaagcgggtccttttagaacacgggcaccggaaagcagcagaggtaaggaaactttaccatgttccttaggccggattgtcggtggagaggcattgcttgcttgtggagtactctggagattctccttgtagcacacggaagaaaagttacgcggtaaagaatacaaaactgctccagtcaacagcagccttactttctttctgtgaccatcgttgtggagagggccccgcccccaggtggccgtgcggcaacttttactttggtttttttcccctgaactctaactatttgatgcattgaactattcggtgaagcactcccgagaaacgcagtcgagtttcagcccactgcaagaatttcccactttctctgttcctcaatttgcgtcttctgcttccgggactcgcattaccccggcaaacgacccttgctctccctttccgttgcacacgccttttccggtttttcttgcctctaccattgtgctgcccctgtggccatattcttgccaaaaaaggcatcagcgcatcggcaatggaccgaggaagcactgtttcgcctccacttcagccgttaaaaaatacaggcataaaaacaatgtgcacaagtgactccggagcaggaagcaacagcttctaggttgcgagagctccgttcagcgtcattcgtccccgtcaggctcgtccggaccgcgcgtcccgttgcacacgaggaattctgcttctgagtctcactgtcgaccctcgaaaaacgtgactgcgaccggccgcttccccgatttcagacaagtaacttcatcgtatgcacttttgctgtggttcgcctgtagaattacatcgcttttcgcagagacttcctccgtagcggacgcacagtgaacggcctgcccgcagctttcccctgctgtcttccgagacgaagcaatctgtcttcggatatataggcactgtttcgactgtcttcaagtctctgaagctcgcttccacaacgacttgcgttcttccgaggcgtctgaaggagacgaccaacgcacgccgtcaaacggttgtcagtgcaactttgagataccacaggcacaacgtgagtatttcagtgccgcttcctgcgtttccccgcggttttcgtagccttccatgtgacacaatcttccaatttttgaggcgatttccatctgcggcccgttctcaggttccccacgtagcaacgcagagcccacaagggtatccggagcatgttgttcgatgtgacaacaccgcttccaggccggggcggaccctatcaattgcaacaagtttacccccaactctgttcagattttctcctgtctgcggcgttcacatttgcccggataggcagttatgctcgtcatggtgggacgcaggctgtgaaggcaatcctgcgctttttccagagtcgccgtgcactaccgtccaggtttcatgttaagagctgtgtagacaaggcactcatgcctggggttgactcgggatgcgtagcgcagagatgcctctcgttcaaagtgttgttcggtgccactccttgtctttgggtaaaggtagacaacaaggatgcgtttgcctccgccgggtgacggactcacgaggggccatcgaaacccgctggtcactctgcagtctaaacaaatccgaggtgtgtataactgccttttgtgtagcgtgcaaaatttgccccctgcctccactgtggagataatgcgcgtgcgtggaatggtttgtgcctcgcgggtgagctgcgtcgacagagacgcagcgtggggtgcttttgaattgctgaaacgctggtggccaaacctcgagacaggagagatcgaggagcgggtagacagggttctcgagtttttgcggcggcacgcagaacgtgtaggttgcttgtgttttacatcacatcgggagcatgtttttgtgtgaacggttgcatgttttgttttccaggaccattccattccgacttctcgcacgttgctccacca

SEQ ID NO: 1857 - DNA, 1856 bp, Toxoplasma gondii
  source 1..1856: mol_type = genomic DNA
ctgagtgttaatttctactttgccgtttttctggactttgtctgccgctgcttgtttcttccttggtatctcttttctggcggcatccttttttcagtgacagaggaacagggaatataggatcctagattctcgcgtgttttcgcacgaagagatcatctgccggatgcacctttcggggcattgagaggggaggcaagcgggtgcgtctcgtgccacaagaacgccctttctctccagaaacgtagattcacatttgctcaaaaggatgttgatcagcttccgtcaattccactgagtctacagaaccgtcaggacaatttattctctacggtggtctcagtttgactagcaagtctttttggcgtaggccactcaaatatctctgatttagggataaagccagcacggccggcagagatccttgccacaactactttagttcagttgagtcacgcgcattcggattaatacagagtgacacatacaagactggacaagagaggtcaacgcgagtgattgtcggaagcgaggtctcagataaacgggatcgtaggactgtgtgtcaagttgatacttccgaggaaaactcttcgtctcttcagagaaacatttcatcaattgtaaaacagccacgagcgatacacagtccactcgaagattttgcttttattgagagtttgccaagcaatggcaattgtgcttggacggcaacactagaacaacatgcgctgcggatcgacagcttttggtcgcttccacaaattcatgaagcccaactaaagctacaaatgagtccggtggacagaatgacttggcagtgtagtcctgatttctcacaggcatgcgtgtccgccaagttgtcaaatttgctgttgtcagtttcccgttaccgcaatgcgcaagactaccacgaatgcctcggtttacccgctcaacgattcacagcgctgccgacaatttttgaatagatttccagcgagttcggtcctgcaagtatgtttgtttcttggcaatgccacaacgacggcgcctccccctttacttattgcagggcatctgaacaggtgcagagtttcaatcagagagaggggacggctggacttggagttacctctactggcaacaaatagaaataaatctcatacaggacataccgcagccatgtgagtcatcaagccttgctagtccttggtctgccgtgagctggtgtctttccaaatagtggtacctctaagaacatacgattatctgtatcactacgtcacatttccctctctgggttcccgaatctctgatttacagaactctaaaagcaacagggcttgtttgactcatggacaccggctccatcaaaaacactcgtagtcgctgagcatgccgcgttttagttttgacccatcgtgtggcctcgagtgaatttcggcggttttgagcagcatcgagcgtttttgagctcgaccaaaaatcgaaaacgtttgacttttcttgtggtttggcgtacacgtgacagcctggacactgagtgccaacgccgcgtattttttgctggcctttcttcacgtttttgacattttttcttgacaagaccaacatggaatacgaacaagggttgagcagcgcggtagtccagggacgtccgtttccctcctcagtgccggcaacgggtccgtcgccgcctcccaaactgtcgagagaggcgcaacacgcttggcaatccggacaagatattggggaaaaaacctcgcaagagattcgctaccagatagaacggaatgaatctgcagagtccctgtcgggggaagagggtttgagggagaaggaaacgcgtgaggcagctcgcagcgttttcaaaa

SEQ ID NO: 1858 - DNA, 2626 bp, Toxoplasma gondii
  source 1..2626: mol_type = genomic DNA
aatgacgcccatgcctctgttgagtcagcgcgcgaatgacacaaagtcgcacagccgcgtaaacctctgaaaccgtgagacaacgcgccgtcacacggcgagggaacgccgaggaaacggagagagccgagctgctctttgcgaagctgctgtccagacaccgcgagctctcggagcgcagcctctcacactcaacacaggcagaggcacctgtgtctacgcggtggagatgcgctcctcgctttctgcactttgaggcgagatgaagacacccacccaccatcaacgaaatgccgaataaacagacaacatatacacatatatatctatatatatatatatatatacaaaggtgcatagaagtatatgtacggatgtacgtatgcgacgagaggagggtgagaagcgagcaggaggaaggtgtgagttgtccgcctggacagagcttctgagtttctgtttgagaggcgaatcgactttatgctcctcaccccattaaggcgcagccgatagccatgcggtgctcggtgactgtgtccatcggagaagaaacaatgggcgttcggacatgcaagttccgtgtgatgcgcgtcgacaggtccacatcgttgactccaaaatcaatgtgacctaaaaacaaagacaatcgacactgtccaatacacacaaaatgtgcatctctctctctccagaccaccgtctccatctatatgcatatatctacatatatacatatatacacatatatctatatctatatctatatctatctatctatatatgtgtgtatgtatgtgagaataggactctctctaaatgcgtttatatggcacacgggcaactctgcgagatctggggtgaagcgacggcggtaggaaaacggatcaccgtctcgacgttccgctcgtcatcgtgattctgttggcagactgcggcgcgtctactacgggcgccgtctccgagcggcgtctgtcggtgctgaggcgtcttggttgtggtgagagcggcaacgaaaagtcgcggacgggcaagccaggaagcaaggatttttgcgaggcagagaaagtccactcttgagggcgagcagacgcgcgccgcgtggagatgtcgttacgtaccgggcatgagaatcaggtcatcgtacgtgaacccgaagaccgtggtgttgaagattttctccgcatcccatccgtcagccattttgtttcgctggggaagtgcaacggaagaagaaatataaaaaggggaactggaaagacacccacaagccaaacagccacgaggcaaaaacgacgcaggcgcgctgctcgagtgtgaagtcgcgcggtctcggtcgagaggaggaggcagagtttcgcgggcgcccagctgtaagaaagcgattgaagagtcccgacctcacggaggtggatcttctctgaagggaacggcggaaagtgaggacgggggagaaatgagcgaagacgcagctcacggttcgtcgacgctcgatgagaaaagcagccgagagacgcagacctgcgggaggagagagtttcagcgtcaaaacgcccgcgcgcgggtgcacagcaggaggaagtctcgtgcctctctcggctcaagaaacgcgaggcatcacgcgctcggcgaagcgaacatacacacatacacacctcggcggggagttgttctgtcgcaagaaacgcgcagaatcgaaaaaaaaacgaaaaaaaacgaaaaaaaacgaaaaaagctgcgggggaacttgaccgcatcgtcgagtccgcggcgcggggccctctcgatgccatctgagcttgtctgctgaaaacgtaccccacggaaacaggccaagcaagagagaggaggagttcactttattagcagcttccgttgcatgcactttgagcgcctgtctcgcgcagttcgccgcgacgcttgtcgcagggtgacgcggtgaacacagttgtgtgggaagcgaccttcttctcgtcctcttttctctctgtgaaacgcctcgttttctctcttcttccctgcctctccgcgactgtatctcagcccccgctccgacggcctctttgcgtctcccgccaggcttgcggcggccttgaccgagcaaagcactacgcgaaaaggcgcttcgcctctccctgtcttctctttcttcttttctctgcaaaagctccccgttttcccccgaaaagtctcctccttggcgctgtcctctttcctgaggaggcagaagccagtctgccaacccgacgccttcttccacgccagtcttccgcgtcttgctctcgagggccagcatccctctttctctctggacgcaagctctcttttcgaacgtttcccgccctggacgcctttacgcttccggagacagacttcttctctctctgcgactgcgttcgccgatccttctttcctcccctccaaactctctttctccttcgacggccggagaagcagagactccagcctccaccgctgttggtacgtctctcctcctccgcctccgcctcctccgcgtcctcaggctcggctgcttctcggcctctcccctccgtctggtcccgtccacgacgtagctgtcgcttctccggccgagtcgccgctgcgcagaacgcgcgagaaaccgcaa

SEQ ID NO: 1859 - DNA, 2354 bp, Toxoplasma gondii
  source 1..2354: mol_type = genomic DNA
gagtcccacgcaggcttcgtgtaggtaaatggagttatttttgtagacaaatgtgtcagtctggtgtgggtagagcgcagagcgaaggctgaaactgtacattctttatgctagccgctggcgtccgcgctggcattccggtgctcctctttgcgcgacgagagccgacaaacagaggttcaagctgactgttttctccgaataaaccgacaattaaagagacattctcagtattcttttctgtcacccatttcctccgaaattgcgagctcggattccttatgttgtacgctcacctttcatttgcagacacaaagccttcagagttctcgtctctcgtctgtgtttcttggcgtcgtgtcccccgctttttctcccgttcttgtcttttgaaagacttcctttgtgtctgcgtctcaccccaccactacgttatgtctgcctcacccggagcacgaagccacgcgtcgtcctttccaatagggaacagcagggaccacacttacaccacagatggccacacattcgcacgcgacacattatgttctacacgaaaaagcaaaaccagcgcgtcttctccgtcaaaggaacttgcagtcacgtccatgcctaactgtgcgcatcgaccgacatcaacacatctggaacaacacctgcacacctttatttatacatgtttgtgttttcctcactgcagtcgacacctgtatgcaggcacatattagagaaagacaacttccaagagaggcggaatcggtcgccatttcgcgtttgcggatagtcagggaccctaagacctgcaacgcaagcgtcgacgaacacctgccaggtgtacagacaccctcacaaactgcttgccttaccagagtttaaaggcagacgttgggagtctgtttccacgcggggccgttcaactgcacagacgccgaccattgctgccgagctacttgtccgatgacagtctcacactagacgagctcgagtcctgcctgagttgcgccaatgaaactgtggagaagcttcccggaaatggtacggacccgaaaccgagactgcgcgtagttccagctgcggaacgccacttttgggtgcaagacaaccgccgctgaaaaacgaagaagcgcgcgagacaccctgcagtcaccgtgccgaggcctgggccctctcgtccgactgaggaacctggattagcgatgtgcatgcattttgccaagtccctagtgcagccccgaaggcggaatgaggaaatgatgcaacgtggcagatttgacgcatggtgttgtacgaaaagcagacggattcagtttgcatgtttcaagaaagacatctgcggagaaccgcgccagaaagtttcgcggctattcgctaacaacgggctttccagtcggcgcgcatgcagacgacccaaatcgcggaaagcacaacggctgagcttttgtttctctggtccgtccatgtttttgccacggtgccacagtaagggcgtagaacagcctctttctttagggcaacaaaatccgcgagggtagtcctcacgcgaaagttaagccgagttgcagcggagtttcctctggaccggcacggcgagtcacgccgtacaacggacggtgacgagaaactcggcttcaggacacaacctcatggacactttgtgcacatctgctaacgcaaataggtacgtcctttccactacaaccataaataggaaggtatgtgggtcctctatccacacggaccgatgtgggcttcctccttgtcttgtgcgttgccctaaagttaccgcgtcgccgctgttctgtggtgctgagagggaagcagaaagcgatggattctcttcctcgatggacggcttcgtcggcattcacatctcccaggccggttcgggactacaggagaggcagcaggcaccacaactgaggcgaaagacagcagacttttctcttacatctgcgtctggcctgccttcatcgttctcccttccccttttctttctctctttctctgtttttctgattgtctgctgcatctatggtctcctcagatgtcgccttctactacctctaagttttcgtctgcaccgttttcttctcacatcacacggttaacggaaaatcgcaggccacttgaagaggatttctcgtttcctggccagcccgcgccggccgccgctcaaatgaaaagtctcagagcctcagagagcgcgcggcgggttcctcgcagccagaacgttcctgctttctgtgcttcttcgcacgaaaatccctctcagataacgggcaggctctgcctgtgacgcaacttcgccacgcgtcccttctgcccgcggtcttgttcgcctctccctctcgccatca

SEQ ID NO: 1860 - DNA, 4628 bp, Toxoplasma gondii
  source 1..4628: mol_type = genomic DNA
gaaaatcttccgcctctcgaaagtccactagagccgccactctcatctctgctcagtcccccgctcgctgccacgtctccagtgacgtttttttcctgaccgtggggcagagtcgagcttgaagaatctacggcatccaggcgtgtctgtcctgattcccccggaccctttcggtcctcgagggggggtccggtctcctctttgttgccagcgaatgcaggaccactgcctgtcgcttctcgagatgacggaccgacctccacatccgatccggcgagtggtgaaccgttgtttgtctcggaagtttcctctccctgctgccaaaaaattccttcctggtcccgccccagatcgctggacgaaatcacagagccatgggtctgtgcaggagtcccgctcgtgtcaaccgcagagacaccagccgcagcactgccgttcttcgtgctcagcagtgcatcctttggaagattcgtgccatccaaggaaactccatcggctccctctgaaggaccaggcgtaccaatggatgacggaatatctctggaactttcgttctgtacacgctctcgcgccccctccccggaaacgtctgaagcttctggtgctagttgctggtgtccttcggagccggaagaaggcggagcgccgggaacaacatccacttttttggatcctggaaaacgcttctcatctgaatgtagattacccttgacatcacgcctctctagtccccgccgatgcgatgccgatgaggacggtggcaagtcggatgccgagacaacacagactaagaagaagcaccaaataataagccgagtggcaaggcaaatcgataacactgaagaaaatctcgcttcttgccgctgacccgactcgctgtcttcgcatctgcattgcgcacgccttgtcctggggtacagacagcgctgcgctagtgtcagtctcgagtcatgcgacccacacttaggtgtcgactttggttccacgaagtactcaaaggctttaaaaataaggagcttgggggactcgttgatcacagggttagtacgcaactttctcgtgaccgggattggccccgaaacaacgcgtgcggaccgaaacaatccaccgacgggggcgggtagcggttctaccgccccccttcccagaacatgatgcgaatgacgagtccccgctttccggctcgcagccggaagatctgggcactgtttgtctcgcataatcaaacaagaaaacatattgcgagcgtctaaagtcccgaaatcaagccctggaggcaattcctacacggggtcgacggcgccgggaaccggtcccagaccgagcgagaaacaaaagtgctgctctccgaccgacatagtggaacgtttgtgcagcaacagaataagtaagccaaaaccctccttttgtccgtgtactttagagaacgatattgccaagcgtctgactaacagagaccctcgaaacgggacacgcctccgccttcgcgaactggctgctgtgggtcaagcaggtggattgcggatgttgaattgaatcttaaattccttcgttccctgcccgtcctcgtgaagctgcttttgccgtccattggcagcggccgtcttttaggacatacagtgctgacaacagttgccaccgcgggacggggggtaaagcatgcacatgcaccgtcttttcccctgcagctcggagcgatgcacgaaattgactgtcatgtcggcgcatgtgggaggagacaaataactcacatgcgaggggcttcgattcctcgagacagatgtcctcctcagaattaggcaagcaactatagccagcgatctatgctggtcatttcccccaaacctcttttttcgaaacagaaagaatgcagtgatggaaagcctgccagctggaaagggttgctggagtttctggatcgtaccactaccgtcgctaacactaaaaagaccgatcgccggctgcaggaaggggaactcacgtgaaacgagaagctggtcacgtgatttcggtgcgaaggttgctgctaaacacttcgcaccaggcacctgccttataatagttcagaggtgaggcaaaagtgcagcagaagccaccccgtgtgcaccgagagccggtcagaaagcactgtcttggcaccgtgagaaatctaagctctcttacagacaacaaacaatagcaagaacgctcttgtgacttatgtggatgttgatgtggcgggcagcggcatttggtgtgacgaaaccgattgcctaggtgcacgtgggacaggaaatctagaacgtcacttctcgtctacgcgggtttttgtagaatcgattctgtcgattgaagtgtagaagtgcacactcgcaaggatgtgtgcggtttttgacaatagatttcccgattcttcacaggaatcacattacctgacgacgcgcgaagtcccatacagtggctttcggcaacggatgcggatatggaaccgctcacggcagttcgtgcgtgtgtggcaaggcaagcaccagatcgcgtcgggtatatgcaggaatagtgttgaagcatctgcaatagcagaatgcttaagtgtatcagtgctaaaaggcttttaaactcggcattacagaagaagatacccgagtgttcgtgataagcagcgaaattgcacacgaaggcgaatacccctcgaagtagtggccttttatttcactttcaaacactgacaacctcattatccattgtctgtggagcgccggtaagcggtgcgttgacaaaaaaccgaacaggtcaccggttgtgggtgaagctgcattaggcgctctgacacctaaggtgactggaggtgtcactgtcggcaagccagaaagaagacaactcacccgtgtcacagccgttgtcatgaaggagcaatataggcgcagagaagctccgtaatatgctttttaccgtcacagatgtttttgggtcgtgatctcctgacatgaagagacagtcaagagcatcgctgtttttgatagtaaaaccctctagtacaaaattaatatgcagcagaacactccaactgattcgtctggtggtgtcaccaggtcgtttgaggatactccagacggtgcatgaatgttctacgtgattcttgaactttcatattcgccgtggaagactcaggagataaccgaaaaaccaaggccgtaaacggggtttgttcgcataccgattctcccgcgatccggcctgtcattgtgaacatctctgttggtcttattggtttgtgttgtcacaaaacggactggtgtttctggcgaagaccgtgccacagcattgtattcccttcatgcgcttgagtgtgggggttacgtcatgaaacttggcaactgtccgccagaagcggttccaaactacacggctatcgtttcgctgggctgacgcataccttttggcacagaactccattaaacacgcaggcaacaatctagtgcatcttgcgctaaggagcggacaactgttggcatctcttgctgcagcttctggggactgatacgccatctttgtctccgcaggatgttcccaagctttcgagcttcacgcttgcactgtggcgcaactaacatggcctgatttccctttccactcctgtctgtggcgtctgccagttaatgtctccagcagctctgcgggactgaaaccaaaacataagcttaagccataaggaattaggcgcgacactcaatttgaaagcattgctgacgccaagcgatgcctcaaacgagcagcctgactgctagacaagcctacgaacattcctcagaggcactatgcgcgtgcccgagattaaacaagtgaccacggtactctcgtttcgtgttagaaacgcgagccaatatcacgcatgcgcttgctttccctaaaggaggtacctaaaatcgcagagggaaacacaggaccgggaacttctaggtttgcgccgttagctcccaccaggtgcgcgtgctacagacgctcgaagcgaacgcttgcaagaaaacgcgcagcgcggagcgctgaggcgaaaacggacgcagttcgacgttcggcgtggcaggttcgggacttgttgttgtcatttgtctacgagagcctcttttatcccaccttcacaaagcgtttttacgtctactgcattttgcaccatttctagagctgtttcgagtagtccctgtcccccaatctttctcagccttgtctttgatgcttcgagtgacgccagcgcttgtacgcgcgcaagtccctcgagcgtcgttcttggcagcatcggttctcgtgaagcaccgcgattgcggcaacaaacaaagctgcgcaaacttgtacatgagttttacggctctgcgcatatgacttaccacggttttttgttgccgcgcgggaccttagctcggtgtttcagcgtctctgttttcaaattcacttgtggcaacttctcgaaaccagcgcgccagcacgaggtaatgcgctgtcttggctgtgttcaacggcgaaccggggtcgccggctcgacgtgagtctctcgctagggtcatttttatatcattttgttcgatgttgttttccgtctaggatttctcctgtgtttcagtttggtggtacagtttccacgttggacagcggaagaa

SEQ ID NO: 1861 - DNA, 2938 bp, Toxoplasma gondii
  source 1..2938: mol_type = genomic DNA
attgacttggaagaagtctcctgctctataccagcagtgaaggccatcgatcccagtggatgcgcatagtgtcccggggtcgcttgtgacggaattcaaacctgcagaaaaaaaacggtaatcgtacagcataatcagttttcaccggacgtctttggtggatacagtttatgctgacagaaacgctcgagccacaagactaaagcgtcaagaagcacgggtaaggggatagatgggatcagatctaaacagtcacgctgttacgtttctgccacttttaggacaacactccgtgcgcgagaaaaccaaggggtatttaagccatgatctgcgcacttcgaactctcacctgtatcacgtaacaaaaccgttgcacctttttgccgcgcttctgctgcgtcaggggacacagcttgagcttgaacggcgatctgcttgcggatctcagcaagcttctcgttgaccgacctcaaggccagtttacaagactcaatttcgagaacctggtcgcagaaagtaataatatatgcgcactactaacgcacgacggtccgggttttcctctcacaacattccaaagaaagaaactaccgcaactgcaaacaccacttgacgtcggaatggaggtccacacttatgttcccagtgtgggcatccccaaaagcaaaatgatagtttgcagcaaggaatcagacagatcatcctagtggcagatgatacgcctgtaaagcaccatctatggggggatttgcagttgaggcaggctgcagtgaacgttgcgtatttccctgccacggttggacgtactcgtctcggatatcgcacgtcgttgtaccccaccgccggaaggctacccgcttggtaaaacgtgtagtgaggggtgatttttgacctgtagtggtatcctccacgctcgttgttcgacagaaccggatttacggttgcactctcgggcaaaccagccagtcggcagagaacgccttggacatgacctcgttttacctcatgctgaagacgcagccacagaggacagatgaatccatacctctggaagcggatttatcatgtgcctaaagggtctcataaatttatcaaagccagagctggaagcctgtcgacaacggctatatcgtacctgcattgacagtggcatatgctgatattggcatccactgcacgctccaaagtagggacatggagatgtcacccgccgaggagaaggcgcgttgacgtaagcgacaatgaatccaatgctgtgctgcgcaagtgctttgtggattcgcacccagacgtattcaccgggtattgagaaaggaacaaaaacaggcttcccgtgcttcccttgacactgaggaggagcgtttcggtcatcaggagggtcagccacagacgaagatgaaggtgaggctggattttcatgacgagcaaaagctgtcgctatttctgtttgcttcagtccactctcgagagatcttgatggttgagggtcgcagcaccccgctttatggtcagggtgcccgcagtctgagacgcatctgtcgcctccaaaacagattgacccgaacccttcacctgtgtcaataatgaactgaatatggactaggactatatcgccatcggacggccggtattggtctcttttcacattatcgatgctggtgccgtcgtgagcaggcggagtagccgcggagttgtggccatcgagtgatgcataaagaaccacctgcgatggggtacgggaagttttctggtgtgatttaataagcctcagagggagcttgaaagaccaacggcgctcctttcgcgccgtgtcatcgcgaatgactgagcagggcggagttccgttgcacacgcctaggcgctctagtgatcgcgctgacaggtgcccggaagtcggaaagtggtagcgacttcccacacgaaatgccgaacatgatgaaagtacattcagcaccagagaataaattatgatgattacaagacgccaagtcccatcggaatgacagctgcgtccatgcttcggactcgacctgggactcatttgctatccgtgatgtcttgcgcacggttagcactacatctctagaggcatccagtacaccagtgggtatcctcggacaacacatgaaacaaacaggcaaacatgtatgtcaattccgcgtatcctagaacattcgaacacccgagttcggaaaggaatttggtagccccgtctgctgcatgcactccacatggaaccatggcgcatgtacgatccacgccagccgcggacgcagcacacaagtgcctcatgcttgacacatctgtctaagcaatgccgtcgaagagatcattgttttctcaaggtgtcaacaagatgaagattaccagccagaatccccgggtgcggatggcatggcacactgtagcatcggcaccgctttttgatactcccgatctacattgtcttgaaatgttagcactagcaacacactgtgctccaactccagttaataagaatcataaaataagttgccggttctgtggttgtgccaaactagcactgtcaatgtcccagaaaaagcttttaaatagtcctgtcccaagctgagccgggttgtgttcctctagtcactcaataacgtcggttttccatgttaggcgctaacttcacgcatgttgccataacttcgcctcatagaagcatgcctctcttcggcagattctcatgaatgttcgttaatgcaattctacccagtttcacagttcttttcgtgcatcgcggatcggcccagtctcgcagactccgctgtggtggatgaggcgtgaggcaaagcagcaacggcaagccgtgctcggtacatacagctcaacgttgagtgacacatttcacactcacttcagttaagttgtgtccctggcgcatagcataaccgaaagtggtacaaccttcaagcaa

SEQ ID NO: 1862 - DNA, 1447 bp, Toxoplasma gondii
  source 1..1447: mol_type = genomic DNA
tcttcgtcgtcatagtcttcctcgctgtcggtttctgcgtcttcctccctggcgtcttctggacgcgcaaacgcggagaacgttggactggcgcgcggtgtagcagctgctccgtgaccggtcggtcgcttcacgtcggctgcgtgatctacagaaccggcgaactggccagcgactcggcgacaggcggccgagtctgtgtcttgtgttcgcgctttgatgccggagagagcagactgcgacagccgagacgcgctctgtcggtggtacagcggagattcccgttcgagcagcaccggtcgcgtgagcctccggtgttcgtacgcccgagagaaggccaccgcatgagccgcttcgcgcccaatcccaggctccgcttctcgctcgaaggagtccatcgcaggatgtttctggctgctctgagcacggcgaaggagaagcagcggccgcgcgcaaatacagaagcccgctgctgctgcgcgtcgtcgagtcggccgcctggagcgctgcggcgagacagaaaatagggaatcgagagacagctggggagaaaggaagaaaagaaaagcttctccctgtgaagcgcttttccgcggctctcggaaagtcggaaaaggcgtctccagaccccaggcttggccaggaagggcaggcgtcttctcgcgccgggagtctagacactcgaagaaaccacaaagtacgaaccgtgagggcaggccacgaagcggaggagaaaaacgcgtttctaggaactccgccgagagcgaatgttcaagacagccgttgtcatgctttgtctctctgccggtttgctcggaatcagatgccctctctctgacaacgtgcacttttgatctacacaactcgttcgccttcccagctgcacagaacttgcgatttccaccgagaatcgctcaaaaactcttcaagagacacgctcttctctgcaggaacgtgtgtgtgcggatggaagtcaaaagcgtggacctcgctcttctctggggggtggacagtgccggagcgaagaaaactcacgagcgacgtctcgacaccgggtacccgcgaaaagatctctggactcatttctcgctttcccgccatttgcgcagagaaaaactcgctcttttcacgaaataaacgctaaccctcgcccccctctccctccagtgcgttcggctgccggcgaataaaagcatgcacgcgcacccggccgctgtttctgccagacattggcgccggactctagaaaaagtggacaaatcgaccagagcccaggaccacagccagcagaaaatgttttcctcattctgaagcagagggcttgcagtctttggcggagcttggagacgaggatggatttctgagggacgagaacgagtggagaagacaaaacctcagtttgctagcgaacccccgcagaaaaaccaacaggaccacgcctcggcga

SEQ ID NO: 1863 - DNA, 2182 bp, Toxoplasma gondii
  source 1..2182: mol_type = genomic DNA
aacaaaagcatctcgaacctcagacaacggcacagaacaagacgaagaggcagaagaaggaaaagacgaagcagagtcctcgggaggcgaggccggttggacgttgccttgccagggtacccggccgcgtctgtagatgtctgttcgactgacgcgcttccgaggttcgtccgtttttgtttgagagattttcaagaactcctcgagaggcagcacctgttgtccagaaaacgccttcttgtcaactaccttttgcaggcgcttttcacattctccggcactcgcctcagcaccacatgccggggtctttccctgtctctgtgtcgttttggtgcacacagagaagcgcagagcctcaagagcgacgtccacatcggagtcatcttcgagggcctctgtacgtttcacgaggtgctcttcctctccgtctgaagctcctaaaagatccccgtgctccgtgttgtcttgcgccggagttcgaggaacagcagcgagcttcgcacaggagaaagtagccttcgtctcgccctcggcctcgcgaagaggagaaggagaaggcgtcttgcagcttccagaaaacgtcgtcatcgcggaaccacagtgacgacgagttttgagggaaaaacatacggcactcgcgctaacaactccccgcgagtatggacatctctccggcaccgggtaggagcgtgaaactttgcttgtggagaaatcggagggattcctccggggatataagccaccagaagccactggctgtctgcgaggtcctttgtgcgagttcgagaaaattttcgcagctatttgaggcagcttcgtggagactctctgcgtgctttctacgtgcatgcagtcaaggtataagaacgtccggactctcagcgacaccagttagtcaggcgcgttcttttgacaaccgttcggagtttgacgcggtaaatggaatttctctctccgcgtgctgcgacagtaaaaaacatgtagatttccgaacctggggggtacgccacatcatcccgcgttggcacgcgaatcgaccgtgaagttcttccccccaggaggtcccttcatcggcgcttctagcagaccagaaagttatacgcagaaacctctacaggtgctttttctatggtgaaaaggtctcggatcgttctctgcatgattgaggtgggggtttcattccaaggcactacacagcctcgctggcattctgttctgtcgcggtgtgtctgtctctcgatggctcagtgagtctttttcgcggtcccgttccaccgcgctgtttcgctgccaagctcttttctttctcgcgtgcatggaaaaacaaaatgaaaaccgaattcgacggggtgaaccagataagtgaaactgttctgtaactgggtgcaattgaggaggaccggtgttactaaaggttgtcggcacaattgtgcaggacgagacagaacggcaagagccgcatcgaagcatctcaagtgggcgcggcgctaggtttaatgcgcaagcaaacgacatgtagagagccttgcattcgcggccatcgattctatttctttccggaacacccgttcgtttttaagccgacacagtcggtacaacttgacttttgacgtctttcgggcagtggcaaatggtgggaggagagcccgggaggccagttctctgtcgggagacggagacgacaccgatccttcgccggaggactggagggaacactaccattcatttaaggaaaccctggtagagtttgtgcgaaatgcagagacggggctccactatgccccaaaaggcttgctaaacagcggtgtcgctggcggacggggagcaccaggggatctgaaagaccctattgtgcatgtcggctaggcgacgagtcgctcccgcggtgagctccacgctcgtgagggtagctttttacggttcgcatagaccgacgagacgccccattttatttatgttttgagctgcgtttgaggagctcgccagttttgctcgacttgttttcctttagtaaactattttgttcagctccatcgtttccaggtaggcgaaaaacgttccctgtttttcggtttagcgacgcgcgacgcagcgcggtcttttccctggcatttttctccagcgttcccagcgccacgcatcgcttgttcgcccgtgaatttgctctatattgcaccaacaa

SEQ ID NO: 1864 - DNA, 2396 bp, Toxoplasma gondii
  source 1..2396: mol_type = genomic DNA
tttgtttttcatctcaggcgaggattcttggagtgacaacgacacagccgctgggttccgtgactgcggcaggtacgcgacttgccggacagtgtcacagtttagtcgcctttttttcttttcacctttgtcgcgttcttctgctcacctggcagcaggcctttgtagggcgtatctgtgtctgcagagacgagggtgagacgcatgcctttctcaggttgttttgcccagtccttcatcacaaagaggtgagacgaccctccgccaaccagcacaaggtctcgagaaatcgacctcgcgccctgcccgctgcatcctcctcttccactttgtttcatcttgacaaggacgcagaaagatccgagaactgggggaagtggaggaaaagcggcgaagagcgagaacgagcaggagagacaacgctgcggcggcgggcacagccaccaggcgcgcggcgaacaaaaaggtggaggaagaaggaagacgcgaggaagagggagacgccgaagaaggaaggaaagggagaagagaatacggtcggattgggtgcatgcgtggagcgcactggacggtcgaggagacgcgagacgagaagaaagggaggaagagcgacgaggaaacccacagacgcaagagagacatgcagagtgaagagacaaaccccgagagaacgaacagaaaagacagaaaagacagacaggacgaggagaaggcggcagagagagaaagacgagacagataagaaggtgataggagaagaccgcctgtctgcacggaggaatctgagatgaaaaactttaaacctttggagaaggagttgagaaggcgatacgacaacccagcagaacgaggctcgctgaagcggcaagtccccaaggaaagacagaagagtgaggaaaggaatggcaggcagagtcaaaaaaaacgacttctgttctgcgacagctggaatctcttctgcctgtggagtcaccgaaccggagaatgactgtcgtttcgtctgagagagggaaaagcgacaggagtgagaacgagacgcggggacgtcgagggaagacttggagcgaatcggtgcgcctgctctttctcggcgttcgccccgccctcggaaaatggagaaaaaaagaaaaaggaaagagaaagaacaaagaacgccacaacgtcccctcgaggagacaccagatccgagaaaggatctcgaacaaagcggcacacgactctggtctccttctttccaatcttctccctcaactttgggtcttttgcgacgccaagtgaaatggagatgcaagggtgaatcgcctcagctttgtgcgttctgtatccgtcgaaacaccgcctttttctctcattcattccgcgcgacgactgtgtctgcaggaccgctcccctttcgtctgcgcgcgcgcctcttctgaatcctttgaagtggagaacaacgccacaaaagagcgcgagaaaatcgagcaaggcgcggacgcgagcgtttcaaaggcgacaagtgaggaagaagacaaaagacaaatgcgcgaggaggaagaagatggaagcgtcgtgtctccgcagctcgagagccgtctcgcttcctgctctgtcgcctcgggtgagaagacgcacgcaaagagcggaaggcgggaggcagatgcatgcagatcatctctctggatttgcttcgagcagaaaaaagagcgaacgcgccacgataaggaatgatcgtgagactcaggacgaaagagaacgggtgcgacgcggtcgcagagtgaatcttttagatcgacgttgtcttcgcagagttcgcaggaaacgcctgcctgcgcctgggaaggtcaccgagcgcttgcacagtgctttcgatagagaagcagagaacgagagagaaaactcgccatctttcgtcccattcagcgtcgtcgcttacaaacgataagggagaagactcgaaagtcgatttcctccttgttcttcttccgtttcttgcacaaaaatccactgccaccgtttcgttcgcctttccttgccgcaaatccatcctcttttcctctcttcgtatatccctgcacctgcttcatctgtgcctgttctctactttctattcttaccgccgcgattcttcttccatcttccttgttcctcgcttctgcagcctttctccgtaggccgcgctcctttgtctcggcctctctccctcttgttcgcccactcctcgttcttgttctttttccctgttctccttctccttcgtctccttctgcttcttcttcttctgcttctgcttcttcttgctcggcttctcgttctccttctgcgtcatttgctgttctctgtcttggccttcgccctcctttcttcttccttgtcctcttcatcttttctccagtctctctttcgcgggagga

SEQ ID NO: 1865 - DNA, 3053 bp, Toxoplasma gondii
  source 1..3053: mol_type = genomic DNA
gtcctggaagaacattattcttgatataacactgcaatcttctctatgtgcggtagtgattgcaacacagatactgtagagcgagctgtgttcaccacgtgtgagggacattgtatcaccaattgaaggccgagagctttttgcgtcttcactaggtgtcagaatatgccaaccgtttctcattctgcgtctgatgcactaagttttagccatcgggaattcgctccattgtcattcgccataggcagaatgagttgctgtcaagcagtttccgtgtcacattcgcattgttgctaacaaaagcagagtttgctgtgtgtcgcatgcacgcagatctggggaggtagtccatcaccggcatcgcatcatcctcaactttaacagcacataagctcatgagcgggaaagtactctaccaccgagtagcaaggtcgactgcgtcacagatgttctatggaccctttcatccttcttcgttccctctcttttctcttattcgttcactttacctcgagattttgccaagatttcagaactgacaaaacagtgaaaccgtgtatttctgttcgccccttctgcatctccgcgtggctcctgcctgttttgcctatctgtgcacgttgaaaacataacccggctggccacaccgtattttagatccctgtcgaaagcgcaactagactttttgactattctgttcacgttacttgcgatggaagagggaccgaaagtcgtttcttgctacagtcgaaccgaaaccatggcaagatacccgcgagacacaatcaagttcttttcgagcccaagaggctcgcacacgccctgcattgcctagaaaacctctacgacgaaagaacttcctcgatcgaacaaaaagcatagcgatcctcctgctcctaagtgcgtttttgctcacaaccaaaataacggacaaacgagtaaaggagaaacaagaggaaagataaacaaaatactctttttctcccagttcatacccactaccctctcatccccctctccagcagtagcacattctttagattacctttccttcgcttgggtgcgagacgtctgttgggttcaaaagcaacgagacttcgtgttagaaagcatgagacccatctgtgtgattgctagaacatcgtgatgcgcacagcttatacggccaccgcactggacctagggcgcgaatctacacagaggagaagcaataatagtgaggaacagcagaacagtggactacaacgagaaagaagcacgaggccagaaaaggagggagtcgaagcagacagagggagaaaaggttgaagagtcagggcatctctgtctttcttgcggtttgccgttctaccgtttgcgaccaacagacgactccagaacgccaatgacggaagccttgcttcgccgttgcacataccatctgatatcttgctcttccccatagttaccatcccacaaacagatattacttcagccactaagatgatgcggagatgctcgcctttgctatcgtgtcttttcacggcagaagacgcggaggagtgtggaaggtcgcaagggggggggggcagttttgggggggggactgacggctgtctgtcccagaagttcaattgcatctttttcccatcttctggttattccgtttctgaacatttttccagaggcgaaaccgagtttttcttctctcttcaccgaatttttgcttcacactgcatggaagtgaagcagccgggtctccttgcttctagtctcgtctggttgctagcttgctgctctccaaaacatgcgcttcgccacgaagccagaattttttcacttacattttcgtgcaccaaccagtttctgtgtgcgccttcaagctgcaaagtggttggcctacacacgatcccgcttttaatttcaccttccgttcttcctgtttcccctggttttccgcgtcatctgaccattcatcattcgcgtgagaggacagcccaattagcgttctctcagaggccagctgtgtgacttccacgtctgtgtggacggacggcaaaaagataatgtacctctttgacaaagcaactgtataaacacagtgtgtcacaccatatctaaatctgactgttcagaagacacacacttacgtcgacaactatatgtgggtataaagaggtttgcacattttcctcatgacgcccaccatccctcttcggtgatacgagatacatcgtaccaatccagagagctgtccgtgaatcgtctccagacccaacgctcgggggcgcactcttgtccacgcgtgtgtgctcgagtcttgtgcgtttcgttcgcccttatatccgttcttatcttcggttgaaaactggttttggttgtgtgcctgttcctgaatgtaatgccagaaaacggacggtggacgtgacgacagtcatttctcctaacagatttcgagtacgaatgtctcctgggcaactatggatgtcaacagttgggcctcggttgcatgttaaaatagttctaccagccccgtctacctgcgctggcgcaaggttttgtctgtgtgcgtgcattgggatgtcggacacatgagttggcgacatcgagaaagattataccatttcttggaacctaaaaagacgtggggcggttcagacgctgggtgaacttctttggtccgtggttgtgatgaaagacctctgccacaagcaacaacgttcgacgtaaagccactcgaaatttgcttccgggaaacatcgcggctctctctgcgtgtaattacttggacatccggtgctcacaatcttaaagaacagacaaggaagcgctaatccgtccgccctcccatggtctactttcgcgtcttgctgccctgaagtgccccatggagactttgctgttcagccgcctgtgaaggttacagcgtgacgaagaatcagccgtcgagaaagccatcttcctgtttctacgctgagcatacacgctgtgaacgacccgagtcttccattcaaagtgcgtttcccggagagacggatgacgttcagcgcatcccgtgtccgcgatttcaaaga

SEQ ID NO: 1866 - DNA, 3599 bp, Toxoplasma gondii
  source 1..3599: mol_type = genomic DNA
ctacctcttccctcctctgtgtctggagacagtggaaagagagtaggcgagaggcgggctggaaaggagacagtctgcctgcacgcagagtcgcgattaagtgccggccgcgtggaggatgaagaacctataaaagaagaggtggtggaggaaagcgaggctgccagctcagtgcccgaggcagcggggacagagatgaagtgaggccgaacgccgagagacgcagacgaaggagaagacggggcagaggaggccgaggaagaaggagataacgaaggacgagaagagacacaagacagaggagacagcggaggcgagaagcgcgaggccggagaagagagaaacgcagaagtggatttgagcgtcaaggcagagctggggactatgtccggggacgtgacgaaattgaaaaggaaaggcaacagaactgggagcactgaaagagaaacgaaaggggaaacaagtaaacagcgaaggcgacgaagccagacgtggtgcttccaccggtcaagctcaacaaggaacactggtagcgacgccatggtcgcgaaagggaatgccacgccttctcatcaagcggaactcaggttcgcggaagacagaaaagggactacaaacagttaaagatgtcccaagaaaaccgtgcatcacgactccagtaacagtttttagaggctttgaggacgagcagggaacacactaacggtaggaactcggtttcccagtcgctctttcctgctccgccgggataaagccgagagagaagaaacagatccgtcgagtgcaaatggaaccggcgtgcgtcgcgcacatgttacactcaacccgggacaactggcactcagccacgatactaaaccatacagcgtgacgaagaaatcgaaaggtacggaaaaccacgtgcaaaatgcccgtataggcacaaagcgctgacgaaggagaacaaagacgggagagaaagcagaaaaagcgaaggacgacgcaggacaacaaagcgaacaactcaaggggtggggggcgacgatcagggggcttgccacattcagcactgccaaaatcccagctaaggtgggcgaacatcgaggttttctctcagggaataaatgatctgaacagagggagaccgccagtgctacagacaaaaagagcatccttggagaaacgcgaacagaaaatgacaaagtttggtgagcgttgtcatagtgaacgctgtgtgcgatgtgtccgacggtcagcagcaacgtttcacattctccgccgacccttcggaagatgtcggagcgcattctcttgactcaaacgaacgctgtcctcccttgcccctcgccgaagtagatgggaacgaatgcaagggcttcagtgtgtttttttgcaagggttcccccgtgagttcgccgcagcaagagcaagccacgcatgcaaccagaagcgacttgacgaaccacttcgtatctctcttctgcagctcgaggtttcgctgtgtctccggtcagtgaagcatagatcattggacagtgaagagcatttgatgactttttttctcttcgcaacgacaggcaatatctacacaagtgtcaggtagtttttaggatctcgacaacgacggattcgccctgtgccgcacaccgctggtggggtctcgcggtatactggataataaattgctctttggaactctgaagcgatacatacaatccacggaggggctgtctgtgcaacacatctaacatcaagtagtagtggatcacaactcgatgcttcaggtttcagacgtcacggaggcggtgtcgttgccaaggatttggtgatcctgatccactgttttctctctctagcggagcacgcgtcttcactgtgcgtgcgtgaagaggcaatgaggactacggtacatgggtccgttctctcacgattgagaaagttccttgcatcgtgagaggcagttctcgctgcttcgccatagacacgagaacgaaaacccagctgtctggtcacacagggccgtctccaccagtgactcacatcatgtctcttcagccgatagttcgtcaggggcggaattagtgctagagggcgacacagctcagccgacagggctggtgaccggaagtggaggcagcaagctggtcatacagcagaagtggatcgacttcagcgtcttctggacttgcaaaagctgcatctcctgtataactgcaagcagccgtttgtagtaccccatggctgcagtcgttgaatccgtgagcctgagcctctactacgatagttgtcgagacttttgttgagagtacagcctacgggtacgtactaccaccgaagactatggtatggagttatcagagtacgtatgttccatcacccagaagccatatgatctacatataataaaacattagattggcctgcaatagatgtgaaaagttacgtgatgctcatgaggacagtttgactatcaggtagtcggcctgtaacgaagttccagtaaccacgcatcagcggaaagtggtgtttctctgtcctccacgcatgaacaacaacgccgtaagacactcttcaatttggcctatgaaacaaggcaagggagagaatctaaacgcggcgtgtcgtttgcgtcacttacaaggtgaatcgcaaacatggcttcttacatgtgtagggacgaatctacgcggattcacgtgttttcagtcgtcgttgtgcatgtttttgtgatacgggctggccactacgcgtctcattctaaccatgttttttacaggtttctcgcaaacgcttgtaacacagccagactgtacaaccgcagcgtctcggaaccccctgtcaagtggcgaactgtttgttacgctcttcgcattgacaacagacgagcgaggtatcccaaacacagagtgttactttcagtctacgacatcctgaattacgggcttttgcagttcgtgtgtttcgaaacccagatagggcggcgttagaggtgtcatgtgtattgagtcgacagctagccgagtccctgtaaacgaggccgtttcacgtgagttctcagaaaaacatcacgtttccgtgcgaagtcatcgtgggcgagttttcttttcgcagacagagattttcggacgatttgaacacgacaggattttggctagccgtgaaggctcgtctgcagagacgcgtttacgatcggctgcgcgcgaccgtcgcgtgtgcgtatcacgtggcagttaccgagacggcgataatcctgctgttcctttgcccgatttccttgataaccggacacatcattctcacgaagtgagcaaaccgcgtatacgtgccccaggtacacgcttccggtgaattccctccgtgtgcgatccatcatcgccctttcctctgtcaaccctaatcctcactaagtccatgcaactttgagtcagcgacagttctttctatctacctgcactgtgacctgattgaatcgtagctccgatgcacgctgacagctgagaaagttagagggaactcgtgttttctttgaggttccccggtttccacacgtcgccgacttaagtcgctaagtcgtgtaactcctccctccgttccatcggaaaaattaaaaccattcacaa

SEQ ID NO: 1867 - DNA, 2719 bp, Toxoplasma gondii
  source 1..2719: mol_type = genomic DNA
tgtttcgaaagtcagagaagcgaagtcagtggcggaacccaaaccagactccaagagaagcagaccgtctgcgtcgtcattctcgcgcgcctgaaccgcagcggagttgtcgaggtcctcctcgctttccggccgtctcccctcccccggcagaacagaagaagcaaaagaacaagctcctgtggcagaggcaggcctggaagaaggggagagtggaggtggggagggacctgtcgcgttgctttcgacgtcagcgaagtcagcgaagctcgaggcttcttctgggaaggcttcgacctgacactttcgccgcttgcaggaagtctcttcttggactgagagtggcacgacggggcgacgcgactgcctcgcctctgctgtctcgtcgtcctcagttgtcatcctgacggtaatcagcctcagacgcgccgtcccaaaaagaagagcaagggtgctctgtagcggagagagaagaaaccgggcctcgtgcttcacgggcgggagctctggtgcaccaagaaaagagacgcacggagagaagaaggtcgcagagacaaaggggaactcgcctccgcgacttggacctcttcttcacgactgaacaggcatgctctgtgccgcccagtcacattcgacacgaagagacgagaactgcaggtggaagaagcgtctgactcagatgatttctacagcgaaaaacgttcaaagagacagagcgaacccggtcctgggagaagactcaaagagcgtcaggagttctgctcccaaagaaaagaacaccacggccagagactagagacgagcagcgactcaaactttcctgatgccatgtccaactggtcttctcctctctctctccacgaccagctcagttatcaaagagcttgcggatcgactgaagcagcaccgaaaaggcagggcttcttcgccggaaacctctcgagtttttttgcggccccgaagagagggcagcggaaagcgacaggaaactgtgtgcctcctcaaaagacgaagaggagtcaggggagaagacaggaaatttgtgagttttaaggaacggagaaagggaagagacgtcgcggaaccgagcggaagaaaggtcagcgtctccaagcggtgaggagcgacggaaagcgagaatgccgtcgtctcgccgtctgttcggggacagaaaaagcgaaagaaacaatggcggaagcagatccacacggagaagagaggccagcgagaaggagaggaagaacagaagagaaaaagaaggaagaggaagaaagaaggaaacggcggaaagccacgcgaggagacccgcaaaggcgcgggcaccacagtaactcgaccttgtcggttcgtgggagtcgaaccctctggtgtacatacacccgagaaaacaagcaaaagagacgccttttttcgtgtttgtgaaaaattaggggacaaagctgacatgcagacctcaacaacgcctgctcgtctacgtcggccgacagcgacagagacacctggatgtgccggcgacattgcggggcagttccagggcctcgcgacagaaagctctttacggcgcctgtttggcaacgttttcttcgttttcttcgttttcttccgggtttctttctgttttattttctctctggccgcggaaactcgcatcgctgctgtcttgtgcagtgactgcgacgggttcgcttgggccgtcgctgctttcgttgtcggtaggaaccgcgagaagtcgcgacacactgagaactcgcagattccaggcgcaagaaattcccggaacgaacttccgcggtgccacgccgtcgccttgggttttttgtcgccctctcgaggacgcagagtagccgctttccacccctcgttgtcggttccttctctccgcaccaccagggggaaatgcggctggaattccggtgtatgtacacccgagaaagggaagattcgccggcgttccgacagggacggaaaggcccgtcgcccttggctcgcttcccctccagcgattgggagaaacccggaagccgcagttcacgatcgatttagattttatgcatgtacagagcgttgaggtggcggagaccccactgatccgcttttttgtagagaaagacctcttttcgctcggctgacgtctcagttgatcgtctcaaagacctcacctgggtgtacagacaccgtagagaaagaggtctgcggatcgcgcgatcctgtgaagggccggccccgccgcctgccacgtttccaggagagaggatttgtcctgtgacgattctctggtgaatgaatttacgttttgcgtctctctcgaggcgaggaatccacgcgtgccgggaggcccagcttggcagatcgaaatcctcacgggtttgtgcttcgattgcaaatcctcgtcttcctcgtctgtgtgcgcggcgccgctgctctttcttcgtagccctgagcactgtgaagaaattcccctttgtcccccccccccgcccggagccccagttttcttgtcagtctctccagttctcgtcgctctaatcttctcgtcgtctgtcctctttggtctcccgtctccctgctgtggcgtctcgctctcctctgttcctgtcgctccgcgacccttccgttcgcgctcctctctgtctttccctccctcttgcgcgtctcttcctgcctttgcgcctcctctctctctgcgtttcctgctcccttcattctctgaaagtcgaga

SEQ ID NO: 1868 - DNA, 1816 bp, Toxoplasma gondii
  source 1..1816: mol_type = genomic DNA
actgcaaagagttttgtttagcgtttcgagaacaagtgttatgtccgtgatgcacttatgattgccgagcttttcgtttctgtgtacttcttcagagcactggtcgcccacaacaatgacaaggacttagctttgaaacagcttgtcgccaacctcagcacaaacgagcagggaaatatatagacgcctagagttaaatatgtactaagtccgatattatctgccctgcaaatatctgtcacggttgctcttcttttgtcgtttgtgaatcactgtggaatctggggtttaatttcattcatccgaatctggtttgtgttctgctcctctattcacaaaccaagtgccattcaaaagaaaaggctctgcttgagaatgcatttaagttgtgtctaccgacacaaccttgaatgcagtgacaacacaagtctatgcgttggagccctcaaattgtggaactcttcggcacgtagccatccagtggtccttatagaactgtgtccgttttgtggcgtttcatgccccagcaaaaaaagtattccaggctgtatcatccgtgcctttggaagaatgtatcaatcacatatcgttaatgtatggttctgcttcctgtttcgcgccgggcaggtccagctagattggaggcggttatatccgctgaaaagaatttagactatgagagttcttgtttccgtacgtgcgtgcaactagtgattcaaaccttcctaccataacaacggtaatacttgctagaatctggctgatacgcagtaccgggtatcgcatagtttgaaggcagagcaactgtcctacgcttgtttatagatggacgggaaagataccgcggattccacccataggagaacctgcgttacagaacccgggaaattcgcagacaactgcctgtactctctgatgacgacgttcacagcgcacagcacaagaagtgacgtcgttcctcagtggagtacacgaattgccggacactggaatagtctagttgacagtcctgcaagcagcctcctcattgctgcagccgtcctgatttctatgtcttcttcaccggtgttctctttctttgccacgtggtaggtaacgcatataaaacatacttttcgccaaaaagctgcgcatgcaaggtgccgacagcgcgttcggcgaacacgacctacagaagctcatagagcgtttctttgtcttttctgtccggaaatgaagcaacagaaaccgctccgtatctgaaaacggcatcaaatttccagtagggagaaactgaatggtgattgtgtcgatcctgttgtgcagtgggtaccaagcgtttcccaggtgacccactacagcagcacacaagcgtgtcgaatcgcggccagtcttcgcctgcagtctggagacggaagtcgtttcgattataacgaatttcagtcagagcgttagccatttctgtgtcaaactctcgttctcagagaggaagagtgcgcaccacgtcccgtaaaaacagtttttcattcgccctccgctgtagctggctcccagtccgagtgtcagaaacccccctcctcggcagcgagccgtggtaacaatcgtcacagggctctttgtgtcggcggcattttccgagtttctatactttcccttcctgtcgttctgccatcgtttttggtccagctttcttatacaggcattcagctgtaaacacgggcgttcgtaacgttggataccacaggccgtcgttcaagatatcccagatttttgcggcggaatcgcatcgtttccgtttttgtgcttcgctcaggcgaccctgcctgtttgtcaacaa

SEQ ID NO: 1869 - DNA, 2267 bp, Toxoplasma gondii
  source 1..2267: mol_type = genomic DNA
tcgtatatcacaagcctgagctgtgacaaatggtgtcgctccttatgtcgcgcactcgtccaaccccaaatccgggtggatatgtgggatgccgacccttgaaaatggcagtcacgaagtccggtaacgacttgatatcaagagcgcactgtgttcgaccactgggacagctagcaataagtttgtctttggttggctcatgtagcgacctagttcacatgcattcctccatgcgtttggcacaacaagaggggctcgtacagcgcacaggtgtacacatttaatgtaacatgtccatgcatgccaaagcacgcaggtaattcgcttagcgaaaaaattggaaaagtaattctgtatttacgcatattaacgtatccagtgcaattatacaaaatgccaccgcagacgtttttcgcaaggtggccggtgaatgccataattctgcaacattgggcagatcaccttacactaccacaccgttttatcaactccgcctcacttgtagactggtctagttttgttctacacacgtgaacgattgaaacaggcccggcacatgtgggcgagaatctttgtgggtttctcctgcaccagcggcatgtcattctggctttagagtaactgtcaattcggatttcttatgttcgaaaatggaagcaacgtggagcaccttaacgcgtgccatatgccgataacagtcagtgactaaccatcagcagactttggcgcacgattggccatccaaaatacctacccaacgatagatagtttgagaagagcaatatgcttccaccatcgaaggagctgtgccccgtgtgatgcgattcacgaggagagctgggtacatgaacgccacgctgaaatatcgcccggaggcatattcaaatattcacacttgcaataatcacgtcacattcatgatcaggcaaattgttcttgtagcgagaaccaatatggctgacagcatgccgacactgggggttcaagggcatttatttctccacaacaatgtggatacactctgaccaccacatctgttgtgcgtgctcaaccatctacgataaacgtgtaatgcggccaaattcaaaatgggaagcctgttaaacaaaaatacttttctgccggatgtgtctgcaagtcgctgaaatcaatggcaccttcatatgggctggggtcctgcaaagcgagtcaaagctctctgagagacaagctgcattgctgctgcagcttacacagcattcatgtctaacttgtcttctgtctttccacaatttgcatctatacttcccgtgtgcctacggggcttcgaatgcgctagcgacgataaatgtgcaacagaaagacttccagaagcgattaaccgagtcactgaggtgacatggtttcagatttctcgcgactgcgcataacttctcggtaatttgtgctgcgctgaatcgctctgtctgatgagtgaaggggtttgagagaaaactatactcaacccccgatcacctcgtaaggcgtcttttgtcggacgtcaccttgaaatctgataaacgactaaatttcgaggtgtttccaggcctgacctgcacgcaggctagctgcgagttcatcgaaaactcccaagcactcgcattttcgcggcatctgcgagaagctgcctggctgcgcgtcgttgcggttggagctgccacactcttgtgcaagtggtgttttgtcaagacatctgtcgggtttcctagctcttgtttgcagcttttggaccctttttctttcagacggatgcgtacatcctgaatagacagtggtgcagttctgccttggtgtactcacgaaaaagattttcttccgctcagaaattcgcagtcgacgtgcagttgcgtctcatcgcaaaagccccctacaagctgttcgttgttcaagacacgctggcgccagagagtgagggtacccacgctaccgtagtttacgttcattttccccgttgtcgtattcatatctggatttccatttgtgcctgaggggaattctctgtcttccttttattctcgtcgtggaaaaagccccgtcaaaccacgagtgatcgaactccatcagccgactccgctagcccaagcagagctgctgccgtttggtgggtcaggaatctcctacaaggtctggagaacatcctggtctgagagagctgccgcgcgcagaagagaattaattcaagtttttaactccgtgctgataattccttttcagcttatgccactttaaacagaaggacctgtcgaaaa

SEQ ID NO: 1870 - DNA, 4463 bp, Toxoplasma gondii
  source 1..4463: mol_type = genomic DNA
gacgcttttatcactgcacaggaacagagacgtggtatgcgttcgaattcgactatcgagggaagcatgggaaaatccaatgccactctcgccggtgacaacaggagaaaggtgaaggcagatttaggaacggtggaagtaactgtttcacgcgcacaacggtggatgactgagccttgtgagacacaaagaataatggaacgtgtgacccgggcagaagtgttggagcgatatgcatgctatgtcgatgaagtagagaaaactgatagactaaggtgtacatcagatgaacaagaaacggggaggagcgggaatagaaaagccaccagcggcgggcaaatgatactgaacagtcgggcgtcgttgctgaagccgctgttgaatatgttcgctggcgaaccaggaagccgtgcgtttaagcaaaggcttcaggctgcctgtggcaatccagagagtttccacgttggacagagtgaatcatcagatgaagacggcttacataaaggaaggggagaagtttcgagtggtgaatattcgaggcaagttgttgcctctaacgcctcggggcttcggtttccaagacaggagtcgacaggcgaaatcattcgccagaccttagaagtcattccaacgggcattcttcactcacaaccagaatgggatttctggcacgcaggagtagtctctttcctaccagagactgtgaagcccacataagcttgtgtagaggatacggtggggtgttcttggacgggataactgactcccctcttgaagtagctctcggcgttgcttgtgcggactgaggagacagtgcgtctgagatgtgttcgttccaacgttatgaggagccactgactagagattttgtttatctcaagctcgtacgaagagttcgcgagttcatatgaaggcttgcactatgttcaaagggaaagaacatctgactgagtgtacacatcacatgcatggtgagtgtccttcgtctgtctcttttccgtcttggtggagccgaactgaattacatattgctgcatgaggctgagtgctacagatagagagacggtctcgtactcgccagggcgtcagccgaagggcggatgcgagcggacgaagtctggagtgaaaacacatgacaacgattcccaggacgtaacccagctgcatactcatgacacactgggtggcagagccaatgcatttttggaagtcgtcaggagctttcaatatagatcgagcaccgtggcagtatcgaaaactagcccaaatatcccaggatgctcgcgtgtcattgctcgactgtcgatgccagtttcttggaagagccaaagagaatgggtcgctgggccgtgataaaagtttgtcaatgctagagatctgactacagcatttcggcgttcaagggattatcagtccggactgactgcctggggtagatcgcatgtttacaggtgaccgcaactagttcttcattagagacgtttatggttatgccacttccttggtgggcttaatgaacggacaagttcgtgtagagccgtgtacgccggtattggctccggagatggaggtcggcgttctctagtgatggtcgacagtcgggttcacgtttttctgtagatgctgcaccgcctgctggttccttggtttgaagttagctacgatgttcaggattcatccaagcaggagtgctagagagtgacaagatacactcgtctgaaccccatctgtcgcacttcgggatttactttaacctcctcgtcacctctcgctggtaaatggaattgatttgtacgagtcacactggtacggctgcccccttttcgctcaggtgtgtctttcccctcagagacttgtcggagactattcacttccagcgatagactatcgccacatggctttttcagctacaaataaattctttcacaagaactaaacataaaacgacctcagaaaaccagaatacgggaactaatcctacgtgcgcggtgccagaagaaggtaccagtgcttgcgtgtgtgacgacgtcacactgaaggatagtgcaaccgaatttaactctagcgcatccctaacagaatacaaacattctgtcaacatcacgtgtcccggagataaccagtgtatgttcgctgactgaaaagatagcgagcctggaaaccttcgaatcctcaaatgagtagattaaaaagcgttcgaatccagttccaacaagcgtctcggagtggagtgaaatgagtggcagcggagaaaaacacgttattcagcacttctgtgaactaatttcccattgactgacaagaaaatttttgtagcttgcttatccaaggcgccacgaaagctggtgtagtctcaaacaaacagtcatgtgtggtgaatgccacgtaaaagtagtggctaataagcccgtactgaagcagaacgtcatcaccagcgtcaatgacgcagaaagcagcaccaacaccgaaacacccgtgacggcgctgatgtccaacaacgacactctgactctcgaaagtggccctgaaggccaactgcagccttccactgtgactcagaggagtgcaaagtcatagtgaaccgatatatctctaagcttcgacgaaaatgctaacagttgtcgcgaagaaagccacgaacaagctcatgattcctgagggctatttccctgaggagcaaaagacgattatgctcggatgcagcctcacggctgagacccccgggactggtcggaaaaaagcgacatcaactgcaacgcaccaactggcgaagtgaaggtggctatcttcgcctcagccacttcgccgacctcccatccgtgcgcctcgatgcagaacgatactctatcacccttcctgagcacaaatggtaatctttccggcgtttgctaccagaatgtgctcccgcgttagactcagtgcacacctcaacgatttacaacagccaacaacagtgggtcgccgaaccgtcacaagaacttgtttatgttgcacaaccggagtcaagtgcttcctcggtccaaggaattagcggggcgtgtttctgcagagtagggccgatagacctcacttctgcacttgcccctgacagttgcctctcagagacgttggcaattcgccttttctggcgtcaaaagacatggcagggtcaggctgaaaccattttcggtatggttcctttgattggggctcgtgtttgggaattttagcagacaatggtgtttacgttttcccgtgagtgatgtgccttccactggttacttgatgcggcatgaactggcatattcagacttcattcagaaaaatgttactagagagcgacaagccgcaacctagtgacttgtggtgttccccccttgcaaaagaaaataattctcaagagccacgggtacagctgcctacgtgtcgcccaggtgactctccccccgttcagggcgtagttggggaccgttgtcgctttgtctctcgatgccatttttaggcacaacgaaaattgccgtgaactcttaggcttaaacggactaggaggagtaagtgcaacctcgaaaagcttctgtattgtttgtagctgcgaagttgactgagttgtgattttcgttcctgtacaggcccccggcggatagcaagacataatagcgtgaccgactttaggacccgccacaaacggatggtcatcagctacagaaaccggcggatctgtcgccgtgcaacaagcagggtgccccctagggcatgagctgttccacatggttccagacaggttgtcagaactgctaggtatatcacaatcaacagtggcagcttttctctgagtcacgccaaccctttctctctgaggcactttttttacgtacatatagactctgttcttgcagccatggagcggaaggcttctttgcaggcccggcgcagctggccttgggtgtatttttccttctttccgtaacacatctgttcctattggcgattgccatggaaagacaacagaatcctacggcaattgaagagacatgcaatgattctgacaatgatacgacctgcacttgtccagacgatgcagctcatggagtaaacacgggagtcaccactaatgcgttcataactgagtctaaacctacagttagcgtcaactgtcccgccaattatgagtttgtagctggtgagaaagcgatggtatgctcagcgggtaaagatgcgaacgatttgaaagagtgcaaaaccaatcccgggggagaaattaaaaaattattgtgtccagtcccagagaggttgctatagtggagcacaagtggtgacggactcacgacgaattgtctaacacttccacgagcctacttgccattatctgacaagaagttctttgtaggatgcctaccaaaggcggaagaagtgtctgggggctcgaacaggtgtggtgactctacaagtggcggctgaaaggtccatactgaaggaaaatgtca

SEQ ID NO: 1871 - DNA, 1445 bp, Toxoplasma gondii
  source 1..1445: mol_type = genomic DNA
tgagtttattaagtgtttgcaaggcttattgtgatcacacaaaccatgagtggttggcgaaccacaaagtcgagccgaaatagagatcgcgcttagctaatgcatcggcaattgtttattaccacggcgtgctcatggattgcccggcaaaagaagaatagcagctgtggtgccggcgtgcagtttcggattctaaagagcttcccatttccgcgtcgcagcacatcaggtttatacacacaggaagaaaatccctcctagtgtagcgcactcaaaatttgatcagaagacccggtcagatgcaattcaagacggatgaaatagaacagaaaacaattacgaattagagacccgtgttgtctccaaaaagtgctgagaagtgtcattgagaaactagagggcaaacgcgaaagactaatgttgtaaaggcaaggtgacgaaagacacgacttcacctctttgggtcgactcagtgagtgtatatggctttggttctttagcagttccccacctgcttccaccacactgcacggtacttgcagcctgtacctcaaatcatcgctacaccgctgctgcgtatcaacataacatgttgaagtgcaaagcgagaccacggcgggaagcctaaaaagcagaaatgctctatttgtgaaaccgaaaacaagtaatgtatgctttgagcccggtttatggttgattcggacacccaggcgtgaacgaggagggtcgacaaacgcttttgtcgctctctagagctggacccttgctttggcatgacgtggtgtactggcagagatgcggtgcggagttgttcggggcgccgcagttgagtctcagcaaaggttttgctctgcagagcttgtggtttgtctcttgcatatgcgatacttttaataaatgaaccttcgagacgggatctgttcgaccgcccccggatgtctccgtggctataggtaatctccgaggatacacggaaccacggatttttactacacgaaaacgccaaagcccagtcgcccgtaagtgtttcttcataagcatgccctcccggaatacagatgttctcagcttcgtttagagcttgttttttggcaggcttgcgaggaacgacgcagttcatatagtgacgtttaatagtggggacacagcggtactcacttagacgtcgatggaggtacgtctttgcacgttcgaagacggtcgctgctaaccgctaaatttactctggttgcatgcagtcagtctaaccgatggctgctccgcccattattgcggacaggacctgtggggtgggcgcgtgatcacagctttccacttttccttcttacttctgtcgattaccggtctgttaggttttttttgcgcggaatcgcctttttcttctcggctgggaagaagttctgggatcccgttcgcaggttgacaagagaaagtcgaacgcaaga

SEQ ID NO: 1872 - DNA, 2710 bp, Toxoplasma gondii
  source 1..2710: mol_type = genomic DNA
atgagttgcttgttcctgagcatatgtaggatttttgtgatctgggtccctgccgggggggaggggggcagttcatcgcccaggtgaaaaaatctctggtggtaaaaggttgaacttgagtggctgcagttgcggtcgttcagctcggtatttctgttggtgcctctatgaactcagtccatgttcctcacctcaaagaaattaaattcttataagacaggacgtgtcactacgtcgcgaatgctggtcaccgatttgcctccaatgcggcacaagcacagcagagtagccacgtaggtatatgtacagcagcaacagatttccacggggagttgcagggtatcagcagaggaatggtccttcacaacacaaagcgctctactgcccatccacagctatctttccttggaggacgtccgccccaaagtactggtgggacgggagagtttcacgttacaaagcgacaaacgccttcttagtcaggagatgtgtggatgcgggtccccgtgttccatgaaacgaggccgagcgagcgccttaagagcaccaaaaatgcaggtggtgtacttggttgaactctggtgcatcaactgaggaagttcatctcttggaggatccagatcatttagaatgcagcctccaaaatcgagttttttcttctacacaaatggcaagaggggaagcttaatcagtcgtatacaggaccagaaagcaggactagaatgcagcagcgaaggtgagaagtgttgccgtaacgacaccttaaagtgtgcgccagtctccgtgccgcattctggaagtttctcgacaagacggaaggctcgagacactagaattcgcatgtgcacgcgattagacatcatccctcctgattcgagggccgtcagccgcatgcgtcactgcagtggggcgggaatatacctttctcctctcgtcatttagctcgtatgcgctatcttttccctggtagtatgccagtgcagaatggttattcccggtagattcgtttagagttatgtagcgccttcagggaaattctaggtatccctgaatacctctcctcatttacctgtctggggtatccggtagtctctcagtgagacttgttccctttagcctcatctgaagcaaaccgctcgagggatcttctgagtgtttggtgtacaacgcgtgtggtagttttccacctcatctacgaagtgaatctgtcactttgtgtctatcgccacctgctacttccttgggtattgcacacacattcgttaagattggtgagcgaagcctgtcaccacgcttatccgaaactcgcagatgagtacgctgaggtgacaggcctttggtctatcaataacagtcggtgtagctttttaaaaactgagtcgcgaaacgcttctctagagcagggttcaagaagaccaggcgaagtctgcttcctacgaagagaaaaagggaactgggtatgcggttccttaacgtttgacttggcgattcacgttcttcttcgtcaaattccctgaattcagtttccaggatctttcatgtgcaatattgatagcaacacggcaatcgagtttcaacgttttcgttcgtaatcgcgttgccgggtttcgtgttgaatgcatctgggggccgcggcggttaagagcagccttgccgccagtctgctcgttccagtgaaccaccagctggatttccttgttcgtcagtgaaacgtttccttcgtccctgtctactgttagctgtgcaaaagtgctctcttcttcatttggaaacggttctcagtccctattgattttacttcccccaatcgaaataacggtggcgcaacgcttagctcgttacccccgacggcttcgcggtggttgtggtatttctggaataggaaggggtttgcccactggggttctagggtatcgctcagggtttctctattcgggttatttcagggagccaccgttttcctgtatttgtgagagatgttgtggcggagtcaacgctgtggtgtatttctaacgcgtgacagtgagctctgcgcgtggacaggtgatccgtgggggttggtccgaggagagagattttgcatgtagagacggtgcttctgttatcttcttaggaaaaaccgtattcttgagcggtctgatataagcttctcctttgcgtttaaaaggaacatcaaggccgcatgcatctgctggccactttccaaagaagcgtgactggggtaaactctgtggctctttgttcgcttcgaaagtccagtataccaaaacacatacatttgtcggacagtttcaacatgtgacgcagagggattgcctgtcctttccgcacgcaatagaaccagtacgtcttaggccacctgtgtggttgagttccgtagaccatcgtggcaccctcgccgcgcgcttcccaacatccgtaggctggcctctctgtttactatgtctttccacagcgctgaggtttggccatggctcgaccggcagcctggtctcaagcgcagtatccgagtgagaagctcttggcggagatccagggaccgggcaggggtactgccacggggactgactgcgttttacgattctgctgaaaggcttttctctgtcgtaccaccacaccgcaacttttaaacaccgtaccttctcatcagcttctccggggacggcgctgtagtacctcctgttcttggattcgacaggtagcgtccaca

SEQ ID NO: 1873 - DNA, 4260 bp, Toxoplasma gondii
  source 1..4260: mol_type = genomic DNA
ttctctgtttgcagtaatgcatctgtgcctgcgcattcgaaggcaatccgtttccctctgatcctcccctgatggctgcggatggaacgcaaggcactttccagcaaactgcgtagctttgaataaatgcaccttgaagttccgagccagtggtccaacgtatgtatgactcgctctcttcgctttcaagaaggcgccactcttctctccacgcgtccagtggagaggcgggaggaacgcaaccggcagaaatccaaggtggacgagaaaaaacgagactttcacttgcgccgcgctcctctgttggttattgcttcaaaagtcgagcgtgaaggaacgccttacagagtaaatgggatattccacgtaggagatagtcgccatgccggaaaagacgccgaaagggtttgttctcaaagaagccgcgggctgccgagcatcgaaacgaatgggagagaaatactagttgctctgtatcttcagagaggcttcttcgcccaaataagagtctctccgtgagccggcgaggaggatgaagggaggaaacgaaaggcagagacgattcgcaaggagcgacagaagctgtgccgtggttctgccgatgcgcggactacagaacgaccgcgaaactgtgaatgatggagtgcagggaagtggaggaaatggagaggagcaaaggaaaacacgatggagtcagagacaccgcaagatggaggagatgggcggtttacggcagagagccctcggcctctgggaggtgaggaacacgagacaggaacgacgagagcacccaatagtgtgagggagagcccctcaggctcttgttgatcaaaaggcccgcggaacttaactggcagcaatgaaacacggagaggcatgcagaaaagccagcttttttgtgaaatgcgtacgctgttcctccgacacaaacacacacatcgccgcttggggtgttgggaccctgttgcctccagcgcttctatgctacacacggacacccaaactcggcgagaaggacaaaccaaagcggttagtttctgcagattccagatgaaacacacgaaatacattcgcgagaataactggcgacaaccggaccgcgaaaaagacttactccgttagctggttgcaaggctttcactcagcacaccagacaacatagcagcatctgcatgcagcgcgcagggagcatgcgctggctggctaaaaaagcaaacttcgagaactggataccctgcgcagccagccggcttggattatctctagaaatccacaggcagagtagtcagtcgattggcagggcaccacttcactatctgtctatgatcacagccagatgaggtgaccgaacccggatgcacatgttcaagaaaagatgtgcagacacttcctaggtatccccttctcaagtgtcgaggaataagcttgctctacggcacctttggtaccgtcatagaggcattcatgcgttcgctctgagtcacggaacgatatttatgtggatggtctttttcttgttggaactaatactcacgggtcgctgttagacaagtgaccggtgcacgccggggatcgagtcttctttcggtttactcgttaggtattactgtgaagacatttttaagttagcgagtaaattcatgtttggttaatgggattgaccgaagaacacgtcccatcttcgtggtcaccagactgaaggacgagagagccgctgcaggcttgtaacaatttgcccttgcctcggaaggactcgaggctgtgactgttgcttgtcggcaaccattacctgatgtgtgatgaaatgttggccttgaacatcactccaaccttgttttttcgcttattatcgggttgtatagtttatttcgaccggtgctgcgctagcggcgccctgtgcgctcagctgacctcttttgcactaaaacacgtttctgtggtgagtctcagaagctgcgtacagcaccgtcacagtgacgagagagccagcgtttctgtggaactgcgtgtttctctctccaaatactattgtggtgcttgcactgaagacacctcggtagacagttttagggctcattacagtgttcttgaaggacgaggtgaaacacgcacatgcagtgacgctctcagttgtgtaggggtcacttcagtattatatctcacggaagccgcggtacattccagttttattctcctgtactgcaccagttatgacctgcaaacaaaatcaccgtgtgcggtttcgggcgacggagtgttttgtttcgtgtaccagaaaaacgacccagcaatcaacctcgtagaaggatgattaaacgcaccacgacttccacactgcattgttaatgatacacctcatcagcacctcgcagatctgcttttctgattgtccacgaaagcatcgcaggcgagttgcccggtgggaggagtttgagagactgtcaaagaatggagattggcccgcgctaatgccatagtctcagatgttactggggaaaagctagaagggtcaggctggcgtgttctgttttgttgtgggatatcaactttccgtctgcaacgatggcctgggatacatgcgtttgagaccgtgccactgaacatgccctgtcgacgacaaagtgcggaggaaactgtggaaaacaaccgaccgttgtaggagggatgaaagattgtcctcgtcagttttcctccggtgtagacaaggtcacgagcaaccatcgttcccagtatgacatagcagttgctgtgctgaatgctgtaaaacctagagttcgcaggaaaaccgttgctccgcagagcagagatggcacaaggtccggtgctgcacaagctctatagaaacactcccgcctggcggatcgacactcgcgtgatttgaacgagaacttgaccctattaacaaaacaaggaggacgtgcttgagtaagtcgcaagaaaaaactaggaagaatctgcgattatccgggtcatcgcatcattccagcacctaccacaaacggcgtgctaatcccaagatttgtccgctaggtgagggcggaaggacatggtcctcgtatatggagccactgagcggaagattgacggcggatgaagcagcacagcgtgggaggaggaacaagtaaagggctggtacatattcggctttttcggcatcaccaatggttcccgactccccgtctactttccgtgccgcagcgtactgtatctgcgtgacgtacacgctcggagttttcgttttcgtcaggccagactgttggttgatgccacactacaagttgccagatgaaagcttttcgcaatttgacccggcatgaaaagacgaatgagctctttaacgtcattcgtagttgattttgtgctcgaccaacaccggggtggtgctcctcagcgcctgttgacatgccgctttcagggtcctctccacggtagctgtcgcatatttgtattactcggcagaccggcttggtacccgtacttagtgtctacgaaaacgggctctcaaagtagctccaacaacagccactatgaactctttccacttcgcgaaacgcgtcctacgggccaacacacatgcgacaaatgcgatgcattctttttctcaatttcgagctggcggtgcgcgtttggtgtcactggcgaggagtgctgcctgttgactaactaggggtctctaggcgggctctgctctgtgtcttgtcgtttttcgatttctcttgttcttcacctcgcatttcttttacactctactgtgacacccttttagttcctgatacgggttgttttaatctttttttcctagtagcggaactttcctgatcggtttctgaattctttgacaccacagtgtcgtgcaacacctcggaagggacacatccgtcgccccgccccagtgtcttcctctgcacgcaccgagcctagttctccagaggcaccccattgtaccagcaaggcagaagttggatgtcaccagcttctcaaggactttgttttaccgtggtgagtctcttagaccttcgcggcagagaaggtctctaaaatatacgcagccaactcgtcaaatcagtctcggcagctttcgcggcggcgctatcgcacctggtggactccagtcgccgctttttaggcatgggattccggtcccggttgcacgcgagcagaacgtcactatttatatcacttagtgacagttttacttcctagagaccatgccctaggcgcaacaagctcctgccgagcggcagttcactggcatcgaca

SEQ ID NO: 1874 - DNA, 4764 bp, Toxoplasma gondii
  source 1..4764: mol_type = genomic DNA
cgtttggctggttgtcttcggttttgaggaaacaggcagaaaggggggcgatcttaaaatcctcgttgcgggtcggaagagcagagactccagtctcgctgccttcttcgcgagccttggctgctgcctcttgcgccttcttcgccagcgccttgtgcagagctgcgaggcccatgccgacgatgttctctgtccgctctgcgtccttctgcgtcggtggcgagctcgccgcgggaagcgaaggaaacaaaggatctccagaacctgcaaagccgaggcggtccagccgcggtccgccacccggcgcagcagttgaaacagaagagtcttctgcaaatgcagacccaatagagcggcccgcgcgcaggccgccacccagcggtgtggtaccgccagaggagttgggtgcaggtgcagcgggggagctgcctgcctgggtgccggagtcggagggactggcgccttcctcgctcccgtcgagggggaaagcatttccgtcacgaggcgactggcgctgagaagacaagggtggcgaggaggatggcgcagagggggcgagaccggagacggcgactgaagaactactggaggcgaaagaagcggtgaaaaactccgtggaaaccgacgaactggcgcctgacaaggaagacggaccgcctagactcgggtccatgagaagccccatagaggaggagacgcacgttgcggcgttctccgtcgaggcggagtcctcatcgtcttgcagcgcaaaatgcattttgcggaggaggtcgtcgtcctcctcctccacggtgaaagatgcatcgtacaaatcagacgagacagatcgactcagaaaggcgccaggaagcgaggaagccgaagactcgaaggaggaggaagtcgagagcggaggtgcgccgccgacagcagcggacggaacgtccgctgaaggcctggcctcagactctgccgggggatcagcggggaggtgagaaacgtcattttgttcgagacctacgtggagttcagacgaagacggaagatgcgactcgggggaggccgaagcgtcctcgctcgagggctctgccatcctggtcccgaaagggggagaagatgcgctgatcagactgccacgttccccagagccaggccatttaatggatggggaaacggggcgctcaagatacaaaaatccggttcgtaccacagaaaaagacggcggtcaaaatctgcggacgcaacccgtcgccacgagacgctgaaatcacttttccacgcggagaaagggtgagacgtttctgcagagaactgattatagaataaccgtctcgcaagaatcgcgtaccaagatgcatgcaacccctgcgaaaaacagaaccctccgtccggccgccgccaacagtcggcaactcgcagcgtgtcctgtttcctctcggtcgccgcagaactctctctggaagttccagacgtttattttcggattcttcaaaaagtgaaaacctaaaactctggttgccgcagtacatgagtgaaccgctggagtgctgtctactcccggtataagtacagaccgtgtgacgcatactggcagctggcgagtcgggtcgagagtccagctgctgggcgtgccaggctgcaaactcggagacgcgtggattcaagcctgtcccgaaaagcaaatgagaaccagaaacggcgctagacactaaaagtgtttcttagtacgggataaagtgcagagatacttcgacagagctcgtctagatgacaaatagaagcccgcctgtttgttacagagttacggttaaggagttcgcatcactcagaagctcactaaatcacgctaaaacgtcgctgaacagttcttctatcattttctcttacaactgccttggttgctcagctcacgacgaagttcgtctctttgccgggaggattttcgactcagtaacagaacgtagccagcgcgtggcctcacacgtgtcacaccaagagcaaaactccaaccatggtgcgagatttcgcgtggatgaagaattctttatcatctgttttggtgtatcctcatctttttgagtgacaacacaaagttttgtccataagtgtcccggattcactggtaattttggcagcgccggggaccgccgagaagagcatgcggccgtgccacgccagcccgagtagatctgctgtcgaggcttctggatttccttttgttgatcagcccgccaagcaggcacaccagtcactcttgatgtttattttttggaacttcaggtactgtaatgttagttttaagtcgtactgctttcacatgctggatattctcacgatattgattcggtttttcattcaagcctacgcagtgacacgaacgggcagatgcagcatagttatggcgggtgtaggtccaaggcccggaagtttatggcagtttccttgggtggagttctgctgcttttagaccagaaagcctttgcgaatggggcaaatgaggaggccctgcgtgggaactgggtgtcaaatgcggagagcgcccagagccaaacggacacctcggccggagttgccatttgtacagctgccgaagacgacaatgtcacgccatctactgcgacactgtctttgtcgcagagttccctcacagctactttggcgtgtgtcaatagttagaacaaggagcagggcaacaacacggctatgctggcaagtttgaccgctgtctgcgacggacagactacaagaccgccggcttcgcgtgcaggcgattgcaagatcgggaatgaggtcctggacaattcgtgacgctggcaaaatattctgagatggtcgagagctcggatggacccaaataaacagagacgagaaggaccacgaagagtggacgctccagctaaaggaaacggatcttcctctaacagacaaaacattctttgtcggatgccaaaccgttgctccggcgtctaacaagtcttgcaaagtgacagtgaacgtgaatgccagaccatcctctgctgacgacaaaaatgttgtcagctgcgcatacggtcaggctagcaacgagaaggccgtggaggtcgagatgtcagaagagaagaacactctcaccgttgactgtggtaaagacggatcgatgcagcctacagactacacaactcagtactgtgcacccgacacagctaggttggacgactgcgcaaataactatttagatattctggacaagtttcacagtaactggtggacgagcatagaaaaaaaattccgtgttacgctagctatcccgaagaccgatttctcgactgaagaccaacacgtcgttgtgggatgcgccgcccatcccacatctgcaacaacgccccaaaaggcatagcattcgtctgagtttgtgtctacaccatcatcggcgagctctgccttttctgccttcaatcgtcaaccagtaactggtaccactggagtggctgttatatcagcttttctggccggttctctttaagcatggtgacgagtgtaaagttgttcagaagttttaacctctttctgtgtccggttagcgtcaaatgactatgcatctgtgtagtggtattttctctcatggtatccataactctctgagagatgtatctctccatttttgtgacagaagctcgttgtggtcctctttcgtcctgcgtcgacaaggcctacaattcctggcagaccagcggactgagaagccttgccgttgacaatcagacatgcagaccatgtcacacacacacacacacacacacatgtgggggcattctcctagactgaatgaatccgatccagtttgcagaaaaggatttcgcattctggatgcagccctttcgggaagaaggtcatgtgggaattatgcagatatgtaaagaaatatccgtctgttggttagttgatctgcgtttgaatttgtaccgcagtgccttaagctagcgtcgcgaagacgtgaacagggattctcttaacagaggccctatgcttaaacatggagcctcaaacgccttttcgtgaagaaaaaggatgccacatcagagaacaccgggatgctgggattcattcaaactcctgtagccgacagtctgggcgcagccaagtgcaggcaccattcaacaaccttgttgtgcttgcgcagacgacaagggcaggcggcagagtgtatttctgctatcagagaccctccgcaatacaacgcagacttcttgactgctgatacacaccggtatttgtggtacaaactttttcccgatgtcgtagccggtcaacacagcctgcccgtagaagacaaacgcaggacgaaggcgcaccgcacttgtcagttgttctttctttggaacaattaatctgttgtgtcttacgagttccggcaccccgaacttgacacctgcagcaactgcacgaatgcggtagtttagcaaaatccgcctgttgtcataatgctgaacccagccgaaactgaagagactccacctcagtagtcaaacaggagacctccaccacacatgtactaacaaccgcttccaccttttcaagtaagaaagaaccacacacaaagcttgtctgtgaaatccgtcaaaccggccccgataaaaattccagccagcctacggttgcctgtgtgcctgcggcgttcacccgcccgcgccgcccgcgccgctccccctgtccctggcacggacgcagtgagtgcctcgcagccagtaaaagcaaacctgattcattttttatcgtcgggttgcattgttgtttcttgctgcttca

SEQ ID NO: 1875 - DNA, 946 bp, Toxoplasma gondii
  source 1..946: mol_type = genomic DNA
accagctaatgagggaatctgaaattcatcactgaaggacagcagagaacatagcataaacacttcagcagttcggagagttggtccatcacgtcgttgtatctcacggagattatgttttaatcacgagggaaaaggcggtgttgtttatgccacatattccgacaaccgttgtcacaaggcagttggaagcgactaagatgctgtgtagatcttgttcgttagattagttacagtcaccagcataggactcttcagtaaactttggtcagcgatacaaaggctgtgctagcggtcactcaaggagacagaaagcgatatggtcacattttatatcgagcaaatacccatcagttatagaagagggcaagtgcaagcaggtattgttattttcgccttcgatgtcagagaggctggaatgccctagaaggggtctgcggtgaggacagggtctcttctcgcaattatccagatgcttgcgatgagcggagaactaaaagcagctcgttttttccatgaagaataggcccagatctacttgagcggggtccagatcgaacaaacacgtgggccggggcattatatgtttttcattccagggtagacggaattgcggacattcaatcgatctgtggctatgaaagactaacctggtcgcttcaactgcctcttcgtttgagtttcggctttttcaaagcccctaggttggaaagagacaaatttctatggaagatgtccttgagcttcgtctcttgcttctctggtcatcggtgcagtgactcgtggatatgggcaaaagaagctttgctacaactaacgtccacacaaaactgaggcataacgtggcaataaaacagatgctgaaacggccactagaatgtgattcattcattttcagcagctcgaacgagagaggtggtaggttaggacaagtctgcaaaagcta

SEQ ID NO: 1876 - DNA, 2689 bp, Toxoplasma gondii
  source 1..2689: mol_type = genomic DNA
ggttctttcccatcactgggctccactgaatttcaaaactgcaacaggacattgcagctttgttgtggggcgccgcactctcgtttccggttgaaattgtttctcgttgcgcaagaggcttggcgctgagatacgtcgtaaatgaacaagccccgtttagtgaatgcaattttcttgactattttccatcgtgccaagatgacctgcgagggcagtgtggacgtctaagaacgaagagtttctcttctgatcacgctctgatacatgcgtttgggcttctgtttcatgcggccactcgccaggcggtgacggagccagtttgatgcacaaagtttgccccctatcgcattcttggttcttctccgccgaagggtggcgatagggcgacacactgacttactgcatcaagcgaatgtcagggacatcaacagtatttttgtgaagccaccgaatacgtttcgcatcgttggatcttcgtgcagtcttgtggattttcttccagaatgagcgatgtgggacgttgaggataggaacgagaggatagaccacccatgagggtaccttctgacaggaagtagcgttgttgtgggtggtatggctgaagattgaattccatcactggctagctgtaggtgtcacacaccaccgtcgcagacacctaaaatagccaacaagctttgttatctgttacgggagcaatagaggatgccttacaagcttgaggctgtggtcctcgagtctgataaggcggtgcgggcaggaagcacaacagggtcattcatggtgaatctcttaccggaaagtcgacggctgcaacgaacccacccacacaagagtaactccagagcgaagagaagttttctcgaagcaactcggattgacacagtcggtcagcgacgctcattcttcgcaaattctaggtgcgcttgtcgcctgacttacaatattgggcagcgctttcttctctcgacgtttctgggaaccaagggtagaacgtaaccgtggagtgttacccctatattggacatttgttccactcacgaaatgcttcaagaggggtgtgaccacaggctccgtgcactgtgcctgtccacacacagggatgaaagaagcaacgacaaacgaaataaagtctgaaatgtatcagagctttttggtgcttcttcgatgcctacgacggagttgttgaatgtatccgcgggggaagtcctctgtggcgcataacagagagggctgaatatcagtgtagggattcggcaacatgtcatctactctgattaggaagactctgctatgtgtatcttttcattcttctgcacgacaccgacaagcggtagcatgaacggccgcgcaccgtaacgaaatccaagtaccaatatgagagggaatgacaacggacgagcattatgacacaaacacagttgtactgcgcgtgctcgaaaacgtgattcaggttgaacaggttctgcagcaccagaagagcatgcaaaacaccaccacgatactggcttcctcggctaaacatccagtgtctgcgacccgatctaatggctgactggatacttcggacattgaagagcgaggtagcagtcctctgttcagcgggctcttgtgtgtatttgtttctctgcagcaacacagaactggcatctggggtttctaccatggttagacatgcgtttcttatgccagaaacttccacgtgtagtatacattagcttgccgcgtcgctgccaccatcacgaggccagaatacgacgtacgcgtggagtggagttgtagtgtagcagtgtgcattaatatgctccacgcagagacgcttttcagggctgagtgctaacacgggaaacgactagagaaaccttctgtacgttccccggtgggacgtagatgattcaacaaacacgggcaactacgatcgccgtttgtacctagctgtttggggcatccaaggttgtcggttgctgcagtggtcgccaaactaaccaaacacattcatattctgcaacggtacaatgcagctgggaaaagccacagctttagtggcgtgcctgacacaggacatcgcggatgtttgaccggctgctattcctgccactgagaggtttttgtacacatcacgaggacaacccatcgcatatttgaatctggcaagccttcatacgaggcaaataaaatggatgcatcggcctttagagccgttttcgcttctgaactcgagatgctgcatgtcgcgaacgaaacaacagtcgctccggcaggggctggaccctgtcgtggatcacgcgtgttcccaagagttacgtgcatgcagctaaaagaccttcgatgcaggggaaagacatccgttctctccttccgaacgatgcagtcctcctctgagcacacggtagaatctctctaattttttagaggttacagtgctacagcgactctcaaggctttgcttccagtggcatctcattcgtgtgttgtaaacccgcatccctctacgcgtcattcccgttctggggctgtggcgaggtgatccctaaacagtttcgactgcacgaccgctatatgagaataaagatgtaatgaccatgactgaacgctacatgtactcaacggaatctcagtaacacagtgttcctctcttggaggctgcgaggtgccgactcgtgtgtttccatctgtcccgtgaccgcaa

SEQ ID NO: 1877 - DNA, 1925 bp, Toxoplasma gondii
  source 1..1925: mol_type = genomic DNA
tggtgacaagtgcgactggctgaactggatcgtttccgttctttaggaacccctggaggagacgtggtttccctgtgtgtccatacaggtgaggaaagaagtttgtggccacaaccaaaagcgtacctcctcaatacccttcgtgcgtcctccagctgttctgccgtaactcgatggggtgcgacggccacgatgctcttccccaatcgaatttctgggccaacagcaggtggaatgcgcccaatggggaccttgattcggacctcctgaggcgctttgaaacgaaaaggaggcatttccacggagtgcacggaaaacaaatgtggcaacacaagccaaaagaagagtacggagccggcaagcggtcgcagcctgtggccgtctctggcggctccagaaggcgaatttttgcagaaacggccggacagaaaataagtttgtgcgtggaatcactgtcgcagtgtgaagagggatgtgctggaatgccctcgaagtgtatttagccgaaacaaagaagaggccgaagtgaactctgcctgttctggaaaggaactgatgcaaggaaatgacagcgtcacttgatccccggagtgttacgtgtacagacacctcggcatctttacgattgaggacaaggcaggacaccgacggcaagatggcagaggactgtgtagaggctggcgggtggaaggggattttcaggcacgccagaaaagcagcgagatgtggaagaaggacaggcaagacaatggaggaaaacagtgaatggtaaaaaagtctctccggcaacgaaacgacacactagcgaaaggacgacacaggcagcatcgtggagcggtacatagtgtcagtgttagttttaacatcgggaccttcagcagtgagacagaagcgaaaagacaggaagcaaaactgtaagatccttgggaaaaatagcgttgtaaaacgcctctacaggcgcatgcaaaaatccttcggggaatacaaacgccgccctgtggtacggcaagttggaaaaggaacaacgaagaagcatgaaaacggagttccgtcacagagacaaaatgcgccgttatcttttcacattctgccggaggcccgaagaaacgcgaattacgtttcctcggccgcgtaggcgcacattttgccgggtccgatgcacagaatttttacgggaaattgcagaacgctggaggatcttttcccttttctggaagctaggggagcataggcagaattgaagggtagcgaactgtgtcttcgaactgttttgcgtttttcaagatcccgtttcccgccgagaccagcgataacactttttcgtgcatgcgagttgctacgcaaataagctttcgcctctcatcacgactggactgactgcagatttgaggaacttgccagccacatgaatctctgcggattagtcaaagcaaagtggcaactcttgatgtgctcagacatccgtcgcttcctctggaaatcttttttcgcgctgagcttacatttccttaactgtttggaagagaaagctcgaccagcgcacgcaggtagtccactagtagtcgagtctacggcagcgacttcgattcgcacactgacctgggagattgagagatggtggttcatcccgagaagcagagtgaaaactaacaatacctttgctcacttcctcatcatggggaagagtcacagcgaaaatgtttgcatatctggttttctgcccgttctgtcgtcgtcactcgtccttggagctatagcactcgctggagaggacccacgacacggtctgttttattttcactctttcagtcgcatcggcttgcagcaactgatcaaaaaaattctcaaagaattcatcacgacgatgttagtccacgaagtaatacgttgacactgatctcgaacaaagtgcgcagatcaaaaca

SEQ ID NO: 1878 - DNA, 4701 bp, Toxoplasma gondii
  source 1..4701: mol_type = genomic DNA
caaagaacagagtcgcgactctcagtgtttgtcggcttgtcttggtccgcgttttccctctctgtcctctggcgagcatctgagattttggaaacaggccctgcgttgcacgcagtgcggcgacagctcgagtaagcttgacgcaaatttccagaaggtgtgaagacggaaggccggaggtcgcgcgaccacagcgagcaggggtgcacagctgcagatgagactcgcttgcatgcacccgcagaagtgatggaaatgcatgtatgtctgtccagtgctcggttcctctgcgcggcgaacggggcttgagaggcgacggcttgtgagcacccctcggagcagctgtttcttacttccggcgctgcgacagaggcgacggaatctgactccgcagaggcatctaggcgacgagagacagccgacgttctcagcaaggaagaacgacatcgagaacgcgcgagaccgacgctacgcaccgctccgcggcagtgtgcgtggaggcctcgggcaagcacgaagccttggcagactgacatggctctcagtgccgcttccactgccaaaggcgaaaaaagttcagggcggtctgtgggagtccagacagaacgagcagaagcgtctcgaggattgcccgccacacgaggaaaagtgtgcacaatccctcgtaactgtacacgagtaaaggggatctctggagaagaaaaaggctttccggcgggcgttatctcgacttcagctgaagaaccttcatattgggctgcgtgcacgcgcgtcctggtctagaaacgaagttgaaaaaagcttgccacagtgtacgtcctctgaacgtggcaaggctcggcaggaagaggcgctctccctttaaacgagtggcagtgacgccttgaagacaaagaaaccgcagatcgccacagatttgcgtcagaaacaaattcgaaggtttttcaaggcaggtgcagtaacgcagcgaccttaaacggaggcaaaaggtattgtgaatggggcaaacgcccgcgtccagtggtaagctgctttcgaattactgtccagtttcgaggccgaggcactctgggatacccacaggtccgaaaactgtggacatccggacacagacggaaggcctctcgtcctgctcacagttccacgtcggtgaaagcgggaaggagtttttgagtccgcaaagtggaaaaggaaaacggcgacgtagtgtgatgtcttgtgcccgcattcacggttgcgaaaaattctatgcacagggtggatgtctcctgagtcactggaacttttttgctgtatgcgagacttcacacaaacttgtttagacgttccttttgcttggcgtccaaaagaagcaggacaacgccaccccgagaacccgtggacatgcagtttcaacgcagcgttcggattggtttcggtgtatgatgtcacggtgaaacgattccgctgagatgccataacctatgatagccgatacagcatgagaaaatgtttgacaagtggccgcgaactgccacccatccgccgtctaacatacgcggtaaagggtaactccaactggaaacgcaaagaaaattcgtgtcaggctcaacctaggaatgggtccacaccgccaagggtttcgctgcgatggcggaacgccgccgtgtccacccacttccgtctgttttctgctcagcaagcatgtgacacacgcattctttgggtctgtctttctttactcgtattctttgtgaaaggggccatgtctttgcagttttttagaaggaaggatggagacaggtcttacatgcacacgctccctgcatgcttaatgttaatcgaaactaagcccatgtttgaggtacaggcaatcgagttccccatggttgctgtttaccacacccctcactcgactgcgtaagagagctaaaagtgttgaatttcaatatcgagcaacattaagactactttacatcggttttgcatgtgctacgcgtcaaatgagatccggagtcaccaaattccgcctgattgctgcacatgacaccgccccacctgaccgcagaagaacgctaaaagtggtgaatgttttcaataccgtacggcattaaacttactgatgtcggttacgctctagacttaatatatggattactgttacagcgcatattaatacttagaggaaacgcgtacttagatgccagaatgcagaaatcccaaaattaccgaagggtgagctgctcttctcactccgttgatacggattctgtctctcgctctgctgaaggaggaaatctccgagcgtttcttcactacacaagacacatggaagtccaactgcggcattctccgagcaagagattgcgatgttcttgtcttggagaggcgacaagttggaagaagtggaaacagaggccgaggagcagctttttcgctggcgacttgcgtttgacgtcttcactccaggcggccccggctgcagaagcctaatgtgaattggagaaaaggtagatgagatgcagtaatatggtaacacgtgatgtaaactcggcaagaggtgggtacgcaagtgttgtagtttggtgactttgttagaccaacctccattttttcctcgtcaggtcctgtgggacctgttttaggtgcagaaaaagttcttgtcgttgacaagaaagaaaaccgtcttttcttagctctgtctatttgcttgcttttattacagcggaaatgccgtgctacacattcccaactgtgatggtttctgattggcttttcgcggactacgcgagacagtcggattcgcaactgccattgaatcccaagtttccccatctgttacggagttcctcaggtatcggtgtcctcagtctgactggcaagaaacgggacactgggaacggtgctccatgagccgacacagctggattgttgcaaagtgttttctgctctctcctgccttctaacaggaaatcgtgggcagggtgttggtgagtgttctatgcagcacaaactagagcgtgttcggttccgtcaacctgtcgtctacgccaggagagttcaacagatgatggtaaaaggtttcccgctggggcgttgggtcataatcccgccaaggaaccagccattcccccctcgcttgtaaaatatctcaatctttgcagagtcaagggggttttgaatttcattgcttcccacacacgcgccggcagtcgggaagcgtggctagagacttcagcgttgtttagtactctatttccgtcaatgccaaacgacgagcagctctgcacgacagcggcgctgcgcgctctcaaaggttttccgccgggaaaactcgtccgtttttgacgacggcaacctctgacgctcgtaccaacatcacctcgtcggaggtcagcaataggttgcctgcaagaattcattagcatgagtggttactccctacggtgacttcccgtacgattcagctcttttcgttgacgtgtccctgtaccattgcgtctcagttcttgcacctgtgcacaatggtggaaggcgactgcgacagcaaccagccttctctgtatctgctcgttttttctggaatattggttctgccatactacgcatagtggacgacgagtgcgatggtaacaagacttgaattctacgtagtcgtttttttctgaaagccctactctttgtacgaaacgccagcgtccatgtctcaaactcccatagcttcctgtgagatgcactatgttttcaccagatgcagcgaaggtggtcctacgcgaacctcgtgtctcttcgagaattttggtttatgcacgagactgctgctaactcggtgacacgtcgtcgaaacgtagtcgcttctggaagagcacgggagattgcccgagatcactatttttcaaatatcgtgcgtcgtcgtggcataaagcagcttgttgtgttcaagagccagttgtgctagtttctgttttcgtcacttggtggtttgctcgtctcttgcggtgaccttgtctggtgggtgttctgtttatccagttgatgatgccgagacatcattcgcattggtaggtgtttctcgcggttgcgcaaccgatgttccccgcggactggcgtgcgactctctcaacggcgactccgttgcgtttcgtcggtggcaaagcttgcggggccacggagaactaaaaaaccgaaaaaaaaacagcttctgtgtttgccttgcgtgctttccccttgaggaagatggaaaatagctggcagccctaaacggtttgactgtcggagttgccggtttttgtgtttccgtggacaagatcggccggggcctgccgttcttgtaaattcattccctcctgtcttttcaccacatcgagacagttgttacaccagaaaaatagcgggtaagagtgtctgattcacaaaacgcaaagtgcaagccgattgaacctttccgggcgactagcagcactctactgtgtccgtcgttgtggggaggttcatttccgcttgctgccactttttgcagtcgcaagcgccgaaagttcgaggcgtttttgactttctgtccgtcacttctccgcattgggggtttccttttgaccgctgcgccattgtctgaacggcgtgggcactttctctgcgttgtctgcgcccctttttttctcgcttgtctacgccgtcctcttttctccagatcccctggaagttctgcccaagcactgtccaaga

SEQ ID NO: 1879 - DNA, 3456 bp, Toxoplasma gondii
  source 1..3456: mol_type = genomic DNA
attcgtttctcatattctcggtctacaccaaagttacgcctgcttcacggcgccgaagattcaccgccacggacatttgattgcaaaatggccaactactatgtttcaattttcatctttttgggttagatgtgccgacattactgtttgtcgaacgcccgaggatgaattacatgtagattaaagatccgatgactttagctggtatctcctatacaggtggtggtccgtcacgtcccccaaaacaagttcgatgacatagacatgcccatggatagaacgagagtgactggctctcaacaaggactcgaggtccactcagcgttgacgagcgccaggtatttctcagcgtttcacgacgccacccaccgcaggggtgtaggaggtgtcttgcaagaagacacagaatgtaaatgtaccggtaaatataaaaagcaatacggactacaccctgttcgcctcactgcaagtgacgaactcaaaagtcactgctggagccccccagtcgacctcttaccgaaggagttcgcggaaggaagcacggacgcattggcgcacagacagttacctcatgagacaaatgagaggacggcaatctgaagggagtgggagtggctgtaggcaaaaacttgtcgcttcgttgtgggaggcgcacccagtcgtatttctctcaggacccaatcaagcgacattatccacagtttattccaaacttgcaacagaccgcgggagcagaggtaatctgagaggtaactccgttcttggaaatcgtcagactttcgcaccctctgtaatgcctgttgagtccttgcaggaaggtgatgccaagagttcctcgccctgcattctgctgtatgcaagggacgccgttgcgcgcgtatctttgcgacaacatgcatgcagatatggatcattcctccaccagttgaaagaacggatgctcccgtatcaatgttctgctgtctaccgcgttagctcgtgcagatcgaggagaagcgtcacaacatccagaagaccttgaaactcttgtataaggaacagacacccctctgaagcgaatcgactccccttcagacttttgagcaacttttttctgtaaactttgtcgtaggcatctcgtgcttcctctggttcctttctgactggtcttttgaatttgaattgacgctcccgatcgcgtaagatatcagacagtgtctcccaaagactaactttccatccacttggaggctgaaacctgttggtcaccgttgaggactcctgtgctctgatgggatcactataatagagacaggggcagagtgcaaggcatttctgtgcctttggggactatggtgaccatatcaatcacgaacgtctgccatgtggactagactacgaagtttcacgtctctgggcacaagttcgatgccatacacgtggtagcccacaagtctttttgaccaggctgcatatcaagaatttcacaccgtcgtcagtgaggggttttgcccaggatttcgacagactgggacccagaagcggcattagtatcacctggaatcctaccagcagttgctcctgtgatctatctctgagcctgccgagttgtggcgtagggagtttgacgctttacggatgcgttgaatcgagcgtgtagtctctgtaggtgagggcaattccatgcgctagaggttggtcttccggtgttctatttaataacatctgagtacacgcctcctgtctctgcaggagacgcagtacgaaacggtcttgtttttccacgtttggggtgctagactccacatttgatacgaaaagcttgcctacgtactccttggcgcagtcaagtttcttatatcttgcacaaggcaaacaacaggggttcctcctgaaccgaggatttgacctacgcggagttgcgctctgttgcctccctcatccatcgcatggcacatggaattaatcggagtcaagtcctgaaaagcttctaaaacgtttcggcttgtgtggctgtccgcctccagtcgcaggggcggacacaaaaacgacatacaaccgctccatcttctcccataagtagctttcctgttccagccctcccgaagcaacttttgtctctcaatccgcgcacaacttcctaccctgctgtgaggtccgaccgttttactgataccgccagatcagtcacctatggaggccgcagccggggagtctcccgcgtacgaacccgttggccacggtttaagtcaacccgcgagcgacgccatagaggagaaaacgttctttctagacgagagcctcccgcatgtggtgtgtgtttgatgctgggtcgggctttgaatctgttttgtccggctttgcatgagtctgggcgaacgataaactctcgactacaactgtttcccgagcggagagtgtaagaactcgccggagcgagagggagatgcacaaaaaattctcctgtccttgtttctgggaccgcctgcaggctagaccgctccagaagtgcgatttgttttggtgcacgcgatctgaaagccctagcgacggcgaccaccaaaactggtgccatccctgggcgcatgacgcacatcgcatccattgttgttgagcactgcacggaaagaccgctgcatggtttcctggggatgctgtgttcctatcgtgaccgtcaccattcaattttctgcggaggcaagactttgggatgcacagcgggacaaaatccacactgtaacctgacagtggccaaggctgatcgatccacagaagctagtcgataacaaaaagagacatcgccgcgttccggttttttcagatgacatcagatccgaggttgaacgcgctacggctgtttacacgttagcctttcggaccctgcgacgaacaacgtgtcatcgctgaaaaggctccgctaactggcaagcgaatacagtacaagacatggtaccgatccagcctgtgaggcgtttgcatggcctggcacggtgtcggtcagtgacgaagaacgtacgcgactctctaatcattgtctgccctgttacctcgcccaaaatatgcaactggctgcttctgcggcatcggcgaacaggatgtcctcgtgcaaattggtgtcaaacgggcggagtgaaactgccaagctagttatgtggtctgcgtgaaacctaggtagatcggtaatctaaagacggcacagcacgcccccccatcagaaaggcccaacacttcaccctggccgtttctgatgcgtggctgtggcgcgttatattcatgacttcgttccttgcaaccgcctgccaaaaacaccaccctgactaacgcagacctccaaaagggtccgacaatgcgtagatcggggcgacgaatctattccccggtgccgtatcgaaagcggaagtaccctttgtaacgaatagccgcgtctcttactccctgcccaaatagttttaggcggtcgtttctttgaacgagata

SEQ ID NO: 1880 - DNA, 4190 bp, Toxoplasma gondii
  source 1..4190: mol_type = genomic DNA
ttgtctgcgtgagaatcgacagcgcggtatccctcgggtcttaacggatccgacatcgatgagaaacctgcgaactaacttctgtatgtggaactcttgtaaagttgtcgcggtggaaggtttctgtttttcttggcgtgtatttatagtgttctgcctcttgcgcggcttgtctcctctgctttcgaatgatgcttttttctcgtgggcgtggtttggttgttcatcttgtcgcgatcccactgttgatacaaccctggatacacagtcgttgcagagaacacaggactgtctgaaaacgaacgcgagccgtttcctttgtggtggtttttgtgaatgcaaggaattcgctggtgctcgttcaactgggtctgtttctacattagtcctcatcttagctttgctctgctagcacagtaggacctggatccactaaatagagacctctgttcacgcttctgtgtccggaggcacgagtttagttttttccccaggtcccagctgtggagacgagctgcatggacaacgagatgaaacacacctgacggaggctcgcgttattggaaagacgcagaatcctcaaaccgtttttcgggttgcgcccataacgcaaccgatgtggaattaccttagattctcaggatattgaaatccaacatgtttagctgtctgacgcagtccattggggtggtggattacaccattcaaaaagaacctgctggccctatctcgtaaccggaggcgtattccgtcttcgccggcacgcctcattttccggtcttgtctcaatcgcctcccaggacaggcaatcgttaaattcttaggtatgattcgaaacgcacaattaaaattggaacaaagtacggagtacttggcccggaggtttgttacgttttgtagacaaatccatgcagaaacttggcacgccttactcaatataaacgtgagcattgcgaaggggaaaatgttcagaatggaaagtacgaatcgtgtcgaacggaaaattcgtttgtcacttgcaatgcatagcgtatgatatggtaagaacttgagtgccgcaagaagagtggcggtgtttgtgatttacaaacacccaacgtagctcgcgttttgcctttctaaaaacgttgccccgaagtgacgcactcgaatcctcaaatgtgtatgaatggaagtgttcggacgttgcccgagcctcacagggaagcgaagattggtgcttagaggatcgtctcctctgtttcggtgctggggaagaaagatgtatgattcttactcttcacaaagaaaaacgcagaagagacgaaattgcagcagagatatgtacaagaaacgagccgggaaagactccacccgtaccgactgaggcggttttttgtgtgacaagcaagacacaaaatccaagaaaggggcaggtgccgggatggacctggcgaagagcactcaagaacaggcgcgaaggtgaaataaggagagaaaagggcggcacaaaaaagagaggagaagcggacgagatgaggcatacgttcgcaacgcgccacggaactgcacagaggggattcagtgaagcgtgaaggagtggccagacacaaacaaaggtcgatcaccggataggagatcttgacagtctttgactacctgaaccaagatctgttgcattatattgcgcattttagcgcatcttgtttgtgtggaacgcatatgactaatagggatttgagagcgggaaaacggcagggaagcgatcaaggtaagccgcaaaaccatgttggtgacagcgcttcttttcaccatttactttttcaggccttggagggaagggcgtcgtttttgcgttttcatctggcggaccataccttggacaacatagattttctcgaaacactgtattcataactcagagcgggatcgttctgtgtgtgtttctgtgagcattcgaaacctagaaacgttggagcggctaaggtatgcatttgaacttgtgattgcggacacacatgaaagatgaatagagcgtttcgctgggcgtgggtctcagagtattttgctccacgatttgaaaaacaagacatgctggcaaattacgagtcaagctgccttgtaggggagagaaaaaaacggtcatctccggggagttgtttcactttgctgctagccccctcacagcggcgtacgtggcgccttttggaaggctttctgggaaaggaccggcgttgtagcaaaaaacgcatccggagttgatccgaaaaagacccagccggacgaccgcctgaagtcgcctgcctctttttttgggatgaacatggatacacttgaccgttttaatctatcaaaggaagaactattttgtgcacctagaagaacatgtgcgtcgccggtgggcgagattgacgaagcgccgaaaaatgacaaaggggcacaccgaaagcttcgaacacgcaggtacccgcacttcaactttccaatgaacttcgcttccactcgccaacttcgtcgcgtcccctgcctccactttttccattcgtttcggttttttccgcttccccgttcctccagaagatcaacgcccatccctcaagcacacagatctcctcgttagggagtgagcgtgagggctgggaaaaatattgaaaactctttgcaggcaccgccccgtctacctcactcacgcttcccttcaccccccagctctcggtcctccactctgctttctctgctgagctctggcttggcttctggtcgtgtaccccgaatacctcaaacggcattcgaggtcccctcacaccgaaggagtcgcccccgctgcgccagctgctgcaccagccacgccggatgccaagagcgcctgttgctgttggtagaactgagcctgcgtctcaaacatttgacactctttctcgtaatggaaaatgactggcgcagcgagagtgatggccgcagtcgacgcgacccatgcgactgtgctcacgagccagtacgagtttgtccacagccgattcaggcgcttgtggactctgggcggaagcagcgaggacaggaggttccccattttggaggaaacaggagagcgagtgacgcagaggcgaaatatcgaaaaacagagggccaggagactccaggagagggaagcgaagctcgcgacagagacacacgagtgcagatggagagaatctaagaaaccagccgagaaagggtcctggaccagaaggaaaaggcaaggaaacagatgcagagccgaaccagcgagctggaaaaaaccgggaaaccgagaagtcgaagaggagggagggaaagggagtaaaaacgcacaaggggggacgctgtggatgataggaaaagatttgccaaggaaaagaaagtcctttttcaggacaggtttggtcacccaagttatcttcgcagtattaatacatatgctcaatggtctctcctacgcgtttctgcgcgcgtcagggtgagagaggtctggggtgcgtgtggcacagcgacgattgctccggctcgagagaacagcaaaagtaaaagagcgagaaagacgaataagatacagagggagctgcgatgaaaaacagcttcctagtcttgagaaaatgtggaggacgaaacacaccccacacgaatcgacggaagagcaagattcgcgcttcttctggcacaacgcatgcacgctggaaaagaagcgcttctcaaacttgaccgaatttctgcttctgaactccatgtccctctgcccttttgcaggtatttcttcactgcttcttgttctcgtggtcttcttctcctagaaaagtgccttggttaaaccgagcttccgacctcgaccttccttcgttgtctcagggtcccttgccactctggctgcagctgtctgtctctctgtcccgcgcgcgctctgttctttttcaccttgcacttcgtttctgttctttgctctctgaattgtttcttttcgtgtctcctcctccagtctttctttgcctcaggcttaccagtctccttgctttgccgtgtgtgccttctctgtctcttctacttcgacctaggtctctccttttgtccagttgagtcctccgtctcctctcttctctcttcttccttgtcttccgtctctcctttcctttcctccctcttctttcctgcgtttttcctgcttcgtcttctctaacgcattacacgtctcggcggcaaga

SEQ ID NO: 1881 - DNA, 1647 bp, Toxoplasma gondii
  source 1..1647: mol_type = genomic DNA
cagctgcttccgcaggtaaagcaagcccaacaacatacgtaaacatatatacatatatatatatatatatacaaatatttgtgtgactatttgtatgaacgtgcatacgaatatgcatgtgaacgtgtatgtgaattttttttgaacagttttttgaatatttgtgaatattaatatgaatatttaagtgaattttttttgaacagttttttgaatatgtgtggatattcatctgaatatttatgtggtttttgtaaatagttttttgaatattttttttattatttgtatccacttgctaccgcgtggcgtcttactttcgctcaagtcgttgaggcgcttgaatttttggtccacgggcctgtcgcagttgagaacttttttgtaggcgaagaccggcggtcctgcagcagccgtcgaagagagcgaacggctattttccggctttctctgagccgcctgcaagttgcatgcgccgcatgcgccagcacacggcccagaagaagcgcatggcggagaaagaggagacagagaagaacaagaagagggaggagagcgaggagagagtgaagagaaaggcaggcggctcatggcgaagagaggtgagacgacttgatgttttcgacgcagaggaagcgccgggcaaagaaggcgcacccgaagcggagcagaaaacatggggacgcggaggaaggaaagcggtgaagaaatcgcgacagctcctctcgcagagctctccgacaggagggcggatccagcactgaagagcgcaaaaaagaattcagggagaaaaacggcgccttcaaaggcagagagcggctgtcggagtttactctttttggatttcgacggatcctggcgaaagaaagctgtgaagagcgacaacgcaacactgggtcctctggatatggcagcagaggggagaagctgcacttgaaagcaggcaggtaaacagagcgactgcggtgaatggtccttcctcttaggctctgaagacgagggaaaagagtcgagctgaagcgttgaagaagtcaagacaaaaaaagaacaagaagcgtggaagaagcgccgtgtaccgcgcatgtctcgagaacagcgcgcgtccggcttttctcacgcgaggcgggcaggcgtcctgtttttttcgactttcctcgcttctccgcggagtttcgccgtttatttctctttggtctgtcaatcgcgattcagaacaaattccgaaaggaacgagtgtgagtatggtcagtcctcagggagggaccctggggtcgactcagacgggggagggcgccactgacaaagaaaacttcctgttgacaagagatcgtctcttgccttgaaagtttcctcagagacaactgcttctctcgttgtaccagctgctttaggaactcttcatcagcgcccgaaaggtgtatctctttgccgcttcttttgggcagtgacgctccgtcagtccacgtttgcgtttggagtttccttctcgcttccgcgccttgcccccctcgtctcgtcggcgtcggaggcgctgcgcttcttctctcgaatttaaatcgctgagaagcacagtccaggagacggcgtttcgagccaactttcgtcggaaggcgataacggcggttcttttctctctccgagacaaga

SEQ ID NO: 1882 - DNA, 3847 bp, Toxoplasma gondii
  source 1..3847: mol_type = genomic DNA
cgttgtaataaagtcgccgaacgcatgccgtcggcgaacagttagaggcagcaccataccctttttttgtacgttttcttcgccgtatgccgcaaccagcatattgcggactgcaaactcttgctgtagatatttgacaaggtcccgtagtaaggaactacgccttcggaataaagacttgcgcacaaattgcaacttcactgcaaagtgttctccggtggccaccattgttcccttgaaggcaatcccacgggtgcctcgcccaaggacgggacctcgataaagtacctcatacgttccgccgggctcatcaggttccagaattaaaagtttcccggagggaaacttctttgcaaacagccgatccaccgacgaatctggatcaggccaaggtgtgacgtctggcggcacaaatgcagcaacctgagatttcaaccactccctacccactgtttcgatgcgttgccactcttgccgttcgctcagcacagcattgtcctctgatacctgaaactcaagcagcaaaacaacgaaccggtgtgagcgtggttgacaccactggaagtgctggggcgtgcttcaccaaagcgggggccaatacgaaacttggcgacccgccacaacaaacgatgtgaccggcgaaaggtgtcacacatttctcccccttggcactctgtacaacatgatcaaagatcaaacctacacaccacaataaactcaacctgatgaatcgtagacgggcgggtagaattacgaagcataggcaacagggtatttcgagtgaaacttgtgcgacgtacgaagtgcactcacctcatcgtcatccttcgcctggaggacggcttctgactcgggcctttcactctgctccatactctgcttgtcttcttccgccggccgtggtgggtagagcgttactgaaaactccccgtgattgtccgtctcccgcggtaccacaacagacgcatgcaggttcacgtcgctcttttcacctcgattctgcgcatttgacctgtcaccaggcgcacgcgccgtatctgataggacggtgggatcatcaccttccattcctcgcccttcctgagcaccctcaggtcctgtttcgttctgcagctctccttcagaagttactgcgccctgaacaacggaaacagtgctggagaatttcgacgtaacttgaccaacgaagcacacacactgccccatgaggatcgcagcggcaaggacaaaaaggtttcgcggcatcttgatctcatgacactgacaaaaaagatccttgaacattagttgctcacaacacatgagagcacccagatgtgaaaacatgcactgtcgattcaagacgagatgcagtctcggtgtcgcgcgtcgttttggcagtccagtggcacgtctctgattcagtcaactaacaagccagtgccgaccgcatccaaaaaaatgtagaatccagacactgcgtcaattaccacaatggatggaccgtttcgggtcgtttgcgccacaaacatcgacactgagacaccaacgtctacctataaaaccgttctgctgcttcactcgtcatatatgggtaccgtgcgtattgcatagcctaatcaccgcatgcgtgcacttgacacactgtgtcttacggattgtggcacggtagagcagaaatagtgtgatgtgcacgtgcagaagattcgctcgagctccccgtacgttaccatggcgttcaccgccaccgtcatgacgggtgcgtcgcaatcaacgtagtaaaaaaaaggtagtcgaggcgtgtgccagcagtgtcatcgtcgcactgacgatttcgagtgtgcagtcggtcggacgaagaccgaaaatgcatgctttctatctgcggaaatagttcccggcgccttataaaccaaaagtgtcattgcaaacgaatctgtaccgcatggacagctataaagtagaactttctagatcgttatgcagcgtctgcacctcgctgaatgtgaaactgttttttttgttgttcagcacacgcggtcacaatcagacgattttggggtacaccagctagctcacaaacagctagcgcaaagggtgttcgaaagtacacatcaaaggagtgcgcaaattctcctcactactgtttcacaggcaagcgtgggctataaatgtgcacacaggttgatgaaaagctagacactagaagacctatgaacattacgttggtctgcagcgcccagtagcttccatcgttcttgtgacgaaactgattgtcgtgaacagcggcctcgaaaggcaggttgttaccacacaccaacctagcgagacggccagatcggcagacccaatttagcggacgttgccgacaagagtatgcggtacacggcggtaagtgcatgtgacaccgatcccaatatggcggctcaaccggaaatttcaccccagagccgttttgtgaatcaggaagggaaatcagatatcttcgtgaatttaccaccggacacatgccacgccttggggactttgcccgggctgtaggcaaaaccagctctatcgagagcgtggaggttccacgattcatcgcccaccatttgttgcccagacgtctcactctcgctgcaactagtgctttcttcgggtcacacgctctctgtcgcccacagttttctggattttccgtttccactcacgcagcacttgcgacctgtgtgtctccaactagcttcggggcgttgctcttgctttgtcgacgccagacgaggcgttgcctagagcgagagactatcggatccaccgacttcacataacctgtgttacatgcggccgaaagacatccaagcgacccaagagctcttcgagttagtgtgtatgtcgatcccgtggattccacggtactctgcacttctaaaaccgcaaactgaggtgccgtagaaccctttcgatagagtttccttccccagatggtctttttgctcactgaaacccgactctgcatctcttttggtgatttacttttgtctcttcttcgtcccatcccccggatgcgtgcgcggcggcaaacatcaacggcagagtgctagccagcgaatgcggcaaatgggaggggggtgagacatcggacgaaaagtcagaaaagtgaggattaagaggtccggaaagaaagggggagaaaactgatatatttaaatcgctgctagcactgtatagtttcttgcacacttgctcttctcgtgattcttcgcagtggccgcccgcggcctcccagccactttggtgggcgccaagaccagtttcctgtgttcgttcgtgctcatattgcacattagcaggttccatgttctccgttctcctgaagtgtggcgtttccctctggctacgccctttttcaccctttctttttgcgtgtctccctcggttttcacttctacatggtcagagaagcaccgtagactcgctcatcgagtctgccatccttgtgtctccattatcgctgcgcatgcaactggatggcagcttgctccgtcttttctcacaggacaaactgtctctctttttgtctctctttgcttctctgtcacttttttcgtctcgattattctgtcctttccctctctcagtttccctgtgtccttcttgtctcctgcgtcacctctccacgcgtatttcgcgccgttcttcaccgtctgtcgcgcggtctgtcgcacaccgtcttctccgccctcctccctttttccacccgcgttgcgtttatctctgcccatttcttccgtgaacacacattatttgctcttgaactggtgaccagtaccttttcaggtcgtggaactctcgccttggctggcacaaggagacgcaaataacacca

SEQ ID NO: 1883 - DNA, 3667 bp, Toxoplasma gondii
  source 1..3667: mol_type = genomic DNA
acgttttacatatcgtctaaatatacatttgcgtagttctagcaatcctgcaggtactgataccgcggaccgaactgcggagcgcagaaaaagtagagcgaaggaggggaaaaaccgaaggacaggacagagcctccggaagcccagcgttgggcgacggcaccacatgagagacatggcttcactgctaaaaaggctgctgtttttccgaaaccgaagcgagaggacaagccgtgaaacactgtgaattcgtgatccccctgtgcagttctgtaaagcgacaatcccctcgaagtctcctttggccttttcacccgccctcttttgttcgccgtctgcccagtgacgagcacctttcctcttctgcgagatcgcgcctgcgtcgccgcgctgtctcgcatgcgtcctgcggtgtatggacccccggtgtgtgtttggttttccctctgttagcctccaaggcgaagcttgcggagcaggaggcgcaagacaagttcactcgccatgtctctgtcgacctcgtggacctcaaagaagacccagtgtccttccccttcaccttgaaacagcgctgaagcgttcgaacgaccccagtctcgccaggtccgtctctgcgttttccttgtgcgagaggcgcgcctgttcgtcgaggcaaacgggagaggactggcgtcagccgttctgcgtctcgcgtcgtgcgtcttctccttcgctcttcgacctaagctgtgtccgcggaagcttgacgagctcaagcgacttccatcctgcggcctcccgcgacggaggccgtgcagcttccactcgctgtttctcagctgcttgtctgccgccggctgtttcgtctctgccctcatctctgccgcctctgcgtttgttggcgcgttctggcttcgcactggcgcgcgcgagtcgaggcgtctccggcgcaggcttctgatctgagagaccttccgacgaccagcagcgtcgcgaagagtcggggacgcgagaaaaaaccaagacgagagaaacgatggcgggccgccaccgaaggaactcggctggagacaactgacacgaggcaaaacgttcttcggcgacgtccgaccagccgtgacattaactcgagtcttcgcctgtggatgactctcgacttgcgcaatagaaacgtctctttgtcacctgaggattcgtcggaatcctcgcgtcgaacgccgttcagagcgattgtgttctaggcgcatcttgtcgaaggatgcctgttcaaactctcgccacagctccttcacaggcggctcagagtcgtgacatgaatgcaccgacacccggctccccggggctactcctctatagagtcagatacatttttacagaaggaaaagattcactttccctgtagaccgcatcgcgttttctctcagacactcttcgctgctgactggagatcgtatttcgtaagcgtctcgaaaccgtctccggttgggccttcttcactcgggaaacgtagcggaaatctggtgcctttcagagaggtgctcggccggaacaaggagacacgagaaaaggcaagaagacgttttacagcgattttctgcactgcatttcctctcgccttcgacggtcacaacctccgcctgctgaatgcagtctgtcgaggtgtctgaagaaaggaagggaagaaaactcccgccaaaacaccgcatatttccatcctcgcttttccgtcgaacaaggaagagatacaaagacgtcgcaaaggatgcttgcggtgtgaacatcggcaacaagaacgctccaaacagatgcaagagagcgccatttgcggtcgacctcgtcgctgcgatcagtgctctttgtgtctctacgcgctgcccctgaagtcgtcgatacacagctgaatctgcgtcgcgtaaagaactcttcatgcgcgtagtttccacggacaatgcctttaaaagtcgccttcaagagacagtgcagctcgcaacaagttgtgtcgccaactatacgctatagacctcaccatcgtcagtaaacactggtgtggaatctgaagagcgcactgctctctcgctttcacgagagacatgtcgaagtcgtgaattgcacttatctaacgcgcaggggaagccctatgcgctcaaccgtaaatcctaaagccttcacagtaaagaaggaattccaggactgtattaaaactgcaaactctgcccaggagcttgcgcccacggcgttggaagcagaaaaaagaagcctggagatttcggaagcctggaaatccgcattttcaacagtcagtgacaggaaatgtaacttccgctcttctctgacgttgcgaactcgaagtgaaagagaacgaagggccttccgcgtcataaatcgacttccaccttttttaaaccgttctccgttttcgtttcaaacagaaactcagttttctggcagagtcctctctcatctcggtcctcttgtgcatatcgaggagccacgacaaacagcatcattgtatgtttgcttcctatgagtatatgtatatatatttatatacatacatatatatatacacatagatatgtatatatatttatatacatacatatatatatatatatatatatacagatatgtatatatatttatatacatacatatatatgtatatatttatgcatatagaatgttatttggagccgaatgttttcgttcctttgatgcgtggaaatgcagcaggaaaagcctggatgttgtaagacgttgaagacgtccactttctacgtgtgtggaaaaaggattttctcccttgagacgagatctgatcgagtgtcagtagaaaatatgcagccgcgttgtaatacgcggtgtgctcgcgagacatcgtcggctgttcgtcgcacacaaggacttcttttctttttcttccgtgggcagttttcagcacagcggcttgagaagggccagagggcgacgttcaaccgtctttgtcaaagagctaaaaatcgatttttcacggatctccagtttttctcagcagatgtgcaactctgtcgccgttcttctctgctcccagctctcccagcagtttttttttccacggctgcgtcttcgctgcttctcgcgtccgagcctgcctcttcagtcgagtaatctcgtttctgtgcgtctctgtgccgttttcaaaacagtggcgacgaagccgatcttctctttgttcgcgcagaaacgctgtccgcgcgaccctctctctcgcaggactggttgaagcgttttctttgctttcgcttttcctcgcttgtcgctgtcttcaacgtctctctgtccctgcgctttccacttctcctgctttctgcttcttttcacggcgaattctccttcctgcttggctcccgttctccctggctgtcgtactggaaagcgaggacctcctggactcacaggacatcgacttcacagtcgagacatgaaaaacagccgcagcagccgcggctgctccgcatgcagcgacgaagaaaccgctgacgagaagacactcgagacctgggaagaatgcgcctctcggaaaatggacatgttctgaaggaagaacgtctgtccttctgaatatgaaaaattaggaaaggcgagccagaggcgagaggaggcacggattctttttcctcgcattctcgaagtctcgggggggcagcca

SEQ ID NO: 1884 - DNA, 1901 bp, Toxoplasma gondii
  source 1..1901: mol_type = genomic DNA
aaagaaggagagaggtcgcgaaagaaacaagaatgagaaaaaccggtctgccttcttgagcgtgtacaggaagtgtgaggtttcttgcgaggagagcgagagaatatatatatatatatgcatatagacatgttcacctatttgcgtagatgaatatttgtacctttgtcggtttttacagtggtctcaggaacgaagaacaaaacatgcaggtatcgcgttgtgtgcacatgccgcggagcgcttgtctccggtgaacagagaccttcaaggttgaacacggtttgcttccgcgtttacattacacaaaaagcattaacgagctcccagcgaaacaagaatgcgatctggtgtgaaacccgccactttagctggaggagataatacttctctgcaaaaagatgctcctcacttcctcttttctaagacgccaaagcgacggcatggagctgacagacgcggctctgtctctcgccgaacctacgacgcagtcgtccacagtcagtatcacaaaggtccatatatatatatatatatatgtaggtggatgtgtaaggaaaaggagcagctgttgggatggatgtgtaacaaggtaaatattgatgaataaatagaatattttgtgtcgttgagacaggataactgttcacggggctgtgttggtcgcgaggaaacggtgcatttggcacgacttcctcagcgcgccttttccaacctcgttctctctctttcgcagtgtcattctctctctacatcgaccttttctctctgtctctctcccatctgtacatttagccttatctccgttttgacctgtctgtttttttcttctcttttcctttcttcttctcctctcggctttcttcttttaccgtagttcctccttcttctatctctctcttatctccccttccgtcctgcctttcttctcgtagactccgtctctgtgttctgtttcctccctcttcttccgctcccttcttctctgtgtgtctttccttttttgcgttgaacctcaatttttctgccttcttttctcggggagtagcgtcgcagaccatctcgttctctccgtctgactgcctgacgcaatttctcgcagtctctcgagcatggctcgacgccgcctctgtgaagtcaactgggccagagttccgcaaataaatctggggaagattttcgacgttcttaaagcgcgccaattttggaagaggccagtcctgcgcatgcactcaactcttcgctgcgagctttgcatgtggggctctttgtttctcttttccagtttccttcgaggctcgccgtttgtggccctattctctttcttttttcgcctccaaaaaaagaaaaaacttttcaatcttcatctaagaaacatcttatgcgtccgagcgactgtttcccccattccctcccgcggtgtctgtacacgcgagccgctgcgcaaacttgcaatcgaggcgttgagtcggcagccaccgcgaggcgcacaggcagtcctggaaatgctttgtcttctttcgcctcctcttctttttccttttctccatttccttccttactcgtattttctttcttcttctgaaaagttttcgagcggctttctcgcctcctgcagcgctggcgtaccaagattcactgccctccgctcgcatctacttctgctgttttctctgtgaaatttctcttcctgtcgtctttcctctctcgcatctcccttccgtgctctctttttccgtctttctctccatcctgccttctccagcttctctgtctgggcgccgtccccctagcccccaaggcttttccttcgcttctcggactcctttttttgcgcgtttcttcctcgtttcctcctcgctgcgttgttttgcttcgtgttgctccgctggcactcacaa

SEQ ID NO: 1885 - DNA, 1055 bp, Toxoplasma gondii
  source 1..1055: mol_type = genomic DNA
tgggagtctttcaaatatcgtgcgctgaaagtatgcttggatctgaaggtagaccagcacccgcgattgcaacttttgttgtctggtactggaaactgccaaattttttgtccaaaacgtgaggacactatatacatgagtatcagtggctcgtgcgaccttggggaagccgtggggaaaattctaatggataaacgcagtgaaattcagccatattagacattgcattcggtaagcttaggggtcgactatactggagaggtcgtatcgtgactccagttttgtgccgttgtgggatatcgatgacagcggtgtgacttgctggtactctaggtggtcgcgaacaatgcggactctacattgggggctgtttaaacgaatttttccagttgccagatctagacgtgaggacaggttatctcgtaatcgtgcacaggccgcacgcttccacagttacgtgaaaacagttggaacgtctagccgtgtttacgcgacttgtaggtactactgcagcagcggcgatactcacgccttctggtccttgttcggagtgtccgtgcctgagaggacagaaacacaattgcattcaccgctgtcaactgtgtccctgaacaaaagttcatctgcatcgtgaagcaggttggacactcgacacgaagaacgactgagacgagttttctaccaggatcctgcagagctacattgggacccagcgttacattcatggtgaagttacttaaaaatatgattgaatgtggctttgcgaatatagttattctagaagaaatgaactgcgtcgcgattcgatgccccacttgtcgacatccgcatgcgtaggcaattttacgcagtgctcgacagacgacacagcttttatcggttgcagtagaatcgtcttagcaagaaattctagagtttttttaagtttatgtgatgaggtatttgaaaaagataccatgtgcccaacaggctggtgacgtgcgttcgccgcaccccgcctgtagagccgtaactgcctggcaggacaagaagtaacaggaatctatcgctgaaaa

SEQ ID NO: 1886 - DNA, 4004 bp, Toxoplasma gondii
  source 1..4004: mol_type = genomic DNA
gcctgttgagcaatcgcttgagacataatgcagaacggacaacgtattttgtgttcggaatgtctgtcactaaacaaagcgttaaggtggtctccacaacgacagacaaacgtgttttttgtgcactcggtggatcgacttcctcttttttgtctctcgccgacggcactgcttccgagatcgtaggggcggcggttgtcttcttttgggcttcgagttgagaaacaaggcatagagtggaagagggcgtctcgtcggacacgtggtaacgcctgtcgcgttgtggccgtttgtctctgccatctccaaatctctgtttgtcagtgctttatggaccgcttgccccccgccaaatgcctgttaatcctcgtctgtggagtgtgtcattcactgttttttattccggtagcggttgcatgcggtgttcgcaacgcccttcctcagggtacttacctgttggctgcgaggcgcactttccatacgtatctctgcatgttagtgtctgttatgccgttaaatctcggacccacaccctgggcaatgatagagatcgcatcttgccaggatcacataggccatgtgcacgcgaacctcagcgtgtagacatgtatctatctatgaccttggctgcatatatatatatatatatatatatgtacgaaggtttctggatttacatatatatgcaaagataggtaggttgcgtggcacggtatcgacctgctgcggcgagagtgtgaagcgaaattttgtattcctcattttctgaggaaagctgtttgcctggcatcttttgtgccagtggattaagtttcgctttacgattccgagcgagttcaggctggacaagagtgtttttctattctatgcagtcaataacggggtgggcaaacaaaagaaaaaggtagacgcgggaagtgctttgggagcgttgcgggactgtgacttcgtgtgtgtaccatttcttgctttccgtcgcatgcatttcgctcttctgtctcattgcattgaggcttcgaaacaaaacgtattttgcagtttattaccgtccatatgttgacgttgaaagggacatctcgccgccttacccctttgtatcaccagtttggcacctttaccgcctttcaaacgtacattcccctattctttttaagggaaatcacctacatcgcatcctacggcgccaggaggcttccacggatagtcctcacgaaaccgttttgagacgaacatgcacatacacgagtgagaaaatacgatatacgtgctagctttactcgctggacacatcgaggggaagagacagctcaacgaagaagcggagtcggtacctcataaataacgacgagcacggatgaagcggaaccttccctcttgtttcctgtttttaataaaagtacgagggaggaatgtcgggcgtttgtcctccatatactttcccgtagttgcttgctgagttcctcggcttacgctgggcgcactgacacaccacatgtatctatattttcatgacttgtatgcgttagttctgttccagacctcacgttgtcatcttgactgtttttttctttttcagtggccccagcgtttctcccgacccggagaccttcatgctttcgtggaacaagtagcaggtggatgaagcaccggccgcgcggtccgcacaacttgcgacacggttcccgaaacactgaaacgggacgaatgaaacatttcacgctgttttcaactccgttcctcgcccttctgtctggcgtttttcgtcggtaacccatttggatgggccgttcgttttgttccttttgcaactcaacccagatacaactagcttgccacatacagggttacacgtttttagatccgtgtaacaggaaagtagaacgactattcgacaccctctggcttccccagtcagacaatccaacaaacatggcgctcgtgggcgttgtgtctctctgttcttgaattttctcctaagtccaaatctaaaagtacgaaacccttcctgtctcatacacgcactaggaacgcgactttgttctcacggcggcatcttgtggtggctgcccaatatcgggtcccctgttttggttaaagagtgtggcctttttgagtctgaatgttttgttaagcaggtattctttcgtgcctcttcttccgcatcgtccagttccacatatctccattttccccatgtgtctcctggaaatcccttcactactttgtcatttctgactttcgctgcctctctttagaggccccctgtgttgcctcccgcaagtggaccgagccgctagcgctggactcggtcgaacacacgttcgattcgacacacctcgcattccccgctgcaccagattttactgagaaatgcctgttccactggtttgaatagagtcatttgagtagctcgaggtgctataaggttattttcacggatctcaaacctttcttcccgtgttactgacagggagcttgatttttcgcgacagcaggctagatagtagccgaacccgaatcctcaacagcccactccccacgttgttgcatagtccgtccacgcacggagcggcgttaccgacaaggaaattgcatactgccgagattcgagactcttctcgcagatctatctcgcgtggaagttgctgcgtcagctgggaagctggatcccaaaaatgtctcgatatcgaagctgcgattggggttgaatgccgctgctgccaaatggccccctatttcttcgctcgcaggcaggttgcccggcacacgttgtcacttgtgaacggtgatttcctcgcttcctggctttagatggcaactcgtagacgcatgaggaactgacacacttgaaaaaaggtgcggactttctgaacccttcctagaaattgacacttcatgctactccacagccggccgctcactccgtctctgtcacagttccagtgcgacacttttttcgtcacgtgcgttcctaggcgtgtccagcgcggcaactccactttgattcttcgagtgcgtttcctgagaactgctcccacgtcgctggggaaaaacccaacgatatctacaccttctacgggaccgaggtcgactgtgcatccgtgctcagcaaaccgggactaaagagagacgttgtctcagggtagtggttttgttgggaattttgcagagcaaaggggagagcctcttttagaattcggctgtcgtctttctaactttctacctcgagggtgagagcagttgtggagtagtctaaagccgtttttacgcaactagcggcacgagatcctcgccggcaaagattggagagtgaccctcaacttttttttctcagcgcgtatctctcttcgacagcctttgcctttactcggctcgcagcgacgcatgtgtgccatgtccttccttctccatcgatttttttcattggcgcctgtgcttggcgacgcatttccgtcggtgttttcccattctcacttaccgcctacttttcccttcatcccctttttctgggcctctccacctggcaagcttctcgcttggactaccaagctcgtgacgaactcttccatctggagaggagggtgtggcgctctgtatgtagtgtctgaggagagggaccgatttgcacagaactgtagtttttcgggactaaggccaacataatcaattgaacggtctgttcagccagtagttcaccatcaactacctattttcgacctggtaccgactgtattattgcggcacaggtgttcccagcttcggggttctacagttattacgaagctcctctctccctgattcctgacgtacataatatacagtcgtagcaggttgaaggcaccttagccttctgcgccgtctgtcttcgtttaagactttcaccgttttttctccacgttcaactgtctcacctcactgtctttctctattgtttcgtaccaggtgcttggcaaccgagacaagtcctgggttccgctgggttcgatgtctgtttcagaagagga

SEQ ID NO: 1887 - DNA, 4967 bp, Toxoplasma gondii
  source 1..4967: mol_type = genomic DNA
agcgaaggccacaaagaagcaggttgggagaacttcgcaggcgaaggcggcgcgttcttcttgcctgacgacgtttgcgctgttcctcgggtccgggcctcgcttgcgtgctacccagcaatgcgttcggggacgcgcctcttcgcggggaagcttcactgctttggagatagtcggcatccgaaactagggactctctggcaccatcggagacaatcgaagcggagtcgcgcagtcagtgggaacgtggcgtggcgtgtggtgccgcaccacttgggggttttcgcggggcgcgtctccgcggcccagatggcgcgacgcagacacgttccgttcggccgcgacttggcgcgctgcagaagctgcggggaggcgcggtggggcggcgagtctgaggcgaatgcgctctcggtgtcgggcctgagtttgcccgcgcgcttcgtggagtgtggttcccgcgaaggcgacgtcgagggtttgcatacgcccctcggcggactcccgggacgagcggccggacccctcccgccactgtaccagcgaatgatggctgcttcagcgccgtggtctgcagacgtccgggcggccagctgcggcggcgacctggcacataggagttctctcacatgcagcaaccggagcgcgcctcacctgactggagttttggctgcagtcagcacagacgagttggaaacctcccaggccgacgcagctgacagacggagcgtgagcaaacccgaacagagcagcggcgacacagaggagaaggctcggtcgtcttccatgttggcggcagccgtgctcaagactgcgcaaaaactcgagtggctgctcgaccgctccagcggcgcagctggcgcgggggcggcaccagcagagaccggcgtggccgaggaggctggcggcgagacggctcctgggagaggctccgaagagacggggaagcgacccctgcagtctcacgggacgtttgagagctccagcagatcgcagccgttccgcagtgaaagtattcgccacccgcctctcgtgcctgtcgctaaagatagccgaggaagtgcagcggccgttgccgatgccattggggggttaggtgaccgccggggcgggaggtctgtgaggggattgggaaagacaagtgacaaggcggggaaaagtgcgggcagccgcgcatcctcaagtccaggggatcaagccacaaacgcagacgcagcgaaggtcggctccagccgcgccggtcgggtacaggaagcggcctctgaagaggcgccacgttccacaccggacagacagaaagagaaaaagacaggcgagaccggcggctcgaagtagacatagcccaagggtgaaaattgcagtgccttcgttttgtgtttacacgtcagcttagattttgcagaaagtatctagggaaggggtcccgccgttgttgtgcagatagtcgcctttgcactttgacgggaggctgtctgcagaagaaacaacaacgctccgtggaagacaaaatggcaggtggacgcggagaggatcaggtggtaggaagtgaccatgaagagagacacgaagacaactcggtagtctgcacacgagtctactgtcacaaaccaccaggcagatgattcgagccgaggaggtgggccgagtcgttttgcgatctacgactgggaataatgaactggtgaacttcacagcccgtcgatggaggttggttccaagcaggctacacaaagtgtatgggtcgaggccgctgacagtttttccagcaacttttttggctttagggcattcgagtgcgtgcgcctcttccaggtcgtgaacgactctgccgctacatttggttgcgaaacagattggccccatgctcgcgatgacgaattgcagtcggcgcggaaaaaactctcatgcactctcttgtggtttttcgtcggtactgaagggtgctaaatgggggacgcactcgatggattgtggcgttcggacttctccagcgatcagaacatcgcgtagaaaatggttactggaaaacttactctcccgcatatgtaaacgcatgaaatgatgtatttgcgtgtaataaactgtaaacgagccgcttctgcgaacgagcacagcaccgaggaacgtcggctcttcggtgtgctattagatgtcttgtatgcactgttgacgatagtcaacagccggcagtcctccagtagcaaatcgcaagttttgaggtggtaatgaaaggcggcaacgttaggaatgagtcctcaattaacagctgaaagcagggatttcactgaaaacaattctcagaaatcataatcattgtgtaagggatgtcggcagaaaaaactactcgagcacaccagaatctgaggcgtaatcagtgttggcgttcagacaaacaatgtttgtagaccgcaattatcactcttagtgccctcggggtaaacatctcatcgatgttggccttacttcatgtttttctaagtggtgtgttcattattccaggggtacaataaatgggcgtattcttcaattggggcagccacttttagtcatttgatttggcgctgatccctgcacgcccaatgttaattatttcacgcagctggcaacaagttctgggtacgatggaagtcggtcatttgtcagttcctcgcctttctagttctcccctatgaaaaaccatcagcctacaaagtggtcaagttgccaatggatgacgctcagagaaactcagttgctgtgctcaaattatgtggcatatcattatcaccaagcgtaggcatactcgactcaaacacgacattcgcccgtgaaggaacggcaaagtattggcaaagccatgctacccgacattctgctcatagtgtccgtctgatgattacactggaaaagtacgcgaagaatgagggtgaacaaggaacaacaaaatgggtgtccctcgaagtacagagaaaacacttcaaccaccttgtgtgttcatttgttgctacaagcaggagagtacctggtttagccttctgcaaagcagcagaggaggcgcataccaaccttggatgtcagcgttgcgatgcagagccctctcaggcggtaactaaaaggagcaacaagatctgcatagccatgttggtaccgcgtactgacttttaactcgacgtgaaaggcggcactgaaatctctactcgacgtgaagacactgagatttgtattcgctgtcttccgatatagctacgtggcggcacgcagcctgttgttgcaccttgtagctattctgtgtcgtgctaccactcttcaatttgacaaaaagcccaccggtatctcacggtgataaccgggctgtgattcgtgcacggcgtgctagggttacggccgccatacagttcggcgaatcgcggacgagagttcagggtgaagagatgctgtgtcgtcatgttaaaacgttgtttcctcgagtatatctctgtttttagcaccgatcttcaacgatttccccgcctttgtgccaccatgtcacctgtcgtgtctactttggggtggtttcaagggtacccagctggactaggaacaacggcgctagcactcgctcgtgtctgaccggtttttgttgttagctgcactggaatgtgacgaggtagaagaatgacaattgcgaagactgtggactcagtgacgcctcctgccgacggttttctttgtctgcccagaacagcacggaatcaagatgaggatccaagtatgacagtgaacacacagacggggaccgtccagcctcccatttcgagtgtttctttccgcctctctgtaaggcgagcctgggctatgtctgtttaaggtggccgcgcttacggctcatctgcgctcgcagatatgttccgcctgcacaaaactacaacatatcaataagttgaagaagcttttcccccctcaccatgtcaaattttccaatagtgcttggcttaccccggttgacacacattcgatgtgcggttctgcatctcttcgaccagtaaagagagttgtttcacccgtgatcgagcgccagcttgctggtgccctgttcgtcggcagctccttacggtgaacgatcagtccgctgtggcgcacgccgtgccacgagtttcctgtgagtctgagcaaaaaccgacttttaaaaagggaaggtgggcggcactaaaacagaatgacagcaagtatgacgaagttgatttggataatcctcgcaggaagcaacacacaacaactgaagacttatacgcgtgtgagcctttacttgagtgtcgagcgaacaagactcggctggcacggatgctgccgcacaagtggcagcagtagctgtagagctgacagcggcgtatggaaggacagcggctcacgggaaatcgttttccgtgattaaaaataccctaaaatattggttacgcgcaacttggtggatgcggtaatatcatgttacgaaaatctcgcaggcttctgccgtcatgaatgcggacatttggtgacttccatttttattgctcgggagtgcaggcagctgcccagaaaggcgtattcgtccggcgtcttctgtcgcaactcaagttctctacgcagcctccaggggcgacaaaaactcgataactgtttctcatgggcatttcccaggaaggactgtggccaactgtctttgttccatgaacctgcagtcaaatctgcggcattcccttctcccgtaacgctgttttgctcgacgagctaagcgccaaacggggtgcgtggttccctttccgtccagagagggaggagacatgcttttctcgcgccgcggaggcgacttttcgttagagaaagttttttcttgttagttgcctgttcgttgaattgtcttagacgtgtggaatgccttgcctcgcgagccgtgcccctggtgaccacagtaccctcgactctccatcaacatcacgtcttaatctaacagatcgctcgtggttctgacaaaa

SEQ ID NO: 1888 - DNA, 4865 bp, Toxoplasma gondii
  source 1..4865: mol_type = genomic DNA
ttgttagtcgccacaaagatcgcgcgacatgaaaacgcctattcatacgagagcgcggttcagcttgcggaacgatatagcatgcatgggcttttaaccgatgacagaggcatcggggacctctttgggagtagtccgcacacctcgggagcttctggtgaaggccatttacagatgcacagatttatctacacacctatttgatttaccttgtgccactcggcgtgagctgtcggatgaagtgccttggacagcaaagatggctccgacaaggcagcagacagcgagctttcttttgccttcgagactcgggtcgccgtgtcggaagacattctggaaatctgaaaaggtagagagtgctggacaccaatgctttttatgaagccaccaacaggattcctgtgttggctccccgaaccggagactcgacgacagccgaggtagcgatggcaaaaagaaaagtttgccttttccgacacaatacagaagagagtcccgcagattgattttcaggcatgatatactttaggcactaacaagaaaagcggggtgtaggcggaaacgatgataaacgggctcgaatcgacaccaggaatgccttctacaacgaggtcgcacaggtgatccaccgaacaacccctttatggggatctactacgcagataaagtttagtgatactcacacgtgtttcacgaaagaaagtctcgtggcgcctctgaaatgtgcagaactcctgaaaagtgcgagaccgacgcttcggccaccaggtgtctaggaaggacgcgcaccgcagaaggaaactgcagtctatcagtcgcagggtggaagtgagacggcgccagattttcgataaaacaaatcatcacctgacaacgcgcgccccaggagaatgtgaactcgtctatttgcagggcgagtaccaccagtaccaaaccaaagaaaagtacgagatgtgtaaggagaaaaaccgtcgaagaaaacacccgccagcaatcgcagagacggagcacgaagtcaaaatggtgtcatgagttaagaaaacaccagggtcataaatggaaaaagcgaccgaaattagtgtgatgttctgcgagtcagagagagacgccgcacaaaccaagtgcatgcgcgagcgtcaatcgcatgtcagcacacccgtacccgtccttcattcctgtgcatgtaagaaatctgtagtgtgtacacacggtgacaaatgcagcatgccatagcctattaccagaacagtaaagtctccctttcctatgaagtgactttctgaggtccgccaagtagttgtagttttgtctgtttgctctttcaatggcaagcaggggtgtggtacgccatgtattaaccccgtgtatgtttttgattttatcttaattccgttttcattgtggggagcaaacaccagtacgactatgcgagaaaagagagcgagtttctaaagtcgcaaccgcctttgtcggaaagcgggcttgcctctaggagacggtgctgtggagcagttccctcgaagagcgatacagtttacgcttgatccctgtctggttcccacttattttggcccccctacaaaattaaactttcggcaggtacaaggttatcggattttactggcagctttgtaacagggcggtctcttgctgactgccgcagtgcgaccctctgtacgacaatacaccgtgtagaagtctcctctgtattcgtctatgtaatcgttcctcgctgccttctttagttcctttatatatatcagaaaaatatactagctgtacccattgacactcctacattcgtttttgcgaccccttctcacatcctcgaggtgggggggcttcgtgggatccgccaacgcagggatcgaagacgtcatgtctggagcaatatcatgatagacggacccctgcagggaattgtactttgaaacatgtcagctcaatgtgctctgtaatatttgcggccgaattcaaccaccttattgattgcgattgtatggtggaggcactagggattctcggaatatccgtagtccatgacaacaagtacagtgcactggagatacgtctttacgctcaacccctgcacaagtagccttagcaagctgggaaggatgagaaaagtaaacacccaaatcaatttgtacgaagaacgtgtaaatcattgacgtgtgcccgatggaggtgtcgtttgaggacctcacgtaagctgttctaagtactgacctacatggcgtcgtcctcagcacatcatcgcggtttgcgtgcaccttccactgttagtggccatccttggatttgcgtttcattatttcctattcagcgagaactggtggtctgtcttttcttttttttgacttcttgcagcctgcagaaattcggaggcgcaaggtcacagggtctgacacaaaaagtgaacgtcacaacctgtacgagggcgcagatgaaggtgcgctgcactgctgggtccatcttgcaataagtaaacccatcgccaccacaaggaagaactgtgccgcgtttcgttttcatttgataaaactgtttaccgttttgtctctgtgtatcacagtgtgcgcacgattcgtagggcagatgacgcaccttgaaccacgcagcgaagcaagagattctgtgcccgttttcactgaatgggtgtgcatcttgcaaagtgaagttagccgaggcaccttcaacacgaaaaaacgcattttggttcacacgctcgttgagtgtgcctcagcggcggcgcctggaacttcgacattccatcacagcaatagttgacagcttctagaagcaccagtggttcactgcgaggcaaagtgacacttagtgtcatgcttctgacgtgtgtttggctcaggctttttaaggatgtcaccacctgggcggtggatttgtcagtgaaggacgcacatgacagcgacacgcagaatcacctcggagctgacgccccctattcagaattatttggcacacacttttcgatctgactactagctttaaagtatcatcgcatgacattttatagttggtgcagcctatctttttataagctgccctcgtgtcagaagggaggatctagcacaaaagtgcctgcccacttgacgcaaacattcagacaagtgatccgatgtccctcgaagctgaggctccttctcaaaagcacatatggcggatacaatatgtgaaatcaagagcagtttggcacgcttcgtaggaggctgagtacggcgcgggttgcatgtggtctactgtgagcatgttacgaccaggtgcttgaatgttgcagtcccccaacggagcatatgtacattcacctttgatgtcgcatcttccatggaaagcttcaaaacgactggaaataacaggagagacaatccagagtcgccgagcggtctgacaggtgcggaacctgcttcccgagtctcatgtggatccgacgaaccggaagaagtacggcattcggtacggtaccagggaccttgatgtggcctatgtaataggactgtagagaaagggaacgtcttttgattgccgggagccattaaggttgtggaacgcggagtggaccgcacgtttgggctgcggccaaatgggaccattcctgtgatcagctgttccccccgagctggctgtctcaagggaatatgtttggaaagagggtagcagggcacatacaccccatacacttttcctctacgtgcattcatatttggcgctgtcttttgctcagtgactcacaaactcgaagagaccttgcagccgtttgttgtgccgtccgctcggtggccgctgctgcacgagtgcgttgcttcgaataggacacgttcacgctagatcacgcaagtatgcaagttcacgcagtagcggtacttctttttcgcgtcaatcgcgaaaatacccgatttaggggccgggctaggctgtcgccttgctttactgtaagaacggcgcctctgatgagcctaggtgtccccgcgcctcaccgccgacggcttcgcacattccgcaagaataaaaatacccactagttctgcaggtcaaaacggcggccacttcagacgctttccacatgttatggactaataacgtttcctgctgttgttcgcgcagcacgtggtttttcttgcgggtattttgactcgctcagcgggacatcagtacggttgaagtgtcaaagggtcaacgggtcgatggactcaccctcagagaccgcctcatttcggggtcctgccgggggagtttctcgatccttgtggaatgcaaccacctcaagacgcttgcacagttcacatgttcctttctcaggaagaaaacgtagccccatcgctctgagtatattgccttaaaacaccaacaagcataaactgattgccactgctgtcgcagtgtaccgcctgcgaaccgtccagcagcagctttccccatgcggcagcccattcgtcgagggtcttttgtgacggtgccccagcttcaacacatcgctgttccctcgactagtttgtgcaaccttttgggtcagacttcaccaccggctatcttccaaagttctttggggtcatttccacattcttgtcttgactgacgattgacgcatcaatccgactccacgttcgttgtctcctatcctccagcccgacccacgcgtgctatcgagaggccgtcacatgcaacaccttaactgcccctggccgttccagcgcaatttctccttccatttctcgccaagatctactgcccctgctttggcacttatatcctcgccttcttttgcattttccgtcctcggaactcccttctacaacacagtgtccgcatctgctgccgcttctctctttcgggacaattcgccgcca

SEQ ID NO: 1889 - DNA, 1579 bp, Toxoplasma gondii
  source 1..1579: mol_type = genomic DNA
ctaaataagtcggtgcacgtggcatggtaagagggcggttacaaccagcggagagcatacactggaagtgcttaccacggaagagcatttgtgaaggcggatgttacttttcttaccaaagtagtacagatataccttgattgtgggacatcaagatacatgtctggccagtgttcgcgaaattcaggcacctgctatcactgttgtagccatgaacaccaacgctggcttgctgcacttcttccccgcggaccgtgtgctgagtggctcagtcgtttctgtgaatcaccaatagcagcgtgggagagccgctttcgaataaccaaaaagctatacaaacaaattaatcattgttcagcttcagcttgaaaatagtattgaggtacgcgctacctgagtacaacacaaggcatatctttttgggtaggtactcgtgcttcgatgcgaaaaagggagaccttgtcaggagactggaagccacgagcgtcagatctccagggttgctacttcttgtcggggctggaggttttcttctgtcaccgtctcagtgaattaacgagtgtctctcgacaatatatcgctaggcaggaccgtgaaatgtggagctgtatactaaaaacgcctagccgcacctacactaccactgagcaggaaagcgtggaaattgtaacaccattccatcttgtacgaattaaatcactttgtcgctgtgacaagacctatagtgaccacagctctgtcgacttcggcgtcgcagtttagggtgctattaccgtagactccctgattgggacaactctgcacatttgtttcttaatgtggagcaacatcgcctgctgtttcttgattccttccggcacaacttcgccgtcactttctgtacccacaaatccaccaaagtccgccgaaaaaggggaaaggcagccatgtgctcaagtgcacgggtttgacatcttggaaggggagaaactcctgctccgatgctcctcattcgacttgaatacgcgcacgggctggatagctgatttcgctgtctctgacttcttacagtgtgtatgccgccgtctcgagtttaacgtaaccaataattttacaaattgacacgtttttctcagagaacttacccactctcgcgtataaattgccagtagactgcaaagcgcacgcgatttattcatccttgcgaaaaggtaccctcaactgccgccctcccctgcgtgcttctggacagtggtgtgtaggctgccgtcggtatgcgtgcggagacggcgagacggacgagtgagctgcgcagcctgtctctcaattttcatacgatgtgccttgctgtgtgtgaagctttctcgaccgttgggtgtatgtcggcacactccccttgttgctggttttgtggcttatcttcggacctccgagactcatctgcgtaccgtgcatgtgcgattgccttgtatcgggcgccgcatttcttgtctctggggaagacacgcaaacccgacggttgcgcgtacttgcaagattgtcgctctctgtgaagtttgtgaagttttggtatttcccttccgcattagaaaatcgaaaa

SEQ ID NO: 1890 - DNA, 4210 bp, Toxoplasma gondii
  source 1..4210: mol_type = genomic DNA
gaccttatctgcatgcgtcgccacacgcttctcagaaggcaagtcaggaagcgactgaacagagaaagacaccttctccttccccaagcagggactatttgcacctgggagctgagttgcaggggaagacagagggagaggggaaggactggcgcgccacggtggatggggagccgagacacgactccgtctgcgggggacaaaggtgcttggtgtcgccggggcagcgaggcgagtcaaggatgcatgaggacggggacgaggaacagaaagtggagagacgaggaaagaaggatcaggaacagcggccgaggcggcaataagactggaggaaaggtgtgactgcgaaggtgcggacaatgcagaggcggaggcggaaggaggcagacaaatacgcccttgctcaagggacgcagccgcgcatttctcacacatgactttcggtgaaggcgggggagcttctggccaaggccaagcaagttggcggggctgagcaggtgagaatgcactcggaccggcgaatgctccactacgctcggactcacgttttttaggcagcgcttttaacgtcgtccctgccgacggctgcgatagccgcgtatccacttgagtccggacagaaccgcctgcgggaggcgagcgcgaggagggaactgtagtcgattgttcgcgtccgggggcgaccgcggggggtctgtcgtgcctggcagcagaacgatgagtacgcggatgcgaagtgacaagagcggaacacgcgtactgctgtgcgtggttgtttccatggtcctcagtcaacaccttttgtttcggtgccggttcgcggacagaaaccggggaggttttctgaaagacaggcgccggccgctttcgcaggaaacacgctgggattgctgccgctgagttggcgtggacctgagcctcgcccggcgaagagccggtctccggatccgtcagtcggacaacttgaggaaacgagttactggtttcgtcacgctggaacggactcgttggcgtttcctggcgaggagagacgctcacgctgcttgagggaaggcttctgtgtgaagacacttggacaaccgcggcagttctgacagaactgaaagttgtgacggttgtccacgaagttgcccacggcgcaactcccagtttgcggccattctccggtggacatacagctggagctgtctcgtcgccgaggaacagggcagccaggcgggtcagcattttgactcagaacagtacaattgcagccagggagaacactcatctcgcattcgcagacatggctacccgcgcaatattgaaaatgcagtttagaaatgaaaaatctgccgcagaaagaagtgatcgcagaagtgtgtgcctcgctaaagcgggcgcaaagctctggccacctgaagtgagccttcacaccacagtcggccgcgtgaaactgcgcacgaaaacgaaacgtggaccccaaggaagaagggttgagaatccggccagaaaccaatagcgatcttcatcgatagcacgaaaaaagagaaatagcgtcgaataatgcccggaacaagcagatagaagacctcatattgcaaatagctatcggaagatgtgctttcggaccctttgcgtacgctgactccgtccgcagctccgagcattcatctaggaaaaggggagacgagggagaagcaggaacagtagctgtttcctaggacaaagtaacgattcagaaaaagagggctgaaaacactatattccatgggatgtctctggagcacgtttcagccgacgctgtcgccaatgtcaaaaaccgcgcacagaaaagaaggcgcacgttgcgcaccgagagttgctcacagagtaacaaacgcataatgtcggtcggctgttttggcgcagaaaaagaacgtgtaacgtcttactctggtgttcgctttgaaagacgcctcagtttcaaagacgaactctccttgctgcaacacaaataggccttttcagcactacgacctgtgtggttgatagaagcttaacactgtccccacaagacacgcgagacgagacaagaaacaacgatggaggcgtgaaggcaacaagaacgacaaattacagagcgaattgaatctttcccccttctctttccccgcgctctccagctccacgagaaaccttggtgaacggcactgggtagtaagctgacagggggtcccatcttgcgcagcactcggagccgggggatttgcacgacacagaaaaaggcagaaactcactggcctactaccttacttgctcctcctgcaagtcaacggtgctacgacaatgactactgctcaagcattcatcacctgtcggaatacgtctgtgtttctctgcacactgtgccacgattgaacgtcatcgaatccgctctactattgccgtccaccagcgacattatatctgatcgagataaaactcatgaaagaacgtgttctttaaaatgattgcataccatgacgcttgtactgctgtgatgaaaaccatacgtgattgggcagcctgtctcgcgcagttgccaccagaccgtgagcgctcgcgtcgtgttgggcagcaacagaagttaccaatttcgaaaacgctatgctccacgcagatgcacagtgaatgggagaaagctgagcactaaaacatggagcgaggaagtgcttgtacatttgttgttatccaaatgatgtacgtactccgtaccaaaggtgccggagcatgacttaaagctcgactatctgggctcgaagcgactgatgtttagcgagtgggcgttgctacatgtgtagatgcatgtgatgcagagagaaaaagaactcattcgagtgcagtttgtggcagagcagggacgagagtttctcgagttgcactagtgatggcgcagctgttcgcgtcgattccactcacgaagctcacaacgaagatcaattattgtacgcgctttcatttgatgtggatttacggccctgtcatgtgacatgaaaacggtcatgtctgctgcagaagatgtttcacgcatgaacgccagcgatctaagagtgcactctcccttgaagttctgtccacgcaaatctggccatcacaccatctagacgtcagagtgaacacgctaggccagccgaggaatcggtggaatagaagggtgagagtcaatgtaaaccgcgaatttgcatgagtcaattctcggcgttgttctcagttgggttttcttggtcagtaccaatgccgcggcttatattcgggagcgaatataacgttgagtacaataaattgaatcttttcttatcttttcccgcttcacagtctctcgtctgaagggaaaccgtgcaggaacagatatcactgttttctattgtgtgttgaattctggcacggagtgccctgtttttctgtttccgagatctgtgcgttcagtttgcgttggtttttgagtcgttttccggccagcgagcgtgtccacggtgctgcatgtgccataccagaagtgttcgttttttgccattcgtcggcaaagtcctgggatcttcgcggaagtcaagctcgtgactattattccaatgcatttgccaggttgccttcctgttgcgaccagctccgttcatcgttttctcgaaagatatcctcagtccgctcggcggactgcaaaagaacagagtccgtcacctggggtgccgtggcagcgactgttgcgatttccgccgagtaagatgtggcgtttgagtcaagcgctccagtcacttgccatttcgttcgcttcacttcaatcctcttatatgtttttcgcttgacacaaatcaaatgtcttcctcctgtggaagtattccgacctgccacgatatggctgttccggagttcccagcaccgcgcgtcgaattctaggtcatccgccacgcggttcactctcgcgtttcgttcagcgtttcttcatgcccttttcaagaaaactgtactcagacgtctctttctattacgtctgttcttctccacctcaatcgttgcgttcgtccctacggaggccgcgtcgaagccctgtcttccaaggcgccactgccactcgcgaacccctgaaccgtcgacacctctaacaactcacgacttgaccgccacttcgaaacaagtcactagctctcaatattcgaagctgctgtctccgctccaaggggaaccccgcacccgccgttttttctcgcgtttctaa

SEQ ID NO: 1891 - DNA, 2986 bp, Toxoplasma gondii
  source 1..2986: mol_type = genomic DNA
acccggaaacacaaatcgttccaacatgacagtgctgacatgtttaaatctacatttttcctgacctggggagtctgcatgccgaactactggccgcacagatgctgacatgtttaaatccacaaattttgtgacctggggagtctgcatgccgaactactggccgcacagatgctgacatgtttaaatccacaaattttgtgacctggggagtctgcatgccgaactactggccgcacagatgctgacatgtttatatctacgtattttgtgacctggggagtctgcatgccgaaccactggccgcacagaagctgacatgtttatatctacatattttgtgacctggggagtctgcatgccgaaccactggccgcacagaagctgacatgtttatatctacatattttgtgacctggggagtctgcatgccgaaccactggccgcacagaagctgacatgtttaaatccacaaattttgtgacctggggagtctgcatgccgaactactggccgcacagatgctgacatgtttatatctacatattttgtgacctggggagtctgcatgccgaaccactggccgcacagatgctgacatgtttatatctacatattttgtgacctgggtagtctgcatgccgaaccactggccgcacagatgctgacatgtttatatctacgtattttgtgacctggggagtctgcatgccgaaccactggccgcacagaagctgacatgtttatatctacatattttgtgacctggggagtctgcatgccgaactactggccgcacagatgctgacatgtttatatctacatttttcctgacctggggagtctgcatgccgaactactggccgcacagatgctgacatgtttaaatctacatttttcctgacctggggagcctgcatgccgaactactggccggacagatgctgacatgtttaaatccacatattttgtgacctggggagtctgcatgccgaactactggccgcacagatgctgacatgtttatatctacatttttcctgacctggggagtctgcatgccgaactactggccgcacagatgctgacatgtttaaatctacatttttcctgacctggggagcctgcatgccgaactactggccggacagatgctgacatgtttaaatccacatattttgtgacctggggagcctgcatgccgaactactggccgcacagatgctgacatgtttatatctacatattttgtgacctgggtagtctgcatgccgaaccactggccgcacagatgctgacatgtttaaatctctatataaagatgcagatatataaatacatgtcgactaaggttgagaacgaggctgtattcatgcgtcgaaaagtgaagtgtacgcgtctaatcccttaaatatgtctgtacatctttttgatactttctgtttttgctgtgtcttccggccggtcgaccctgagggagaccagcatggagactggggaagcagaagccgagaaaagaaacacagcaagggaggaagatacacagagcaagagagagagatggaaaaaaggaagagaaggaaaagatgcagtgagggagagcgggagaagtgacggcttttgcagcgcgatgttcgcttgcgtcgacgcaagaaaaagctcgaattccttccagaatttccggttgaatcctgaggaaaaaatacaggcgtttccccctttctctcccgttttctcttttctcctctctttcttgttctgctgtgttctctctgtctctctttttctctttccaagtggacctcgagagaaggtgatggaaggtgtgaacgctctttgaaaaaacgaagcattcgcgaaaaagaggcagccatttcttgaagagacatgccgcttgtctcgcggttgtcttttccgtcgggggggggggtcgcgcgcgtcgaattcgccagccgttgtccagtctcgtcaccatctttctgtgacgtttcctgcttgagtcttgcggtgtgcttgtccccctttgagtttttccttacatgttctctgttctcattccttctcgttttttctctcctttcctctctggtgtttctctcctcgacggaggctctgcacaccgcgccgaccccctctcggaaggaggccaaaggaatctcgcgcatgcaacttggatcccccttcgagctctggtctcccttctctctctctctcctttcttctcgttcgcctttcttctcgttcgcctttcttcgcctcttctcgccactgctgcctccgcactgtcgctctcggacaagtttctgttcgcagattgcgctccgagagcgcttctgtctctctgtctctgtgtgtatgtgtgtgtgcgtctctctctctgtagcgttacaactggttaaagagcgacgcgagcagaggcgctgagaacgcgagcggatgtctctcttcctagcgagagaaagagagacaccaacgaggaatcacaagtaacggcgaaggagaaatggagggaagcagggtggactgcacactcgaactctggtaacgcaccgacctctgtcgaagactgctttggccgcccttccggttcccccccccccccccccgttcttccgttttgccctctcgttcttttttaacgaaaaactggaggccattcttcactgtccctcgcctttgtcgaagaagggtgtcgagcgactgtgtatcttcgtcgactcgtctgcgacggatcttcgcacaaaggcgccgtccggtccccctgactcgcgccttcttccctcctgttgagctcctcttctctttctcgtcggcttctctgctcgcttcgccggtcttttccgctcctcagcgtaggttctgagaactgcctgccttcgtgtgtgctccgtcgcgttctctctcttctcaagcctcaagcagctcgcgtttgtgccctctccggcgtttctcccagcgccgctgtccgacgttcggctggaaaaaa

SEQ ID NO: 1892 - DNA, 3120 bp, Toxoplasma gondii
  source 1..3120: mol_type = genomic DNA
tcttcaccctctgctcccaggaaaatcaaatgttcgagctggtgagcgactccaggaatcgctggagggtcgtggaaaaatccgcagccgacagacaccgcaaaggatccgacggcctcttcctggtctgcaatggcgacgccttcgagcttcagcgcaggcactgaaaacaccgagtacgcgctcgtgtctctaggcggctttcgcacgcgcttccgctccgccagctcttcgtctccgtcctccacttgctcgccgttcttcgcagcgagacgccgcggaaaggttctcgactgcgcgacggtcgacgcaagcgctgcgcgaacttccgcaagcgtcggcagcggatccggcgtctctccaccggacgtcgagtctccatcgttgacaggatcggagctgctgtcgggtcgcgtctccgcctccgcaactgacgctgcatgtgaaggagaggacacagacgaagataaggtcctcgttgacgaagcagaaaagccggaagcgatttccctcaccgcagccgcctggagttcctcttgcagcgctgcctcgagttcggggagacgagcggaggcgtttgccgcgcggcccggatcctcttctgtctcccgcgaagaagacagactcaacgcaggctcagagcgagaaaggaaggaagctggctttcgcgcagcatccaggtccgcgtgcagcgcccttgtctggtgagatggaagagagcgcgaggacggagagatcgattctgacagcagcgaaaagaggggaaggagcgccagaagaagaaggaaagtcgagcgaaaaagacagggcctcctcatcttgcctaggaggggagaaaacgcgagagagacagcaagcctgcctcagaggcgccctctggtgatgttgaacagacatgcgtctccgccgaggaaaccgggggagtcaacagagccgctctcgacaaggacgcctttctctggtaactcaactgcgggggagaaagaagggaggaaggggagaaggaaaaggcaagcagacctgaggatggtctttggtcctctacgcggacgtccggaaaagggagcccaagagagagcccggagagagacgggggagacgagcttgctcacacggagggaaacgcgaactatgaaacttggaaacaaggaaaggatgaaaaagccacaaaaaaagggaacaaaactagtgactacaccggtctttctcgggccaggaggaaaacgaggtgcggtgcctcctgcagctgtccaagggaatgagatggaagcagctgtgcttacggacaagaacttctgaaaataaaactgacgtacagcggaaaaggggagaaaagaaaggagagaagcagagggaattttcgcccccctgttctcgattgaaagacgtcagaaatttcctcgcggacaccatcgacttgtggaggggaacttggcaggctgctctcccctgcgtgtgcctctctccacttcggaacggaagacgactgtcgttctcgcggtccacggaatctgagccgtccttccgccttcctcgctgccgcaaagatcctgaatcttcctcttctccgcgaaaaatgaagaagttccttcttttgcgcgctgcaccccgattcaagcatcgacgcgcgcgccaaccatgcaagagtacgtaaccgcacagctagccactctctcccctcggcctccctgccctgcaaagcgacgagaactcgtggaacgggacgacggctggcgtcgcgagttcgccgtgcatgcatcgatgaagcgcttgaccttgaagcgattctgacgcccctctctctctgtctcaggtctctgcacacccaccgtggaaccttttctttcgccaggcagtcgacacaccaacctcctccgccttgcttccacgtcgccttctcttgcaactcagggtacagctgaaccttttcgacaattcttccccgtgcgagttcccgcgagtcgtcgtcgcccctcccagaaaaagccggcggcgggcggtgacttcctgtcttctctcgcgaaacgagtcctgttcgcgagcctccgaggcgaagtttaggcgcagctgaaatgcatcggggtggacaggcgagagagacgccgcgtggagcagtattttcagctgcaagtcgaagtcgcgcaatcccgaggcgtggagaagtcgagagggagccactgcgcgaaaaagaactgcgaaagaacaaagcagcagctgctgcggagagaggcggcgcgcggaatgcgacgaggaaacttgaaaatgacctggggaatgtctctctgaaaagtcatacacacgcaggaaagtaaaacgcagatagcttcgacaaacatcaaaacgcgggtcacaccaaaaccagtcgacctgagcactctgcagcgaggacttgcttctgcctctggctgcaactgaggaagaaaaccgtggaaccacagggagacacacttccaacattgtggcgtcgctaggcggcgtcgttctttttcgacggactgtttgctgaagagtggacggtattgtttagacatttgtcgcggtattgtcttcctgtttcttcactttagagattgaatggtaggacagtttcgatcggatacacgcgagaaagcgcgagagatccccaaagaaggggggagacacacgactgcttctgcaggtgcaatgcgatgctgtggcaacgcggtgccgttcgaaactttttttcgcaatttgttagaagccgtcttcacattcgctacattttatcacgcaaaagcggggaggaaaaagatggaaaacgcgaccgacgcttcccgaaggtctggcgagcgcgtgacgctggaaccgagatgtacgttcaccagccagaaagagagttcctgctcaacgaacgcgacagtccagatctgatgtccctcccattcgttctggcggaatcgtcggacttctcgttcctcctgctctccctcctttctcctggacctcgtcacttcggagtcgtttctcggcaatttctcctctctcccctgtagtccgttgctgatttgctacgccgttgtcctcattccgcgtcttttgcgtcaatacggctgcgtcctccccctcccgcccggtgtttcttgcttccctctgtcacta

SEQ ID NO: 1893 - DNA, 4620 bp, Toxoplasma gondii
  source 1..4620: mol_type = genomic DNA
ctgtcttgcttcgtttcttggctgtctcgagccctctcattcgactgcaagctgctcggtcctacgtgctttgccctcgttttctccctcgtcgtttcttccgtttctcgctttgtctgtctgctttgccagaaacatcaacagtcattttatccagcaaaaaagtcggagagcgaggaggaaacgtgggtagcgagggcttccgcttcctcgtctttccctcgttgccagctgagtcgaggcagccgcgatggcccaggtggacgaacctcagttccgaacgatcgtgacccttagctgcgtcaagcagtcgagtgtggcagatacggacagcagctgacagcgagggagaaactgaaaacagaaaagaactgaggatcacaaatacacggaaaacggtgactctctggaagtcgtcagttcggccatagaaaaatcgaggactccccgcaaaacgctttaaatagccctcagccgcttatgtggaagcccatcagaaactccgaaacagccctccgaagcgctgatcaagaattttcaaagatgaatactcccagtaccggggtgctgaccacacaggggtacatcggtagtcgtttttcccgtgttgaaacgagtgataccacgagttcgacgtatggcgcttagaacgcaaagacgaaacgcgattcatagccagaccgacgcttgcacgtcacccccgttatgaattcacaaaaacctgcgagtcaccgtatgcacactttgcagagatgagatggcacggtgacagagggaaagaaggagccaaaaggcgatgagaagaagcggcaggaattgggggaagatcggaagagggagatgcgggaaacgcgaaagatcaaggggggaacaccacttacagccctgctagctacactctttaggtgaaaacccgactgtgtggaacggaagaaacgcaattgatacgcaggaaacgagttactgctctgaagcgacagaaaccgcgagtcttgatggtcaagacaagaacgaaatgcggacgtagaaagaaaagaatttcgctggctagttgtcattgatagctgccgaacaagtacaagaaatgccttgacaggagctgaatgcaagttagttgtaaaacattgagaaggcgtggaaacctgggaaaggcgcccatacaatcactgatatacgcgtgcttgaccgaaacagagacaaaggacctgcggtggccttgtcaaaaaaatccgcttctccgctgcagaataccggcgttgcgttccgcattccgttagctgaagaacgactctcgacaccagaaccccctttttgccgacacacacgagccacgcaacatatcaggactgcaaacgctgctcaaggttagaggaactcgcgtgaaccggctaaattttgtcaaacaaaagaaaagtgaaacgcgaacttctgccgtctctcaccttgagttgctggctctctcggtgcgtgtctcgttcatgtcagttttctggtcggcatccgtctgctcaaccgtccaagaaatccaaaggaaatttccgattcgagtgataagaaacccacccacaccttcccactgtttgtctagatactttgtaaggtacacacttgcgctacaaaccttttcccgctgcttttcctcgtcgctcgactctcacttgcatgcaggggacgactcactcgttgttaaacaaatacaagtgacagcagtttcaacgtggatttcgtgaaggccattaccgctgtgaaataatcttcatgtcgtgggaaaatgtactccagcgatttcagctttcttcagcagtcgagtaggctgcctgcagaaacgaagaggtctgtgtagtctgtatcacatggctggagtcacattcaggatccgacgtaaggcaacgtctcttttactcacgcagtaagacagaaaaaccgagcctgacaacttttgcctttggcagagattccccttttctgtccagtggaagttctcactttgcttagctgtgtctctcctttttccttcggtgtgtcggaacggaagagtgcagcgactcgaagcgaagtcgagagcgcttaaacgtgtcctttgagctcgtgcttgcaccgctctctttagccgccatcatcctttcatccaagatatttctctccatcgcaggctagggctaatatcctgttacacaattatttacatcacacggcttctggtgcttcgatatatatatcctggcggcgagatggggagagtgtttccaacacaaggggtgttgtagccgagaatcgggtatcttcttcttcgttaaacacgttgagaaaggtaagagcgaatatcgttccatggagccttcccaggctgtgtggatcgccgttcaagtggtgctaagagaatgtcacgttcatttaaactagtgaagcgaatgaatgcacacaaacgagaacaaacaatcaaataggagagcctgcaatgttgccgtaaggtggaatgagggcacgaaatgtagaagcgacgaatagtagaacggactctgggtgccagcgtacatacgcgtatgaacgtgactggccgtagcgcgtccactgtcatttgcctccggatgcggaccagatatcgccgctctgggacacgctgcacatgctataaccttcaaagttgagccgggaaaggattcttgattgttgattgtttgtgaccgctacgtgagttctcaagcatgtagaggaatacggcgttgccgctggaaacacattgactaaaaagggaacgccgttatgcttctatgaggtaccttgctcactagcagccacccccgtgtatgacagagaaccgtttcgttcggacttttgtcttaaactgacactggctattctccagtttgcacagacacacgatgcgtcaggaaatacaacgcttccttcgacgaaccgttctgttcgggctctctagagcgacggtgggactccgcaccgaagctgtcgagaagtaggaatgcttccggtggcaggaacttctccaattgcaagggtgtaattcatgtttcatgtcctttccgctagaccacaagctaccgacggtctgtggttctttatccaagaaatagtctacggactcacgccgcgagagtttgcctctagacgttctgaaagaattgatttttctttctaagtctcatgaatccatgaactgtggctatcccccaacctctgcatgtggccgtctagaccaggcggcccgccgacggtttccaggtgaaactagcagtacaaccttccctgcaagatcgcctccactctcaagcaccttttgccgcttcagacagttggcagcagttctatcatggtcacaacttaaccacggatttttgttagacaacagagtccgtgaaactcgagaaagtcaagtcaacatcactacaggggcaacgcccgaagggggcttgctacggtgtacttacacccgccgcttcgctgcaagtccgcctttgcattttgagtgctcccgtgtatagaagaagttacaaaaccactccacatgggatttatcggattcttttcacttgttctcgtctctcttataactcgaatccttcaggcagaagaaccgtctgcaagaagccgcagacaatcccacagacatatcgcgcctgccccgcacggtctcaccgaaaccatcttggaaatggaggaggattacgtggctgtaacaacgaggcaaatcgccgatggaagaagtcttctcatagtcttgcagaaaaagtcttcttagcgacgatgagtggacacatttcacgacattgctcactagctcgcttccatcgtccgagtcgtctgcggtcagcttctgagagctgcatgcagtgtgccagctagcgcacgtgcccagaaagacagtcgggaggcaaaacccctgaggaaaagccacttttcccaattacagagagactgtcgcctccccgctttccctccatctccacagctggattgcacgctgctaacgaaaagtaatcgcgtcttttcgggtcgccacttcgagggggccgtctgaaaagaagcaggcgtagaagaaacagcagacgaatgaggatctcgcaacttctgtacagggtcacagcgcgcccaacgggctctgagctgtgtttgttgtatttacttcgagtttgtatccagctgtagttcttgaaagcctctgtttgccagagcgaagtttccttgcgctcacggtgtctcctgaacacatgtctcactgtgagacttcttttcgtgcatgtgaccatccactgctggttgtcattcacctgaagtgtatgcgaaagtgacagttcagacaagggctgagatatgaaaagaacgagtgggtttcctcttttgcgcctgtttactcttcgtcttttttccgctctcccggcacgaaaagggggtggtgaccttcacggacagaagcaagcgacaaaggcgccttcaaaacttctgtctccgtgaccctcttgaagttcttctttcccccgttcttttgtttcctgaaaggcgcgccctcacgacactctcgctgtcccgcctcttcgtcctcgttttccccgttgctttcggtcttcgttcttctttttttcttctcgcaagagccacacgaca

SEQ ID NO: 1894 - DNA, 2422 bp, Toxoplasma gondii
  source 1..2422: mol_type = genomic DNA
cgcatgctgttcaaccaacattatggcttctgtcgctgctgacgcgggtgcccctctggtgcgagcaggtgtgccgccgatgcccctcaggagcgactgggtgtccgcgaggctcctgtcatatgaagaatctgctcagctggtttcatatagcatcgacgattgcctgtgtatatacaccctctctagcggcatcgtagttatcttattattaaatgcgggagcataatattggcctaccgctgtacgttcagtcaacgatgccacatcagaatgctgataacactcagcctcgttcacggattgacttgatatgctttggagagacattttatgtcactgatttgtctatcaatttgttctgcgtgtcgaggaccctccttgttaccggcaggcctgaatgactacttcccccgtggccctcacggtcactcgcatgaagcgcccactaaaacataccttacggtcgcgagtgcgttctcgtgacacattctagccacagtagcatcatgtggtaagtcattcctgaatgttctcctttgttcgagctatcggacacaacattcgtaaataatgtcgccgggattctgtgcgcagcggaatccgcgagtctctccattcacataaccgtactctctcacctaggcatcatgcaacccaagaatcattcagtaacacaaacaaagaaggcacgatcatgcgtgcagctgctgagccccgcgtcgttccggctagcgtctttcccctcttgaagcaaccctagacgcgcacctcacctagttagcaagcagactgtcacagatttcttacgcatagctggaaaaagtgtccttcgagaagcacagcgttagcgtattcgggtacagccctccaacttggacattgccgacctttccctactacgcatccggttgtttccggtcccctcaagaatagtaaggaatctgtgacaatatgcctgctgaccaggtgaggtgcgcgtctagggttgcttcaagaggggaaagacacaagccttcggtctgtacatctttgctgcgctttctattagcagaagaagacttcttgcagcccaagctgtttccattaacgtaagcagcggtcaatatccgtaccgttcaaaaagaagcttttttggtagggtgagcctgctatgtgccttgcatgcgctcagccgaaaaaaaacagtggtagccacaactggccaaggtgacgcgagaagtgtcttttaaggcttcagccccgtccttttccctcctaatcttcgaattcttcatgtgctgaactgggctgccaccgggtatgtacgttatcatgaaaagaaccgcgtgaaatatatgcagctctttttttctcgtgaccgtcactcagaggtgccgacgcatgtacaacagatacactagcacccccgcctctcgaacgctgtgccacccacagccgacgagaactgatccgggttttttcacgtatgaatgcagttcgccttcactgatgtggtaaaacaccgcgcgtttgtttctgaggaaactgcctgtcagcgacgattttaagttttccgtgtcgaaagtgttgctcctgtatcctcgtattcacattttatactgctttttgtagcgtggctgttggggggccgcagccgcgtggacgactaaggacgctgcgcttttgtctttccccgtaccatcttttcattcaatgcctttttatgttttatacgttcaccacgcgctgcacagtttagtatgtgtacaatagactcttgtgcaatggggggagcacgtctgctcccgtttctccctgcacagttttcatgcgatctgtctacgcacttcggcgtgaagtagtgttgcgctgattttttatatatatatgcacacaggtttgctcccacatgtggaaatccttctatatgcggggttgcccttttttcccagttcgtcttgcgtcggtgcgcactgaagttccggcgtagagagcgtactacctaaagaacttccctcgtttcgggacaggtggtcccgcttttccagagcggaagacgtttgcagtcgtcagctgctgccaggaccccctcgctccttttcctcctaactcatttccatggttctttttcggagcatccaggagaagtgtctgttgggatagcgtcgtgactcgtcattcccccaactcgataccgtgtgttttctttagtttctgcttctgcgcgggaaagtttgccttttcctctccaaaggtccctgcctgcccctttgatgcttgccgaggaaaccccagctacacggtcagagccaactgggtgtgctgtacacgccgttgcgcaacggtcggaactcgcaggatctgcttgtacgtacatcacggtagagtccagttctgaagagtagcttcttccttcgccctggcttgttttccctcgaca

SEQ ID NO: 1895 - DNA, 1941 bp, Toxoplasma gondii
  source 1..1941: mol_type = genomic DNA
gattcgaaatctctgcagccgaagacagagatagggcacagtatgtgacggcaaactcaggaatcatagaacgaacgatcaatcgttttttctacccagaagctcaggcagacaccccgccttatgcacaggtgctgtctatccccataatggcaagagcgtcttcgcaccacatgcctacgacgacgagtctcgataaccgaagggagtagcgacacccgtgagtctttgtctcgaagtcaccagaggacacaacagactttccagcgtggcgtgttccaggcaaccaataagactaccgccgtttagctggcgctgaagagcatttgtcccggcgtgaacgaaatgatcgtggaatgttgcgtattgcaggactagagcacttttggcagtgaacaagaaccagcaagggttctgtttgtcgtagatgcacattcaagcaactgacaacttcctggaatggtaaaaacgtttataggttgctttgccaaggcaaaggcagtgcaccgtgtaaacctgatctccagtcatttagagatatttaaaaaacggtatacatagatatatgcaggtagagacttgtagatacttgtagacggacacaggtacagaaaggtgggcatcgctactggatggtgctatcgaactcgattttgcgggaatatctctaaatcacggacagtggaaatcgctgttctcgacattggtcgctgggaaactacattagacaccagcaccctcgatgcgaataggtcatggccatcagtgagcgtgtccttgttcggtttcagatgcaagatcgtgcacggtacaagcacttgatattccctagttccacttttggccagagaaggatctcggttaaccggatctgtacaccataccctcctctaacggcagcagaaaagtggacaagggggaagtggcgcgcgtggacattctgatttgtcgggaatcacgcagcagtttgcagcggagacgaaaccaatgctgttccctgccgcgcttcttctgtcagaagatccgatccagttcgtctgaagcacgagcatgcgtttccaggttcgattgattccactgcatgcagcgtctttcgcggctcgcggccccgctgcacgcgtcgtacccgcgtttcctggctcttctgtcggccgcttgagcatgcaagaagtctctacacagccggtcgcgccaaattgagtgaattccctcttcgttgttgtcccttgaaagaggaagaacgtctaggatgctgcgtcgaagcatgcggatggcactcaaaagaggaaaattgaggcccggcactccctgctgatcgctggccaagatgctgtagaagaagcgttttgggtgtcagcgcaggagacaggagcgctaggtcttttccgctcgactttcccgggtcacgtgttcgacagtgtcgattatcgttctttcctcgcgagtcttcagttgcgtcctggctgccttgctttagttccttctttttccccgcggacaggaccgcgtcgtgtctatagtgtctttcccacccgctgatttccattttacagaatttcgttgggatggccacaccccagacggttctttcctgccttctttcttccactgaacggtgtcactggtccgccttcttggcgcgtgcgcgagttctgcgggcgccggtcggctgtcgcgcggggctctgcgaccggccgctgtcctgattaaatggttcctcgtcaacgcgtaaggagcatttgcagactctgccgtatccgtacaaacctgacgcggagtctggtgtgtcgcagtcgaggacaatagcggcagcttcccctcggatccaggaaggatgaaaaatgctcgcctctatgccgagtgtcaagtcttgcgtcaccgtgtcgcggcttcccttccaactttcttgagaaaaacgaacgttctcgaagacctgagcca

SEQ ID NO: 1896 - DNA, 2142 bp, Toxoplasma gondii
  source 1..2142: mol_type = genomic DNA
tccgcagacatgatagtcatcatcttcttgcggatcgcacggatttgggacgtctgggcgtagcaagtgctcttcacctgctcgggtctgtacatgaatacatataaaaaccagacaagtaaaagttgctctccgtaataacatctgaagaaaatctcgaagattggggggggagatgtaggcaaaacacagaggtgtaaagccacctattttttagcacgcacctcctcttggtgaaggcaatgcagaacattctcaaagtgtagccgtccaaagtcgtcacgtcaacgaatgcctcaatcagggagtggcacttgcggaccaaggagcagatcttgtcacgagtcatgtccattccgtggaagtcagtcaagcagtttctgccctgaatgtcttcgcagcagagcttgatctttctgaaaccttgatcttcatcgttgttcagatcggccaaattcacctcgtaaacacgtccgcgaagaccatcaacggccaactctgataacagaaagtaatgagacacagattcaccagtgtatgttacaagaaagcggcagtctaccggtcgtcctccggcacgagcgtgagcatgcatttgaaagtgacgcccacagccgcgaaaaccatcacaaccaactctgcaccaacgagtatcctcagccaactcaaaaaaacccatacagcaggaagcgaaagcgatgcaagactcaatacactgccgtttcttgatggacttccccagcaaaacagaacgacgtctggactacacacgggggccgctggcttctgatttccccgcagattcgacgcaagcgcgcttactagtcccctgcgattttgtgacgagggtctttccaaagtttcggacgttgaaaagagtgggggctttcaggtcataccactccttcttcaggaagggatcaccaatcttcttcttgccccccttctttcccttgctcatccgcttattctttccgatcgccatttttcctgtctgtggtagaggagcacttcaggcaacgatggaaaacggaaaacagtgtgctctctgcacgagccacacttgcttggaaagacgaaaggaataattcggcgccagcgcgaacaagagggtcgaagttgcaagtagggaaaaggacacgtgcggtggggtgcgggtacgccgaaaccaaccgacgtgttggaggcagcatgcggcatgtggggcctacggcgccatctcggaccgtaggtgcatgcgcatgcgtaaaattgcaactgttgacttccggcgtacgtagagactgttgcgctttgcatcgcacagcgggccaaggactcgtcgcgtggtgacgagaaccgcgtctcacatgcagccgcagcagctgcagagaaacgatgccgttgtagctggtgcaattcgtatgaaaaatgaatgcgcccgctaaactggaagaacgtccattgcgaacatctggcacggtcatcgatactacgacaaggggggggggggcgtaatctacggtactactggttgttagaggcgttgttttggagtccacctgcgctggatcctggtgggaaaacggatggacaagaacatgcgtatgcatcccgaagggagacagcaggacttttgtgtttggtgagatcatgtttatatcgttgaaggagcgtaagtggaagaggacagttgaactgttaaaggcgtcaggatgattaccggcggcccgtttttttttttcgcggggtctggttccctctaaagctgctagttcaagcatcaattactctgtctcacggtaggcgggagtcatatctgtgcgaccatgtgaatttacattgttatttcattgaccctcagacgactacaggactgtggcggcgtttcttgtgcactaggtacaagtctctacaggggcggtggagcacccagcaccgaagaggcacgttctatcacagcatgaactgtttgcattgtggcgatttgccacgcaccaccgttagcatcgcctgcgctttcttaaaaggcgttgccaatccaaatagagttgcttcctgtataacggtgtactgtatgtacagtgtcggcccagctgtaccgcgcccctagcgtcacgaaagatttgcacttttggctaagatatccgctgatcggcagaa

SEQ ID NO: 1897 - DNA, 1054 bp, Toxoplasma gondii
  source 1..1054: mol_type = genomic DNA
aaacatggatcgttggcacatacaaactgtgggcgaaccggagagaagcgctgcatgccgtccttcggctgcggagatttgtggtgttctttgctctcccacaagagacagacggcgtagaaaatggacgtcgtcaagtggcggagatgacgatcagagacacaaacgagtcagcgaggaaggcgagaaaagagaaagtcgaatgggaacagtgaacacaacatgacagagaagcacacactgcgaatgcgtaacgggggaaaacaaaagcgaagcgaacaacgaggatagagtggaagctaaggacgatgagaactgggaaagcttcgatggaataccccgtgtaacgcgttttctgaataaaaacgagtgatgcggccccttgtgcaggatgcagagaaaaacgcttctccatatttggcgtccttcttcaactcaaagctacgcgacagaaaaccacagggcctgcctcgcgccatttttcttgtgaactggcagtacttctccgaggcggcagccttctctttagaaagcattctttagtgcaagtcgctttcgccactcctagaacattttttcggccggctttcgtttctttgcgggtgcatgaacgcgcttgctcgagcagtcgaagacactgtcatcatctagaaatggtccccacgagaagtcgtagatgccggggccagaaatggtcgagagccaccgcaacgaatttcagaaatggcgaaacgcatatccagctgcgcttccaaaaaacggcgagcgccgtacttgcccccccgtcttgtcgcaatcccgttggcgggcagacccacagaacgaaacaattccacccccgcacacctcgtctttcaaatgaaaacctgctccctcgcgttgtttgagcagattaagaacttctcaaacaacagaaagaggaactcggccgtggaccgaaacgctcggagaagcgaccgggaagctgcctcgttgcgcgcgcattcacaattcaagaccccgtcgcacaaagggggtgcgttgctcaccaaatcaaaaggaagacgagcaaaga

SEQ ID NO: 1898 - DNA, 1740 bp, Toxoplasma gondii
  source 1..1740: mol_type = genomic DNA
ctcgagctgctcccaaattttggtaaacacagtggtcttctccgtacgtttggtgacgccgtgaggatcagcactgatatcttctgatttgctctttctgtctccgcttgacattgcgtttcgacaagattccgaagcattcgacagactggtaggtttgttgcctcgagtagacgtgtcttgtgtatcttcactgtcaccatgtccctcaacataaaatgttgcaaggtcttctgttgagttgtttgcggtcgttggatccgccaaggcttccttcacgggcaagacctccactttagccactggatgctgctcgggggaagaagtcacctgtgtctcaccgcaagcattgtcctgtactgcaagtcctccttccgggtcgtgatgacagctttgggtttcacactgtgctccgaattcaccaagagtggatggcgtcggctcgcatgttagtctgttggtgtctctatctaatgcagactgagaagtttttgtagttttttttccccgagcgctccccaggctgtcatcggtttgtgagcacacaggctctccccgaagatgcacatctcccatttcgccggatatatgacgtggcaaatcagtggacactgccatgtcggcaactggcctgtgtggatcagccgcagccgaaacacttgcagccactggagtgctgtccttatccgccatgccttgcagtcgttcggggtaccggccctcgattatcagttataaaatcacttgactcgcagctttaaaatagggccaaagagcccttcttctaaactattggtgaacaagtctcctcaggaattgctaagctgatggataataatcgcagcagttgctaacgagagagacctgcagagcctaggacacaaaagaaagactggtagttcttaatagaggtgaagcgtgatggagaagacataggaacaacatcaaactgaactgcacacccactcctcaactgttatcacggtgtgccggtaaagcgagtcaaaaaccattatgatggtcgaccgctctgcggtgaacgatataaaaaaccacagaagcagcatgcaaacaacaccctgtggctatggtaccattgaaacgccacaacaaacacaaccaagccgccaacgctgctagctcttggtttctgcaatatccttgaggtggacgcaaggtcccattaataatgaaaaattgcttcaaactcagttcttggtgcagccggaccagcggcggccgggcgactatcgctggtcaacagtgaatcggcacagcgaaagcagagtcgaagcatatgagaagtgagtccaccttaagcatcatttgaaactggtctggaaggtgaaaacaacaaaaagacggtgtttcttcctgggttcaacggggtcgggaactcgcttcgccggtaagctagtcgcagttcgcttgcgtaaaaaagcgcggccgccacgttggacgggcggtcacaaccacagtttagaaagcacaacgacccttattccgtaaggtgaatttttccctccagtgcttgtccctcttagaattcaggtgtacttagtcatgcgagcggaagagactgaccgatttgaggacgaaacattgaacttgttacggtgtacatccaggcaacggatgaggaccgcacctactgacgagccacagtaggcgagatctattttcccttttcaggacgaaggacactagcttcagttggaaaccctgtccaccttacaagca

SEQ ID NO: 1899 - DNA, 3827 bp, Toxoplasma gondii
  source 1..3827: mol_type = genomic DNA
aatggcatgctcgcggatttcaacataggagcagcgcacagagaactcgtactcctggtccagccacttgtgaggctctaggttccacgcgagaaactgtggcgcgttggttcggggctttgtccgtggtgaggcgggatgccggtaagaggcaatgtgattgaaaagatcttgaagagcgttgaaaatcacgcccgggtggtcatgcgttccgaaaagcgtgaaggtcttcccgctgcctttgcctccgcacgcaatcaccgtgctgctgattccctgaagaacgcagtgaagcaaaagccactcaaatgtctgtatgggatgtccgtccaccggagagaaaatcactcggaaagaaagtggaaatggccgcctcgtctcgaagcttgttggatactggaatcatccgctgacactacgtccccatattactattcacaactcagggaatttcttgagagggagcgacgcagtacagaaattgacatttctcaggaggcaggatgcgacttctgcattcagtccattcaggaaagaatcgacaatgcatggaaatacggaacggcggccttcaaacggttcgttacattcaattggaagtgttaggactggaaagttgcatccgattcgcctaaataacatatttcagtcttagaggcgtatttgtctcgccaccactaccctgctggacaagatgctctggtgtgttcatggagatgtgaaagacttctttttcggcagacgggtaatcaactactttcggaactctcagaatcaacttgtggacgttcttgaatgggttttactgccccacttactgggctgtttgttgcacgcagttgtattctcacgaatcatgtgatcgcatcgaaaactcacctcagtcacttgaatgacaagaggctgcacaatatttttgtatactcttgtcgttgccgtgccttcgtcgaagatgctgcaaaacaagtagggatttacgaggtaaaacacgagcgcattaatcactgtctcgcgatatgtgagtataacttttgttagaagctctttcagaagtaaaaatcgcctgtatctgtaggcacaattactctaggtcacataaatagcagacggccccgtacaatcctccctaatagtgtgtcgagctgacaacgaattaccacattctaggaaaacagagctctaaagaaccttcagacactttttcccccctattactagtatgttactacctggatctgactgacagcaggccactggcaaatgaaagtgttcgtccttttctgaaaaaggcttctttggcaagtacaaaacgggtggagttctgagaaagtggaatatcggagtgttctcccgcgcacatcagccttgctgtatgctgcgccaattggcgctgtgaataacgtagtgagacacgactcatcgggagataagtgtttcagagtttctccccttttagaccgtaactgcaggggcgcgttgcccctggcactggtggaaagcggaaggactcctttggtttcccacctgccgctaaaggtaaattctgcaagagaagacgacgagtgcagaaagcagcctgcatcgcgtttctgttggtctagagtgccttgcgccgcgggatcggaccgggacagtcttgccttctcggtgtcgattccgacggacttgggacctgaaacaaagcaagctgaacgggcaccctccgcaatccgctcaacagcgagcggacggaaacggacagaaacttcagattcaacttctaccgcggtttgcgcggtcgaagtcgggtcagtcctctccatcagccccggaaaagtggaccgcccagcgatcgagaccgcgagtctgtctaaacttgaggcgaaccggcggagggggttgttttacggaccaatttctctcaagaaagggggtagaaaataactgggaatcccaggcgacgattgtaaaaaggacaagggcagaccgctcggtggatctgccagaaaaatgccagtactcgttctactttttcgccaacgatgtatccactggaggggtacgccagagggttgtcttgtcatctacacggggtgtgactcctctccacaaccgagtcccaaaatattggctggaagagggatctagacctttcctcgtgccacagagaagacgaaatcatggttttaaaccagcaggttagttcacagaccaacgaagacaaccatgagaaaagaaactggaacaagagaatcgagtgcctcttttctccaggggagggcagaagtggctagagagtggtcctcgtgaacgcgacgccgtaccaaaaacgatcttccacgcacatggcgggttttcccaacatagttctgcaaacaccgtcgttatcgcgggagttcccgtcaccattgaaaaggcaagagtttctacatcattctaagtgttctgcgagcgatgggtctacacatttcatgaagcttccatgtccatcgccgctcttcgaccgcgccgcaggcagctgacgtctcaaatcccgagcagcccccgcgaggtgtagacaagacgacgcagcaggttctcacttgcgcggcaccgcagttgatcaagaccgcgagtcaactgtgaactggttattctttccgtcgacaaggcactgaaatatctaaaatggcgtatgtgcacctgatcttctcggctgcgactgcggaaaacgcaaaagttttcatttcgctgctgcttcggtagaagacacggaaaatcccatcggtaaaagttcagtatggtcgggacccctaggcagagaagaaaaaagagtgcacgtctaagcgaaatgcgtaactaggaggggtgtacatgcaggggaacgactgtcggccgaaagcaatgtcccactttgggggtgatacgtgatttacacccgtctttagtagacttacggaatcgaatacgtcttcggattgccaataagaagcaaaacttaccgtaagcgaacgggctaacagtatacagagcagcggaggggggctcggcgactggtcacgacacctcccaacagctgactggttctgcttgggggcccatcacaacgatattccggaggattttcttgtgcacttctgaaaatgtcttctgattgcgaattcacaagagcggtagatggttttaagcgaagggcacaggcggtcgcttcatttatcggtgcacacttgctggcattctgcaccgaggggaaacggttttaaacagctcgacccatgtgcgttatgatcctctgcgctctggagaggcgcttcgataacaaattgacaaggatgttcttcacattttggtgttgtcttccagggaccaaatttccgcctctttttctgcatagtcagaagttgaatagggcgctgtcttgagccgtactcttgtaacctccctccctgcgtgtggcaaaaaaatgggctactctccagggcacgatggtgtgctgatgaaggaaacgaatgtccattttggcttgtcgatgtttgtggataagcttccccgatgctctggtagctgcatgttaacttagtagggcgtgcatatacgaattgatggtctatcgctctggccgtgcccattccctcgcctactacggcttgcgcgtatatatgtgttccaaaggtgatgcgcgtatacactgcctgacggtgttttgttgtacattaaaggtcagttgcttgatatatacatatatagatagatatctgcataggtttctttcatgtgatcctatttctgagcgaggttacgcactctcttccccgcattcacgtctctgcaaaagcagcaaagcttgtgatgaaggcaacggaacaaaa

SEQ ID NO: 1900 - DNA, 2130 bp, Toxoplasma gondii
  source 1..2130: mol_type = genomic DNA
tacggttgcacgcaaggacagttagaaggacatggcaagaatccttcggggactcttcacagatgtcgccagtatatttcacaccctgggcaagcggcgcgaccttcgtcaggcgtttacaggctcggtaggcgacgtagggaggtcttttcaccacatcaaagtctcagaacaggctacaccgacgatgacttgaactggaacgcgggcttccttagaacaaaaggaagcctcagctcagcgaaatgatctcgcgcattttaaaagctcttctctagactgactgttgtctagaagcagactgcgttcgatgcaaggcgtcgttccgcgtttcaattccgtctcctctggcttgccttctgggctgagagcagccggggcgggtctccacagctgcttggtcacttgccattaaaaagctggcagcttgtcaaattgtctgcggaggctgacgaagcgccgccctctggcttctatgcagacatcgatcctgtgaaaagacgagcgagaaccaccgcttcgttccgtttaccttccgcacccaacatcagtgtggacaagccgattccgtaagaccgcgacgaatcctgagtctacgttcggagacgaatcctccggaaaggccatggagaggtccgttggcgtcgccactttcgctaaaacaaaatcggcgattgaaacgcgggccgcatgagacctgggtatgtgtgtgtcacactcatcgaatgcgaggcagtcaacgatgcctctaaacaggtccaacagtcggaggcctcccaccggctcaacttgcacggaaagggggaaatacgttcttagttctcatccgagagacaaatactcactgtgtgcgtttttaaagtcacgcacgcttgcatctcaaccagaaagatgaagatcaagagtaggatgaccgggacgacacgtgggtggcgggcttcagtacggtgtgtatagtcggaagggcagaaacaagagagaagcgatgaagtggcggtatatatgagaggatatacggtaaaacaatgggtgatgctcctacgctggggaatctctgcagcattcgttgcgtagagaaaaccgccttctcattgacgggcatgtcgatgcatgcgaagctgtagattatctggcgcatgcaacgcgaaaattccgcaaccagtctgacactcgagaagccattgccagcctgaaactggagtcccgacatcaaaaggcgcctgggcgccccttcatcttcggtctcaacgaaattcagaaatgccgaacagactgaaaacagacaaagcgaaaagatgaactcgctttcgaagggtttgagtttgtgtagagggtgcatcgacgaccggcagcgtttccttgacgctgagcatgcgctagaaccgacaacgagagactgaggggtgagctggcagagacaagaacaattgctgtttttgtgggctgacccattttttccctcttagaccctacctcgttttccgtcttctctgacacgcctcgcttcgacagaagcggctcgggacacgactgccagtttgttttttctcgagagtctcgcgttcgtcccttgaggtggattcgcgatggcccatcggtggcagatttgtactccctcttttttggcagaactcgtttgtgtcccattcagctgatagctgcggcatcactcccgggtctagaagacgttcgagactgccgctgtctttcatcgcttctcccgccctttctccgtcaatgctcttgtctgttgtttctgctgtgtcgacttttttgtgcgcactctctgccttttcacgcgttccttccctcgtctctatctcctggttgcgttgctcgcgctgtgttccgtcgtccacccccccccctcggctgcctggaagaggcattatggcttgattagcaaccaaaggagccgaaaaacgtagagaagaccatcttctccgtcaaaagggaggcagctgagctgtgcgagacaacctcgccaggaacacacatctacagacgcgcggcatgtagtgaaatctgagtcgggacgggtgcgaaaaagcctcatttctttcgtggccgggttcccatccgcggccgtgtgtttcgtttgctgcttccttctttctccttcgcgcaaaa

SEQ ID NO: 1901 - DNA, 3101 bp, Toxoplasma gondii
  source 1..3101: mol_type = genomic DNA
cctctctcgtggtgttgcttgcgtggcggtgatgggaaatgagttccgaggagctgtggtactttgttgagaaaacattctgatgaggacaagccggcggtatcgccggtcgtgcagcggtgccaacaggcgctcgcaggttgtcctcgaaaacccgctgaatgtttccgctgtgggggaacaatagcactctcggggtgttttttggcgaaaaagacatggttcgattgacacctaggcctcgtttaagtgtggctctgtgggtgcatgcacggtgactgtgtcgtttgttttttgtgtagctttcaacttgtagagcctctgttccagttgcttggtgctgcatcgaaatcgagctaataatgtctcgcctttgcttttcccggcttctcccatccgcttcctttgcggaacggtcacggttctctttgctgtctgtagacgcaaggatcgatacgcgccaccgctctttctgcgcgtgtcgtctgggaaagcagtccgtgcgcgccgccacgacgaccctttagacagccgtcgcgtgaactccggaagcgtagaaagatgttccgtgtgaaagcgacgtgcgataccttttgcattagcgaaagaacggcgtattttttcgccccgtcgttgagatggaaaacaagcacccgcattcaaacacacacagtggacctgtcgaaagcgcttgtcactcggtcctctggagcgacgctttccagttactgttaataccggatttttatttcatatattgcgtgaaagacgagagtgcacagccgttaccaagccgattgaatactgaaactcacatatcgttgatgaggccctgcaccggtaccgtaaacacccagttgatcgcgaagaagaacgactctccggcatcccaccctggagcgattttgcattaaatccttgctacccttgtcattgctgtgaaagcattttatgttaggcgtcaagaactggttaaagccccaaaggcattggcacggtcacgcgctatccagaatgtggaactaactaagataaacacccaacttcactgacaaacggtagagcggctgtaccgatgtctagggattcccgtaaagatagagacatgtgtgcttacggcgcttttgtcgtttcacggctttcctgggtgtgcagagcatccaaccgagatgaagcaaaactaccagtggaaaaacaaaagcgtgaacgaagccaagcccctgagttgttttcagctctagaggattcaggatctgtggccatgtgggcactgcatgcgttataaaaaaaactgaatcaagggaaaacgaaggcagagaccttcggaagagagaggcaatgtcactgactaaaacctaaccgtggatcagagtgaaaaacctgtacctgacagatgctgcgggggttcgttgcagctttatctccgggacgatatacgattacaagacacgaagttcagtgtagaaaggcttgtcacattgaataactttgacaagttcgatacggggcccatgcactacaaaaaagtctttttcgtgagatttgtgtctgtgcaaagtgtccacgttgtcggcattctactgctggcgttcgtcgcctggacgagactgaattcttaacggattttcatagtagcaagcgcagagtctggtagtacgaggagatgcgataacacgtcctggcttgcagtttctcttggccaattcggaagcttctttttatcccagatctagtgagctctcctactctttgcagatctgcaccttcatttctcacctcacaagaatttttatggctacgaagctcctcaccggtaggtccagcagagatgtaaaacggagatgtagtctacaacaagaggtgatacgaggaattgtggtcggggaatgcagcaactaaaccgaatagcagtattttatacaaccatgtgtctatcagagggagctgagctgctgccttgttcgcaagcgggcccctcaagaggtgagttccagaaaggatatgaccttccctcaagcaagcggcggttaagaaaattggccgttttcatgagtgtccgtttccctcgttttttgctcgttgtctagtcgttctgcaactcgttctctgtcccttgcggttatcggattcggcgaggaaaactcaaatgaccaccgtagtctatccgattccgggcagtttctcgaaaagaatactgcccccgtctgcagaccacaaggtgtgttaccgtgtttttggaaaaggtttgaccgggccgttgtcagacgctaaaggagggacagatatgtgacggtttcaacggcactttcggggttttcaagatttccaaatcacaacagcgcaggcgaattctgcgtcgatgccctttagagtctgttcgagttaggctcaattagttctggagttgtcctgctcatgttcagactccagttgtattctttgatgtttgtggagatgttcgcgctctgaggagaaacatgcccagtagatgagttgagcttttgagggaaccgttcgcctgtgtttccctgcgttctgacaaagagatgtgcatgtgaaagtcgctctgtcgctgtggaagtataatcgaactgttcatcggagaagtgataagcacataggaactccttttgcacacatacgcagattaaatgatctgtttttattgcttcgcatatcacatgagggagctcttttcctgaagaatgttctgaaaggaacggtaaccactgtggcacgtcccctttctaacctggctaaccacaaaacactttttgtcgggaccgcgatatctttatttttatctctacctttctccaaggatccggtagagttttgttcttttgtttcgggggtggtcgctcactgttgaagaacggacggagttctttgttcgatcgagagaaaacaagctccacctccaatgcagactagaacgcatgcacgaccgtttttttcgtcttgaaatcaagagcaacgtttcaggctgccacgaatgttccaccagccaatttggtaatatcactcgttgcactttagcgctgcattccgccgcgcaaaacaatctcccctttctcagcgaaccagcgatcgcagaacca

SEQ ID NO: 1902 - DNA, 1296 bp, Toxoplasma gondii
  source 1..1296: mol_type = genomic DNA
aggcgctccttcttcagaagaggaaacgcagtcactgtatgcccaagaaggcgcggccggggcgcctctgaggcagcggcgggagctgcgtttcggcgccgtcgctctgcggtttccgctcggttgcagggcgtctcgttccgctccaggagtgccacggcctccgagcctcgaagagcgccctcgaacgcaggcgacttgacaaacgccgccgctggctctccccctccggcgcgagcctctgcgtcgccgtcccgcctcgacggccggaagccgaggtccgcaggggcagcgaatcctggcgcgaaggacggactctctcccgcggcgaactgcgccgtcgggaccggtgtacagacactcgtcccggcggggagtacaccggcatgctgactcgctgcggcatgcggcagggtggctacgaggttttccggagcaggaaaaaggaaaaactgcggcggacatgcagagagggaacggggagccgatccagaaggcgtctccgcctggagaggcacgagcgccccgctggcgcagacggcgcgacctccgcccggggcagggacgcagacattcgacgtcccgggtgtatagacacctgggccgtcggcaggcaggtagccgaggggatggggatcggcaggcggacagcagacgggggtggctgcgcctggaaagaagcgcgccgactctggaaaggaggcaggaaactgtggagggagcgcgggtgaggcgtggaaggccagagacggatcaggcactgtgtcggcgaccagcggcggacccagaggcaagagactctggggagggagcgcggcgacggcggactgacttcggtcgccgggagcagcgaagagtgtggaagacagagacgcaggtgtctggagaagatgaggaccaagcaggcgggaggtttgacatcccccggcggagaccgacgcgaaggccgccgcctcctcctcccgcctgttgccggcgcggccaccaagcggagatggtccgtgagccatgctgagagacctcggttcagactgaagaggcgacttcgagaacggtccggtgccgggatttccccgaagaaggtcgagagctccagagggccagcgagctctgcggagagaagagccgcgcgtagtgtctgctcgacgccggattccgagaaagaaactcgagtttcgacaagaagaagagacttgagggcagggctgatgtctcggggaaggacgagcgagtcacggccattgaagaaccggagagaagcgtctcggcatggcagacatacgctctgtgagaaga

SEQ ID NO: 1903 - DNA, 4410 bp, Toxoplasma gondii
  source 1..4410: mol_type = genomic DNA
cgtgtttgatggagcagtattcacagagcattcaatggcaacaatccaactgtccgaaatatagtatgagctaagatgactttgatgaggtgctacttagcgtgtctacatcaaaacatgtccttagaaaggaagcaggagatttcgcaggtgaaggtcacagcaggcttgacaaatgaatgacacagacgtgagctgtcccttatcgttttcccgaaagaccttacgcttccacgaatgcgaggtagatttgcattgatcaccttccacttgtcaaggaaacaaaaaaatagggaggagtgtagtagcttccctcctcctcaactgcagaatcaccagtcatttagtggagcctacgcaacatgccatttggcctcgactggtgcagcagctgacgggaccctgagtatttattccgaggtgtgaacgatgcattccttacctctcgtactttctgttggatgcggcacagcttcgagaacacacacacacagagaaaccgcgaataacatttatgttgaagctggatccccttaatgatggagaaggtaatctgaaagggtggtacggaaggtgatttcccaatcaggacgcccgtcacgccgacatacaccagacgacatcgtttgatacaggacattttgatgcagcggcataaggatcttgaattagaacctaatataagccttcttaggccataggcctgttctgaaccgctgcagcggcgtcctgtggcagcagagaggaagtagaacggcatatttagtatggttccctacaagctctatcaaaagccgaataaaacagacagtccgtttgcaaagcagttgtgctccgagcaaatgtgtaagcagggaagtagctcagtttagctacggctacgttgacacgcgcctttaattaacacacatctctctactgggaaaaaaactggtaaaattacgcccaaaacctttcattccattttttgtgcccgaatagtcttgagttgctgtacgaccaaactcaccctctgagtaatactttcaggaggttcaggcagaggcatttgctcttgaggttcagtttcgtccgtcatcttgacttgcactctttcccaccgaaagaaaccgctacggcacagacacccgcgaaagcgaaataatgttttgcctgggggctagtcagaggaccgtcactccgctacctcaaaggaaggactaacagaagccgcgtgacgcccaacacatcgcacgtagttgtaggggaccaaaaatgcgggggcgcccgaataccgcacattcgtttccgaagtgttgatcaatcgtttattcatatgtaagttccaacaagcaataacaccggaccgccaaacagaagaagatcgcggaccatatgtttgaagaagcgaatttgcgcataactggggcctgtacagcatgaagacgggacagcgtctcaaagtaggaatatcgtaaccctcgatcatcgagagactccgtcgttctttggctaaatttgagaaacaaagagattggctgtcattgatacttccacaacactctaacttcgcctcgtgtatcatttttgagttcgacaaagaaatgtaacatgaattccagtgtcatcctttctagtatcattcagctaccgtcgcgtattgttgatcaccggctacctgcaccctcgcatgaagagtgacgcggaaggtggagctcttccttgttgcctttggaagtggccgagacagtgtgctcaaagtaacgcccgagtaaacagacgatctgcggtggtctgctacccagttaccatggagtcatgtcatgtctgcgtattttcacataggtttcctgtgttcctctcagctagccaagccatctgaacgtcgttgacagcctgctagccgcttcctgtctctgaggcaatcgcgacagatgttgccgccaagttgggcgtcgattcttcggtgttgtcggtgtataaaatgacttgtcctagtaacagctgtgctcggacgttcactgtgtgcattgcagcatctgctgcaacttgtgcttgtctgcagttcggttcactactcgcgctcatgaatgctaaggaagttgctcgagcgtgaagtcttcttatgtaacgttcgacacaactacgaaagtcagagagtatcagtctgcacaaaccatttgacgagattatagcatgtaccagatgatgcggattatagagaagcgaggatacagcagccgtcggtctgttactggtgcccccaacatcgttgttgaccacatgcagccgtatgaacgtctctctcacaaagctgtgatgtcctcaccattctggatcttcgagctcactgccaacaataagataaaacctttgcgctcccatcagacaaggagttaatcctatacaacttcgccgtggagtcacagcaaagtgggccatcatggccacatacgcgaccgcaagtcgaattactgtagaagtgccactgcgtattacatacaggttagtcacaagtcagtgctgctcatacgtttgctactttttcgatgcatcccacaggactatgagcccttcagttctccaaatgtgacttcgttttcactttaaagaaagccgtttgagattagaaaacgctgtagcggagggaagcataggctttccgtaaagcaatttcctttcgacttttcgtgtctgaatcgacgtgcggtttatacagccttcttccggtgttattcacggtcaaatagaaatctgcgggctggttgataactgtccaggagcactattgtttggtggagctggtactttcactcacaacagctgaaacagttacggaatttctgtttctgttgtctaccatagctgtcctggcagttggtaaccattagcgatgtcgataacgaatgtgacgccagaagtgctaggatggccacgtgccacggaggtggcaagtgaaacggttggcaggtgccttctgtcgctccccacagaataaagtactgggaatgaaccaccttcactgcatgaaactttcttctcgagcatgacctcgcgagaagtgaagtcacatctgcgcttgattgcggaaccttatgattgcgatcgctgctctgtcacacggacacgcagtttcacatccagcaagattaccgaacagatatgacaaagtgccacaaaaaacagttccactcactggctctggagtctccgtagtcgtgttaatgaattcaccttgcaatgtgctcctccgacgtacttgcctgtcgcgaaagtctgcaacgctcctgcctcttgcttcacactatggagcgcaccggctttttggtttgatgcaactctcacacccaaataacgcagcatcagtcagtcgggttgtaacccccacagagacgtttgcgttcccgcagctcgaatgcactccgtcgaagcgaaactaggattctctacaccagttgtgttcagagacagcgacgatgataagcatagcaagacacatacttttcctcttgcgtaatcccgctaacccgacttcactccccgagtgtgcacggcacagagaacttcccacattatacgtgcaacgacggcttcaaagcatcaatagacaagcactcctccctcatcgttacacctctccttgtttccggcatcttcacacttgctggcacacaacagaagcaactgtggctgacacgtcatagcagcaacactttcgtctcgatccgaggcgacatgaccctattcaaacaaggtcccagagctggtgctggatggcatcatccaaacgggtttctttcttgacgaaaccgtaacgtttgctaaactgtaacacatggcgctagggtgaaaagatgcgcccgtgtttcactgaagacccaccacgttgctgctactcgcagactgtggaagacacagaaagccatttaatgctgaatgaccatttttactgtctttatcctttgtatttctttcactctcaaagtaacttcaccctacggataggcctattagcaagcaagctttccgacaggatgaaaatcatatcctctgctgcctagccgcgttggggttggtgttgccaggattttttcagcggcaacggggttcggtgagcgatgaagaggtcatcgccgaagcctgcgaacgtggctttacagagcgtttgattggacagtaagctccaagtccttttgcaatttctttttttgcctgcatgcaggcagttttaccttgctgttttttaccggccacccaagctgtgtcttttccagtgatcgaggtttgtcttgtcaaacgcagtttgagtaagctagcgtgtcttcatgcgatgcattcggaaatgaacaacatggatactagtccctatgcgccgtttttcgtggagagacggttcttcctgactttttctctttagtttcggcgggacta

SEQ ID NO: 1904 - DNA, 2800 bp, Toxoplasma gondii
  source 1..2800: mol_type = genomic DNA
ggagagaacgtttgcaagtctggacgacgcggacaagacaacatcccgcgagaaggaagcggagggagaagacacaggtgcagtgtcgctgcctggggggcgcatgtggcagcagcagacaaggagccaagccgctgtgtctcccgatctctcctgtcccctcccgcgaccgcgtctccgtgagcgccggacggcggggcctgattcggtggccaagtagacgccgtggcggggtgatcacggaggcggtcgagagtgacacttgcgcggtagcccaaatcttctatttggcggcgaatctcctcgactgtcacagtaggtgacgggaacgaagggtcgcacgacgctcgatattcaaccgtcgctgagtctaggatcagattgacggtgatcgacgtcacaccaggcagcttctgaacgtgtttttcgatgtgtctcgcgcaagacgcgcaggacatccctggaaaaagaaaaaaggtctcacagactcgttcgcatgcaaacgaccctcaatcacaccgctcgtcaagggaaacatgtgccacagtttcatctcggtcggggcagaggaatcggttgaacacgtttagtggtgaatcctaaagtattgagctggcggttcgattcaaaatccacggcacactgctttagctggagagacggacgccgatgtgagctgcgtggaccgcgtaccccgggacggggaagcacgcagaaagcgacgcccattcctcgtcagttcacacgaacacgatcggacgggaagcccgaacggagctaaacatgctctcgagaagctgcagctgacctagccgccttcaagaacggacctacagacgcatttacagcagcacattcatgctggcgtgtgcgcacctacacacatttatttttttctagatgtaaaggcttcgtgtctcagctgcgaatgaaaaataactggagggcatgcagacgcggcatcgaggagcaaaccgcggtgaagtcgaaccagctagcaaggatggagtcactttgcctctgatcctcggagtgcagcggcacctccattcagctttgtgctcccttgttactgaagacgattcggacaggaacgactggtcacgatcagcaggagtacctgagctgagttgaaaacgtctggtgacaggtttgtctcaccttcgacctggagttcggcatagtggagctgcgccgtggaacgcgcttcttggcctccgtacgtggcatctgcgccgcgctgcactggcatggccgtctcgtccgctgcggcgcaagacgagggagaggccgaaacatccgccgacgtcgcagacgacgaagagttgttggttggggcagcttcgttcacgagcgacacgtctagtccgagactttcgatcacggcggcaatctgcgcttgcgttacgataccgcgctgaaagggaagagacaaaaaggaagggaaacggcgagtgacaccagaaagaacatgcgagaagcaacgaatacgcgtcatacgagacatcgagaagaaaggcacggggagagacacacgcaaataagaggcatcaaccggaaacaaaaaagagagacaacacacccagtgtgccacggttttcagagaccgtaccacttgctcgtggttgccagggcgtctaggcaggaatgcatgttgggagtggcaaatcgaagagacaaagcgcgtccacagcaccttacagatgcgttcgcatacacgtatacatattgatttatttctacagctgtctttaccctgctgcacatcgttgcacggtaatgatacgccggtgtctgtgcgactgtccctacgaatataaatatgcagagccgaagtttctttcgggtgctgggacatttgacgttcagctttcaatgccttactgcagcagagggtcttcgacagcaggcacccgaagtggaaactttgacgcgtcccgcccgaacatcgacatcaacggcgagaatctcggacgtgaaggtttgtttcactttgctttcgatattcctggcgcaattcccgcaccgcattcctcctactctgaattcccatacgttgaagggaggagactggggactagatgcggcggggaaagggacacacgcagaagtcgagggttctcctgtcgggggctcatccatttttatttgttccggagaacgaggtacggggacaagctgaaactaccgagactgcggcatgaaaatcggtttcttgaagcttcggagtgcggaattttctggagtgagatgaaattcatgggggaggacaagcagttgacgacaagagtctctacttggaaactttgctagacaggaacagcaggcaactcaacttcgcgcacacagcgacgcgaagttgagcttcagtagcgcgcggagacgggatgtaggcgtccaaccccaacacaagggggttttagatgcaccgtgttcagttcgcacgtaggcgtttcatccatcaccgcgtgtctgaattgccaaaaactggtgactctggaaggtgtcttgtctaactgagttcctcttgtcttacacccttcctgcgggtgatccgaccccagcagttgtgcccccctccttcaccgctgtcgtgtagggaggccgatagagtttcagggcgcacaaagaaagcgacgtgccaaatgaaggtctaggtgccacacatattgtgacactcgacgttttcaatctcgtgttgaggctccgcgcaactggaagggttaattgcataagagctcgcttcagatcttgggcttgggcatggcgaaaagcaaatgagcaagcaggccgcggccta

SEQ ID NO: 1905 - DNA, 1502 bp, Toxoplasma gondii
  source 1..1502: mol_type = genomic DNA
aaaattcaggaaggcacagcagcgcttctgcatgcacaggtgaaacatgcggaagagacgagcgagagcaagcaggcagtccccacctgcagtatgtagacagcgcatggagcgatgatttgctattgtgatttgttcgctttttcggtgtgccgacactggcgtgagagaggcatctcgttcaccaagaaggacaggcactgcgtgaggcctcgagagaaaaatctttttccgcgcggaggaacagaacgagtctgtatctcgtgacaggcaggagtcctagggaagcataggagacagaagcaatgctgcaggcagcacagtttaactctggagaaacgagcacaaaggaaatcctttttaaatagatatccagggagagatgccaagtgccttctccgtacgtcgtcgctccctgcgtactctaaagtcgacgaatggctctagacagtagagactcagctttccctgttttccaaacttcacactaggcagcgctgcggtgcttgtcgttgaggaatcgacgaatgcttgttactgttgttctacttgcctcctgtcgctcgtctttgcgtggaagcgcgtccacgaatatagcgctagaaaacagccgacagttcgtcagaaacagagagaaagagctcgacagagtccgcaacgagaaggggaggtcgctgcaactcgacagttcctgttgcccatctccctctctccgtgtcgattctcgttgtctatcacaagaaacgagggaagcctttgcgcagcaaggttacgctcattagacgcgttgacatcctaggtgttgaatcgtatctgcgggacgttcagaaatccgcagagttgccccagagacacaatcgatccgtctgcggagacagcaaaggcccccttacaggaggcactctgatgagagcccagggtcgctgtgttggtggttttcatggcttttaattggcacacagcgaacaactctttcgggaacagcagactgcgacgctccctcgaacgcgccttcgaggtgagagaaaacatgacacacctctttctccaagtcaccatgaacgctctgaaaaacactcaacgccattgacatatatacacaatatatatgtatacacatatatctatgtatatatatatatatatatatatatatatatggtgtggggttctgcggctttgtttggttgtgcatgcagcggatatttgtgttcatgatatgtttgtgaaactgctgcacagggcgcgtaggtggagggcgttagtctccgccgtatagagcccgatggtcttggggataattcactcccgctgtgaggaacatgcgtcagatgaagagtgcgaagcaccgaggagcggcctcaaacctctcctctaaggagaagctttctcttcaagatagacggcgaagctggtcatcagaaccgcgtatggctttttattatgcgtttttttcaagacccacaaaaacagaaaggaagcgccagtcacaagccagccaa

SEQ ID NO: 1906 - DNA, 2546 bp, Toxoplasma gondii
  source 1..2546: mol_type = genomic DNA
cttcctctttctcctcgtgctctcctgcattccttctcttctttctcgcggctttccgactgagagactcacgggatcgccgcggcttgtccgccgagaggcctcggccgcgagaaaggagttgctgtgaagcgcctcgggtcgaaggtgccggcgaagctgcgatggccgaatggagaggagacgccgccgagactccagagcagggagatgcgaggaacgagaccaagacgcatgcagcgcagaaactcgagcagccgcgtctctcgaggtcgactggaagacggagggaaaaggatagagaggaggaaacaagacggaaacagacgcaaaagaacaggaagcacaaagagaaggcgaagaacgagaacgaggggaacgaggagacgagggggaagaagaacgagacgacaaagaagaaccaggtggaaacgaggaagatgaagagggggagggagaggaagacgaagaagatggaagaccgggaactccagaagctgccggagaaaacgcgagagaaaccggtggagaaaccagtggagagagagacgaatcagaaaactgaagcgacaacgaggcagagaaatccgacagcggtgaaagccttgttgacccagaggacagaaaagaaggaaactggagtgagaaatgtttgccctgaacgaccgcagagacaggaaacgcgacgcgtagcgaggcgctgcatatttcgcgaggttcgacaggacgaggaacggacggggaaagcaaaggccagacaggagacacgagcagcgaggagagagaaagaactcgaagaagaaccgacagagaggaaatcattgtccagagagccgaagtttgcgctcggatgaagctctgtggaacagcgtttttcgaggccttcgagggagaggcaacgcctcgaagaggcgagggagacagaagagaacgagaaagacaacggaggacagagaggacaaagaggcggaattgaaaagagcgctctactcagcgcagaagcacaacgcgaagaaagcagggtacgagaagtcgagtctttttgcctgacagagagacttcggcgaacgcgaggggcagcggagcaaagggtgcgtcgagagaaagcggacgttcacttccgaagaagacgaacaagacttggcgaagcagaaaagaagaaggagaaagaggcctccgttccactctcagaaagcgcccggctgccgcatcgaacaagacaccgaaacctgaatttgaggcaacatgcgctgcaccgcttcgattgtctgcatgcgcgtcgacgacgtccagacctggttgagtctgcgttttccttgcctccggggacgaaagaacaaagatggaacattcttggaggagagatatgagaaactgctttttcggaagacttctctcttgcacagaggttccctctccctcgtaatttttcggaggttggagacagtctctgtctgcttcctcgccagcttcgtcagcgacgcatgcgcgacgtccagagactttctgtctcctgaattgggggggctcatatccccctttgctcgctttgcattccatttgctctcggctctcgtttctccttgggtctcaaacctcctattcgctgcggccttcttgacctgcctcggttctcaagttgctctcctctgttcgttctccctgagcaaagacggctcttttttttctccgcggtctttgcagaacctgccgctgcaccaagacctttcgaaacgccttgcaggctctctgtctgcgtttcgatattcaagagtctgcatggcctgtcggacctgcctctctgtgctctgtagacacacacagccggactgctatgtctctctaatgcgtttctactgcatatatatatgtacgttatatacatatacatataaatataaatatatatatatatatatatgtacaacgtacatctatatatgcatatatatatatatatttatatatacagagatatagatgccaacgtgtagttgtgaatgttcatttctgttttctctgtttcttaaagacaggaggtccggacatgttgcagatttgctgtggttaccacgagagcgccgatccgttgcctccgctgcagttggaaatgaaggagactttttctttgtcgactgaggctcctgaagatagagaatttctcggcaaatttcgaaagatcctctggagcaccgctgtcacggcgccgccgcgaacagcgcaggcagctgtgcatgcgcgcgcggatggcccatctgcgaagcaaggcgaactctacagagaagagagcaggtctcaggccatgagtgcaaacaagaggagagtgtgatctgcgacggccgctgcaagagcctgctgaagccgtttcttcttctccacctgcgccttctcggtgacagacccaaccgctctgctccagaggcagagaacaaccttcgtctctcactcccgacgagacgctcatacgcgaaccgcggcgagactgagcaccggaagcagaaggaagaagaagaacaggaaggaaaaggaaggagaagcaaggaaga

SEQ ID NO: 1907 - DNA, 1915 bp, Toxoplasma gondii
  source 1..1915: mol_type = genomic DNA
agaagatgcacttcattccgtctcgcctcttgtctccttgcaccttcctcgccgctctctgggtggctgcgtcggctcggacccgctgcatgttccctctgtctctgccgctcctcgagcatcagtcgctcgcgtcgtctctgccggcgaatctcctctctccgcttctcggcctcctcctccaacgcggcatcagtcccggcgcccagctgagaggctgcagcctgggcagccgccgccgcgtcttcgcgcatgcgcccccagaatcgcgcaactccctcgagcgcgttgcccccgagctcgcgggcacgcgcccgcagatcttcggaggagagatcggcgccgaacgaccctgtcgcgagaccaaatcctgcacctgaagctcctcctgcctctgaggtgtaaacgcgtttcgcttctgcatcagcgcctcgggtagcctctgcagcagaggcgaggccagggcgcctcgcggcgcggctgcggccctcggcgcccgaccgagtgtcgaggtcgaataatccgtgccgaggatctccaggtgagagagaggcggcgccagggccgcgtctgtggagatcggcttgcgaggtgccaggcgaattgctctgcaggcgacgacgagacgagcacgcagagtcggaaaccggagggcgagactcccctgtgtcacggaccgcttcctcaaacgttttatccagttgggaggagaccgaacgcgcggcctccagcgccgacttgaacagagaatgcatttcggtaggccggggcgcgccgcaacaagctggggaaccaggtgtatgtacactctgaggcccagagtggcgttcgcggcgcgcgcgcgtccaaaaaatcgcagggttccctgagcacgaaaacgtcggtggtgagaaagggcactggaggcgattatttcctcggcatcgaggaagaagaggccgagggtgcacggacggggggggagggaacagtcagcaaacgcggaacgacgaccactcgctcctcagaaggcacgaaaccgtggttcaggacggaaggccgggaaggcgggcagagcggacagaggcgtctcaagcctcgtcgggagagggaaaagccgcagataaacctggaatcggagagaagaaagcgcggacgaaaggacgagaaatgaacaagacaacgggacagtatccggggctggaaaaagggatggagggcgacctgtgctgaacttggagctcccagggaaacgatgaggcgcacggtttccaaagtggaacgctcggaaaaaaagaaaagccgggaacttcactaaagaacaaagagagttcagcccttctctctcgcgtattcaggacagccgtcaaccgggcacagacgcaagaggcgggttcaagaaaccgacgtctcacatcgaaactgaggtgcagtgtaaaataaaagcagcagttcgttctacaactagaagagaaagcgcttccgataaaggacagcgccgtggcaaggaataccctaaccgcgctagcagaacaatgaaggaaaagccgcgcgccgatttgcgcgcgacgttgcagagcaatctctcagttcacggtgtttcccgttggaccacatgcggagtcggaaaaaaccgaagcgcatgcgcttccctccagaagattctgacggtgagtgccaggaactgcgagagtagagaccccaatcttccagttgagatctgtttaaaagtgagtgcgcacactccgccaaacaaagcaacgtggtttcagtttctcccccctgcggaacgacgcatgcgacctcgtggtcacttgccgtgagcctagtgaccgcaacgtctgcacgctaaaccgttaaccctgaactgtcacaccaatggacactgtcaaaatctctgctggccattagacacatcgatacatcttctgtgata

SEQ ID NO: 1908 - DNA, 4013 bp, Toxoplasma gondii
  source 1..4013: mol_type = genomic DNA
ttgaaacagtattggtatcctgaacatccgccgctaatgacgcgaaccagaagccccagccgtggtgctccaccactgctacgcgtgctacctttggctgcgcttgaaacctccacagtctgctgctgtgctgtctccgactgaggtatggtggcgtctccgctgcctcgtccccctctgtctgctcgttgctgacattgccgtgtaggagacacatgtgcgtcaaaaatggcgtttttcgccttcgcatgctgaggggtggatcctccatcttgctgccctggaacccccaccacactcgccgcccgattagcacctgaatatacaccatgtgaaactggagagtcacactctatagcacccattctacctgccgcactgccggtttgagaggcagcggcgtctgccagcgcttccgtttctcttcgtttagcccaaatctcggtaagtcgcttgaccgccgctggagacatgtggataacggcatcgccatctcctttcagcatcaggcggcctgtctgtccgccccccgaagccttgaaagcctcctccctaggtgacctgaaagagaaaagcgatcctgcgtcatgcgcgaaaaaccgacaagatgaggttctcgcggagacatcatcgcacttgtccgtcaacactgctctcggtagttttctttgaggaagaacaccggtgaaacccgactgctgcctaccctgagaatgcaccactgcggaagcggcaaacgccgaagacgaacgagtagagaaaagggagcaaggaaaacgaggaaaggaacacggttcaccgtagcagataaggggggatgtggaaggagatgaaagggaaaccgacttagtttttggtaagaaaaaaaaccagccgtgagggtgtcctctccgccttaaaataacatgggcggccatgatggaactagcgtggcaaggtacagggtagcgcgtggagatacgaacacatgccgctacaacacaggaaaactagactgcatcattgcggttaagccatttgtcagaaaacgccgacgcgctgcaccggaggcaccagtccaacgaggctacagctggaaaggagaaaaatgcgcctttctcctgcgattcacggacccgatgcgatggtatcgtgcgaaagaatacgaaagaaaccagaaaaatcatcgagaaacggacatgatacccactgtgaaacaaggctttgctaaagtaaaccggccgcggcaccagtagagggggatgcgtaccttggtatatctagataaatgaacaccgaatcaccgcctcaaaactcccatcgtccgtatttagcggcatactgacagcaaatgcaactgcgtcgtagaacgacagggaacaactatttcctgtgaggagccttccccctcaaagaactggaaaaaccgacggaggggaacgcgcgctcgcttctcccgaacagagtcacattcgaaaaatgcatcgaggaaacccgataaggctgggtgaaagaaacgcacgccaaaggggagcgtcctctggaaaacgaactacatttatcgaccgcggatcgcggacaaaaagtaacatttcatgttctcagcgacggatgtacatgttgtagaccggcgcatatttgcgagcattgatgtcgcgccagagctgagccacatagtaaaccggaaagaaaaggattataaacgctggcaaaacaagagactcaaaagcttcttcttccacagagaacacataagtgtggcgctgctctgttccatcccagctacatcaagcgacctgcttctgggcgccctcagccccataggacccacattcgttcccctggcgcaatactggtttcgctcgaaaccgtaggcagcagatgggtaactgtcaaacaagattaactacaaagtagcccgaagtccacgtgatggacagcaacgccgaagttgtcgcaacgatgggcgtggtcagcgtacggtggccatctttgcggtattccaaggacggatgtcgctccttcgaaacgcagaagcagtcttctatacaagagcgagagctaaaaaggcaagcgttgattcagaaactgagaatcctgtgaaacattgtacttgttctgtaacttcttcaacatttcttccatcgtataatcccgccttgcactcggcttgtgtgtcccgccgtacaagtttccaggtgaccaacggcgccgcagcggtacccttggctggtgacgctctgatatttgcggacgcacttttttctacctatttacctcgtgcaaagccaagctacactcgatctgagccgaatctttctgaaaagtgaggtccctttgacctttatcttgcagaggaagatatcggacacgacacctagatcggtgaaacgcacacgaaatgcggtgtcgatatacatctgaaaaaacactgggaacagattgagacgatatgccggcgaataaaagaaagcaggattctacatctacctcgaagtacggaattgtatctaagaggatgatcccgttcaagtatggacgacctcgtgtctgcttgcctcgatattcacgtcgcatattctaagtgcgtttggggtggcttctgcgcgaagacacatgcacgtgattattacattttacacgatagtggtaattattccgtagaaaaaaaagactgaaaccactagaaatatcagcagtttttaatgaagttttgtggctaaacgcacctcgatcaaatggaaaccgaccccccggtaacctcatggggggtgtttcacctaaacacctgagtaccaccagtggtcctcctgcgcagactcgacaaagagctaatctcaaggatctatttctgaacagatatcaaaattctttttctgtacagggaaatgtgttcaaagacatacacaaactttacaaatttcttggtggaagcatgaagttgtggtagccggagggtctgtataggtgtcacacacccccttcggtgtgtgtggtggttcttactacctcgaatagttttcggctggactgccttgtgtctctgcatacgccgacttccacgactgcgcttcgaatacgatgcggccgaggacacaggcagcggtagttgtctgctctgttgttgcgttgccaagtcacgccggcgactccgaggcgcttacgtattcgattctcagggttgcgggcgccaagagagcgagagattcgcacgcgtgcagagcggcaagaagggggggttccaactcccgtgcaatgggtttgtcgtctagtctcgtttccgaaaacaataaacttccagccttttcggtggtccttgggaggcggaactggaatttccagtgctcttggttgtacgcgacatatcctcatacacggatttgcgtacacattatgggtagatgaaccctgcgtggtggttcctctacagtttttctcgctttcatctctgggtgtgtttgtatgcctcccatcttcactccttttttcgagccgatctttttgttcattctacatatctgagattatgggtttttgtctcgtgtcacgctcaaaaacgtcatttttctcccgggaacgttgccggacaagagggcgggaggaagagaccagccagcgggtgaagctgcctatctcgcaaaactccaccttttctgtttggccttttcttttctaaggcagcttaccatcttgcatgtttgtcaccctgtgctctacggtccttccctcctcacgcacgcagttgtttgcctcccgtactttcgttgtttttcgtccacccaccagagttccgacagttgttctttgccactttgatcgaatccaaacccggcgccgctaaacagttgcttttgtcggtctctcacatcttctccttttcttccgtgagcgtccttgcttccgtgtcttttgagactctgtgacgcaccttcctttgtctaccgcactctcaagtgtcatcgtgcggcccgtcgtctcgaaggtgtatgtacagctgacgctctggtgcagtgcgcatgattgaaacgcgaaaa

SEQ ID NO: 1909 - DNA, 3040 bp, Toxoplasma gondii
  source 1..3040: mol_type = genomic DNA
cgcggtctccttccaaatgttagtctgtacggaatacttaggtctatctatttatattaacgataatggatttggtaatggtctatttatacttactggtatacatttcagtcatgttattgtcggtgctatcttgggaaaaacattttaagtcagagtatgggagttttaataggggaatctataggagagcctgtgactcaaatgactttttttttcattccactgcttatgctgtaggaggtcttcccctccttcaggcgccggtgcgacgaccagtcgctcgacccattgaaggtgcctgtgtttattcattctgggttgtattagtgtgaacatgcagtatcactgagtttaacagtatgctcctgaatgtaaacaaaggactcctgaatggttgtcgatccagtagctatccgcacacctgtgggcactgtggcacacacacagctttctctgctgcttaaacggacaattttcgtcactattccatttttcagggtcactgcatgagactgtcacaacattttgctaggtttacacacaaccgttgcaccacttcacgaagtccttccgtaaatgacccctctctgcgttgaagcgtttgcaggcagaactgcagcatgcggaagtagttgtgtgtacgagcacaatggtgagactcgcctggacgctaaacaagaaacgtgcttgtggaagcgtctctattttgaaagggttgcttttggtcagttgcttctcgtccatgtgctccgcgtatgttcatgcgggcttttgagtcctagagtgttttctaatagtgactcgttagcgccaagagttcggaaaccgcactgcaatcgcacccacgagctcgtttgaatcttttggcttgacagccggatcttgcagcggagatggttgttctttttctctatatggcttgtgtggtgtctgacttccatttgcagcagcttccactcttccaaattctcgataattcagttggtcaaaaagatctcgtcgcaccaccaatcgccttacgctgctcatcactggccggatgccacaataaggtactagcggggaagtcccagatgtgccaggttgtgttgcttctgcatgatacagattacagatcggaagttaatcttgcaacctggtgttcagatgagctaacattaaacattatcgagcagttgggctaaataagggaagtccttactagccactggtgagttctgactctgtggaattctcattttccgcagatggaagatacgagggacaccctttcctgacgaggtgaaagagcctcgagtgtctggttccgtgcgagcgaatccgagaacttgccaagggaggagggactcacttttcttctattccgcctgttcgatggaatggaaaagttcggcgcttcatttaacgatcgcgaaacgagccgcaggcacagttctgacaacgtcaccgtggagctacgttacccgatgcgtgctgttcgcctctgttgacaggaaacctgagtcacgaaatggtgactgggggacggcctggcggtttttctgacgttatgcttggtcacgatggcctcgctgttattgagagcttccaaactgtccagacggtcccaaacaccgacagacagaaagcgttttgttcggcgtgcaagcttggcgacctcgattcagtcaggcacatgctcgaggaaggagacgtcaacgttaatgtatgcatatcatccgaggctaattttgttttcgggcaggttactgcctctgtccttcactttccttcactcgacgttgctccagagcgtatcgaactgcttgcgtgaagccgaaatcagtcgtacttttttcggccgcaacagaacggaggaagagttgttctcggtcgtcgaatagctgatcgcttcatatttgcacagtgtggaaattcatggtccaagtcgtcagaaagcacatcttgcgatgcaggagactgggtatcgcgaaggtgtgttgatgaacaacggggctacgtcagttgggggagcattattgaaactctgaagtcaagaccatgcaagcagttaacagtttgtgtattcttgggctaaataacaaactggtttattttaatcgaccgcctacactattagctcctacgcatcttgtgtattcctcgtgccttgactgccttctgtcctgccctcggggatattgcctctgcaatgcagttatcctggcttggcttcccgtcggccttagcacttctcttacacttgtcgacttttcgttttctctctacacagttgcgagatgagtgggacgcattccctttgtactacgcctgctacggaggtcatttggatgttgtgcgactgctcatcaactacggtgctcggtgccaccctgggacatttgacggagaaaggtaagcttccgtattctaattgtttctacccaatcataaggtagagtgcatgaacgtcgtgcttttcaaacacaccggcaaatggatctacgtaaggcagatcgtgtagcaccgtcatcatttctgtgcttccacatacacaataatcggatatttctgaggcatcacttttgacacgtttcacctctcactatcattcgatatcttttgcttcgctgtctttttggttaacccggaaaatcgtgtctagtttgtgtgtttgtgcacctgaaactgctgtaaaactgtcgagtactcttcctgaaaagagagaacagtctccgtccagtttgcaattcccggcctaaagtgctcattaaagcttgtgagaaaccgataggaggcacctgttgtgcgcaacacagaaatgggacgctacgtccagacgttttgtgtgcaagtctcgttattgccacttcccgccaaatcagttgacagcatttcttcggtacctcctcgctgccatccaaagttctcttattctgcttttgtgttggtcgaggcctggtctgggttgcccatcctccttcatgtgttccctcgttcaccatctccgtccattctaattgcttttttgttcctctgtactatggttccaggtgta

SEQ ID NO: 1910 - DNA, 1974 bp, Toxoplasma gondii
  source 1..1974: mol_type = genomic DNA
aacattcttttcattgttccacaacttctttgaacgtcaaagcgacacgacacccctttttcgctcattatcatcaggcggtctcaacgtgggcatctcatatctcgagcgtctgaccctctcacgaggagactccctgctgatatgtctctgggtcacttgaaacaacgcggcctacttgttttttgtggcgggaacagagggggcgcgaataactggattcacagatcttcagtcaggaagagttcacgatccttcgtcagccttctgcgcagacacttcgttgctgccgccatgtctcccctcagccctcgtcacctctctgtctctccccgcctctcctccgtctggattccctgtctcttcggctgcgtctccggtgagtcctcggctttgtgttccctctatgccgcttcttgttgccttgtcggacgcgctgtatcttctttcgaatgtgcctcctctcgcttctgtcgctttttaacggacccctttcagcaatgcagcttcccagcaaacatggatggccgtagagtgttgaaagccgaagcgtttagctgtggacccgctacctgcgaagagagagagcagccgagggtgagaggactacagcctgcggcctcgcgagcgagatggctgggaatctcgctgtaatgagacgaacgcgttttacgcacttaacatggcgcaagggaggaggcgagcctgggagcgggggaaaaacacggggtcgagagacggaaacgaagataaccagttccttcaaaagggaaagaaacttttaagagtttggaggaacaacgccgtggcgtgtggccgcggaaagagaaaagtgtagacccgtgtcctgtttgctacttacacattgcgcgagcctccagtcgggacagcagaaaaaaggaaggcgcccgcaaagcgaaagcggagaaatgcgcagattgctgcttgtcaactgcacagaagagaggaaaataacccagagtgctcgacgagaaactagaagggatgggagtccacttcgaagtgcgagtacggaccaccgtgccgacgcagccgagctcactggctacgcatcgatgtttggaattctcgaaagggccgcatttcctcgtcaatacaccctcaaacaaatcctctctgggtctccgctgctcctttttcggggctcgtcccctctcttgtgtgcgtggcttggctggttgatagagaggccagcggacaggtcgacacaggtcatcgctggttgaccgaatataagctgcctggcaggcgcgcaaagacctagggtgttccaagcaggtcatacgagatgaaaaggcgaactgataatggttgcatgcagcagacagcgagctgacatgcgtttccttgtcttcaaaaagaggcgaagaagagagcagccccctcgagctggaaagccagttcttttcaggccgagcgtgtatctcagttccttggctaagaagtgaaaagcaagcaacgaagccgcgagacgggtccgagagagacttgaccgagagaccagcttgtgtgcgaaatcaggcgcggtgagtcgcgccgcgaaggagagcgagcaggggaacggggacgaggatgcacacaccacgacgcctacagagagagacagaggcttcaggagaaagagggcaaaggacgcagccagctgaaggagcacgaggcgaagagacggcagaagaaaggcgtcagcgcgctccaggagacaccgaccaccaaagtaccggcaacaacggaagatgggggacggaaaggaggtccactacaggaagggagcagatcatgaaaagagagacaactcaaaagaaatacaactcaaaaaacctcgtacaacaccgagttttcaccgagataaagatgcaactatcgttgccttctgacttgcgatcgtcgttcgctccctcctgctctgcctcttcgtcttcgtttctcgtttgccttccctgctcctctgcacca

SEQ ID NO: 1911 - DNA, 2392 bp, Toxoplasma gondii
  source 1..2392: mol_type = genomic DNA
ttccgtcgacttctcttcactccatcgaggcaaatgaaacacatgcgtctccctgcctctccggaagcggcgctgctggactcctgtgacagaggcgtctctgtctcgtccactggcgccgtcacatctgccattctaccccaacacttgacaagacgcgaatcaagtcggagaagaagaggaagcagagaaagaagagacagagctcggaatggacatgcacacgaaggctcctcgcactggatatggaaccagtgcgcccaggtaacgacacccgtatgactacataaaagtacatatagagatgtataggtataaatatatatatatatatataaatatatgtacgtatgcgcttggatcatgtacaagtggcggtgggactagtcatacagggaaagacccttcgtctaccgtgaggtgaaggagcagaaacaactagagagggttgtgcggtccatgaccgcgagtcgaagagaaaggagcacagcccgcgtcgcgcgtggcaactggagaaaaaaggaaggcgacatatcaaggcggaaacgaacgcaaacgcaacggccaacctgaaatgtacgagggaacacctttaggtcaccctgtcacttccagaagcagcattcgcgttcccggggtacatcgaactcaacctgctgtcttcaccgaccgtattcccaagcagttgaccgaacaaatggcttttcattgatcccgaagaagcagactgagaacgccgcccgccggctagttccacaagaagcgaagccgccaggatctgggatttacagcgttccctctttctcctcaacctgagtttcgcgacgaacgcagccacaaagctgtcaggagtgccacacacatgcgcaggacatgccagacaccagcaaacaagaaaaactgcctaaagaaagcagcagtttattagaaaagagactgaagcgcggctgaaagcagcccggttcccgatggggcgactcatctcaaagtcgccacatcgacgaggtaactctgcgatcaatagtctaacgaaagacataaagtgtgaagtgcagcaaaggggacgcaaccatggtgacagcttcagagttgtgagctaacaaaaagatggaaaagtgcaatctgcttcaagagaacgctcgatcctttgctacagcgtttccagtgctggaaacagagctccgaatgcatgcacgttcactacccatccaaccggccttccgaagaaaaccgcgctggaggtttcggagaaaatcgaggacgggtgtcttgattttactggcttctgttggagggtttaggtttgttttcaaactcagcaaactcgtttttcctttcgttttttacgtgtgacacgtcaagactcttctgtgccagtcgtctgctaccactgtagcgtctggggtattcgctggaggttcgtgccacacagagtatgcgcttttctgtgcgcaggttgccggtggaacgctcataacgaaggaactgttctgggttgtcgcctcaaaagtggattcttgcctgcctggactgttctgccgcgtgaaagtaggtttttagcggctacccaccgtacgtctgttcctgcgcgccaaagatgtctgctgcggcacccgaccgagtgcgttgcctgcacttgctgataaagcacaacgaatcaagaaacccggtctctcgccggacgaaccaaccggtgacgaagtcgaaggaccaggcttgggacgaactatccgtcctgaagtccagcgttcgccaggaaaactttgcgcagcttgcgaatcagtacagcgactgcggttcctttcagaaaggcggggatctcgggtttttcacccgaggaatgatgcagaaaccttttgaagacgcttccttcgcgcttcaagttggggaaatcagcgatattattgataccgactccgggttgcatctcatctacagaattgcgtagattgtgtggcgtctcggaaatcgctgtttcgaattggctctactagggggtgaccacgtggtgccagagtggaactacggtagaaattgctgttgcgaatctgtgtattccgtattggtgagctggatagttgcgttgtaaagttcacttcgcaaccgcagcgtatcctcgcttagcaaaacgggcagcagaggaggcgttgacgttgcagtttcgttgacccgcgagagggtagctcgttgcattggggagaaccaggcggtacccatcgaggatagagttcgtttgttcgatacaggcgttccgacggcattgaggggactgagacccctccggttttctaccgtaaacagcttgcacatccagggtcgcttgcgtttttcctcatgcacctgaagcgcggcacacaggccattactctattgttttttcattttttcacaa

SEQ ID NO: 1912 - DNA, 2289 bp, Toxoplasma gondii
  source 1..2289: mol_type = genomic DNA
agaaaagcacaacctcacgaaggacggtctcgggtgaattcacttggaagctccacgcagcgttcgtttgtgcgtcgtcgacaggtccggggagtctcacggacggaaaaagttttcgatgtcagcagagagagcgctgcaagaggtgctcgagattctgccgttttctcgccgacggactcgctagagagagagacagagagacgtccgagtgaccctgcgtctcaggtcgcgctctgggaggcttgcagcggatggacccctagagcgaggagggaccggagcggtctcacttgcacttggcgcttgcggctgacttttacgttttctttgtctgctgtccgcagagatactccacgcgtcggccggcgaccttcgttgcttccttcgcccagtgacgcagcgaggagacgcgcccagcacacaccctgtctcgactggagaagcggagacgcggcagtccccgtaaatcaccagttctccacttcgccgcgaccccttcgaggagccttctctgcaagacgcctctttccgtgaaggagcatggaagactgtgcaagatcgcgcgcgttttcagccagagaagccaatttccttctgtaacgcgtcacgcgggtgcaccctcgcagacggcaagagtttcctcagtccgagaacggcgacttgcacaactcgaggcctcgtgaagcgcggattccacagacgcagagccggacggccgtggagcctttgcgtgggcgtcgcagttcggtcctcagggcagaacggggggagcgagtggattttccacgagacgagaagtcaggctttgcagttggggagagtttctcggctttccaaacgaacggggaaacggtcgcgcagaacgcgtattgcggccgtgcagagagtcgaaatcgacgcgttgagtccagtcttggacggcgtcacggaaaaaaaggagggaagagaaagcagaagagcgaccgcgagaagaaaaggaggagagtgaagaggagaggagacaggagggcaatcttcagttcacattgcggaggaaacgcatttgtttccgccggcgtttctcgaagagcaaagtcacagacgctggcatccccgcttgcggacgatgcccgcccccagagaaagagtgccagacgactggcgaacagccacggcgttctctcggactctgcgttcagagacgtcagctgacgcgcctttctttctcttttttccactgttcttttcttcggatccgaggcacgaggtatctatcccctggctgtccagtccaagaaagcgacagacgaccttggacggcccgggcgcttcttcgcctctcctctccggacacactgtaaaggtccatcgctttctcgtggcaaatggcaggttcccctcgtttctgagaagcgaacgcgggatctcttgacgcaaaccaggtctccagttctctgcggttgtcgaaaacgtccctccctccctccggagaaacgcgcgtccgacttcgcgcggctctcactcacaccccagcgcgagggcgggcgaggcgggcagacatgccgggtggagggtctggatttttcttttcgacaaatctctggcaagactggatagtctttcttttctgctgccgctctcgttctttcgttcgagaagggatcttctgtcgaaacgaagactcgactggcgagacttgtgcccctcccgctgttcccgacaagtgaggcagccacacatcgtgcggatctcgccgcaagagtctgccaagaatagatttgcgttttcgtagtcttttggacgaagaaaggaaaaccttttcgcgtttctgctggcgagaggtcgaggagaagaaaagcttcggtctgtccaagagcgcctcttttctctctgcacacccgccgttccgtcctctcattcctgtcctctcgcgtcgtgtgtcttgttcacttcgtggctgtcttctctcttgtctggtgtttgacgtattttaattcgttatctcgggtgttcagaactcccgtttggacctcgtgctcggtttttgtaggcagtctcctcgattccttcgcccagttccctcgtttccttctcctcgctcaaccttcccccttgtttcttctcgtcctcgtcacttctcctctctcctttcgtctcttccgctttcacccttcgtctcagttgcttcggactcgtcgtccgcctgtcccagcagctcttcttctccctttcctctttctctccgcgtgtctcctgtctcttcacgaattctccgctcgcgtctccgccctgccttcgtcgtcgcga

SEQ ID NO: 1913 - DNA, 3752 bp, Toxoplasma gondii
  source 1..3752: mol_type = genomic DNA
tacgtcatcccagaaatgcggatcgttcctacgtcctcagagtaggcgggtgcatgcagagagggagaggtcggcgcagcgccggcacaaggcatgcctacgactttgcgtctagtgatcctcccgcgtgctctgtgggaagttgtctcttcttggtagcttcgttctgtgtctcgcggaacgtcggatagagatggaatcatatgacatcggtttttacgagattcctacaggccatcgagttcgccacgaatgacgtacaaacccaactgagcaccctacgtctgattctaaccaactcatcgtcactgcgaggtgtctcgagtccgcgagtgttcgtggcagttgccgaagactttccttgttggctgagaaagactgtgacgtatctattctgtctgcgtcttttccatttccggtatccttgtgcccagaagactggactcgctgttcaaaatcatgtccgaaatggctgcactgaatccggaccccgacgcagacgatggagacgacgatgaggacgacttcatcatcgaggctgacgggctgggagaaggaacgtccctgccggtaagttctggataaatgcgcagaactcaaagtgttggcgtcctaaatggcacacggcattatttaggttcccatcggttgtgcttgagacgcagcctatggcttccattcatcactcacaccaaacgcagcaagtatttcaaatagccagtcagtggcctcaggatgtagaaccatccggcgagccctcaaggaaggatttcactagtatcaaccgcgcgaaaattttttctgttccaaaacggtttccaggggctcagacagaaagtgcaggcaatcatccgtgcaaggatgtgttcttttacttgtacatgcatgcgtttgctgtgcaccaatagtgatatcggcggttcgaggtcagaagcatgagtgcttacgcaccaactaggcgcttatgaaacatatgcttgagcggatcagaccacaacggtgcaagggaagcgcgaacacagcggtcaggtcgcttgcgtgttgctgattgcgagtgtctatgggaccttgagaacctgtggaaacaataggagaagacttgtagtcaggtgcgagtataatcattattgacagagacaatcttccagtctcgatgtttgttggccgttcttcggaggcgaggaatcgtgaggaggccgccaatcgcttcaaggacacgttgtgtatcttctgacaccaaaaactgttcgtttgcatatggaaggtctctcattcgaaattgaggcactttccatgcggtcgtgcatgcagggaggctgggaaatcgtcgaggacggtcagactggaaacggcgcgggtgaggacggaaacgccggcgaaccggaggatgcgcggatgatgccgaacggacactaggcagcgttgaacaacgcatgtagacgcaggctgaacacttgactagaaacaccgttctgtctcgatggaaccccctttctgtgacacgccgtatcttgaacacgagcgcggcttccactcagtgcacactccccggctaaatgccatgaaacagcttgaagaaactttcgcatgtgttcatggagccacgcgagtcggcgtgatcgaacttgtggatcctggagtatgggtggacctgattttcgcgagacactctgtgcctcttttcgaaactagagtgcgcgcaagtgggtcctcgaaagtgcaccaggacccctcgaaacagtttggggccgggaccgaaaggactggcagcgaaaaagtacctaccattgtgaataactgcttaacagcgggtggattgcacaaatgccgcagcaagcgggtgccacagcaccggcgccgcggaggtttcacagcacctaaggtacgggacagctacgggcttccaggctgcttaggtccgctgaagatttgtgtcgcttctcaaaatcagcgacgcaaggacacagcttcgtgagagagtaaccgatccctaaagtccttcaaacatggagtcagcggggcctctcgttggactgtcacgtgatgacacagcatgtgaacgcactatcgtgaatcttggctctgcaatacgtatcgaatgccccttcggctacagacgttcgcacctctgccaagctcctcaatcaccaggtatcggagaaaagtgaggcacagtgcccgtagacaggcgaaacagtcggaagaggggaccaaggtagagctacgcgcgaaagagggcgacgagtggcgctgcaaatgcgggggactgaggcagaagtgttgaaaagagaacgaatcagacggtcaaactaaggacaggtagagacgacttgatggcattcagtaccgagacccccgaaacgccgacgaggagtcgatgccctcggcgacatgttgccagcactcagcaggtggctaccgaatgaaagtttatcgacgtgcacagccaagatgcgccttcacaccacggggtcaaaggatacataaaacacgtttcctcctaggtgaagacagacggattgtgcagtttcgagtgtgttcgactcccggtctcttgagcctaacggtgacgcagataacgtcgcctcgcgccggcgctcttgagtgcagccgtttcacgagcataacgtgtctcgagttttggcgggaagttcatctcgcgtcccgactgcggtgccttcactcatttgtcggtttcgaatagcagttcgtaacatccacatttgtagttcagattcccacaaggtgacagaccttggccgcccgcccatgccttggctcataggtaacgcgccgactgtcaggttccaccttgctgtaggcttcgctaacgaaaagagacgccatttaaggttaggttgtacgacaagcgtggtgatggtctgctacagcttcagttgggttgatctactgtggccgctgcattcaggcgggaacaattagaatcaaacagcgggcggttcgcaagtgtactgtcgcaacggccgggtcctccgccacatgtgtcgttgcagtgggtcttgctgccgttgtttgcagccatgtggtagtgaactacccccgcagtgtacatcgcagacacgcgaaaaactactttttcatgtgccagacatgttgcggaccccacaccaactcgttcccggcagccactgagccttgtgagctagcgacgcgtcgcgtgtctcagggtaccggagaacaagctaggggtttctgatggtaccgtaaccgccccatgagcgccgggtacggtcggcagagtctttcccacctgttcaaaggtgaagaccatcttcaaattccccgccacggacaagctacagtacgagcggcagtcgtttgtctccgacatcctttgttcaggcttcaatcgaatttgtttataagctgcagttcctgcagacttgctgacgtttgcctcgagttcatttcagacaccggatgcgaagcactctcgtctctgtatagtgaacattcgcgtgaacgtcgttctttcagagacgtgttagcgctcacttgccttggatgttagacttacccagaacgccttctccaagggaagtctcttctgcattcgcgaacagtgacgaccgggctcctgcagcgaggactctttcggtcacgaggttcacagggcgtcaacggaagcactttgttgcctccgctcagcacgaagtgggccagggcgattcggccgcgtgctgttcgttcacttctctggtctgctgcagtttgtgaatggcatatcgtga

SEQ ID NO: 1914 - DNA, 1904 bp, Toxoplasma gondii
  source 1..1904: mol_type = genomic DNA
tatccggaaatttgcttcaagctcgtgttctcctgagaacttcgtcattctggcgtctgcgaccacataacttgagcgaactcgcaattcagaaaatacacgaaaaagccgcgtgatgcattttcgcgtgttttcaagacggctaacgggcacgatcactgcgtgagtaagctttttgtggatatagaatatgcgtttgtgcactttgggtcagttgttgttctggtcgatcactattacgttgctcaaaaactggtgggcttaacggagagccaccaccatagcagaaaagacacaattagtctgccctttcgccgagctaccgaaaggaaagagtctcaacaattggctcgcaggagggaacctgcttgatacgcggggaacagggaactacagaccgagcattaagatgcaagtcaagttttcggcacagtggagtggttctttttgtggatacgcatgcctcacgactaccaaaattaatgcctggaagagaaccgaagctacagagaaaagtccatccactatgttgccttcttttacatgggccacacggatagagtgcagcagtgcagcatcaggcggctgtttgctattccctctggtagcgtgcatgctgccgagagaccaccgtctctgggagcgctgaaaatgtctacatcgcttctaaattaagcatacaactagggggaatgtgtcagaaagcacagaattttgagtggtgagaggccatgcacattcacagtgtcgaaactgggagcctgaagcgtcgaaacctgtttacaaatactatacttaaatggctgagtacttcagttctacagtgtatcatttttttcaagcagtacttgcaagtttctatccgcaggcttaatgtgcgcatcaatgatgtgacacttccgtgtttaagtggaatacgagttgcatgaagatggcgattttttctgttaaccccaggcgacacttccgagcgcgacggtggcatcatcagagtccgatccgcatatagtatgttggcgtttctcctagagtacaacccatcgggcagtcagcctaccatcccgatctattgtatacggtcaaaagatcccagaaagaagcacacgcaatcggctcatcggcatccacagccctcaaaatgtgccctctgcctctcttatcggtatgacggtgtagttccagaatcgctccacagtagagccaccacaaaagtggtgagacgataccagctcaaacttctctattcgtcgccaaatagaatgaccctgccatctctcatgccaaaacgaacttgtgaacctcttacagcggccaggcaaatattgcagaggctgccactggaggcgaattcggagtcacccgaagaagaacgacgtgacgcacctggaggctgtggtaacacctcttcacacggtgtgacgtttataacggtgcttgatcaactggaaagctaattacaagctacggaagatattcttttttcaccgtcacccgtgtgcaagcggttctccacaaaggaccacgcaaagccaccctgtttacaacgacttccgcgccattgccaccgtgtactaataactggtgcatgcatgctcatgctgacataccacttggacggtatcatgaaaaactatctgcaagagtgaaatgcattaatcccccgtcaagttgcgagcacaacgacagctgttttttggaggaaaattaacactggttggcagtcgaagagagagacttcctggcgtagtccatgtcttgtattcctgcgtcaatgcgttttccctgcatgttgtctccgtgagttgagttccgtctcgtcagaaatgctaatattcctgcgcgcaaaagaacaagtttttctattgtcggtgacgtctcctgtgtctatgatggattattgttta

SEQ ID NO: 1915 - DNA, 2043 bp, Toxoplasma gondii
  source 1..2043: mol_type = genomic DNA
tgccaccctacgcagaatgcctccctgcaagacagctcgggttcttaacgtcatacgcaattatttgggtgggggttgaaatagactaaacgaggcatttcttcacagataacaatgcaggcggagtgtgggcttccccaacagctgtcatgctcttgtgtgctgtctgattgtttctgtcactcatcagagaacgacaccgttttgaggcgaaactgccataactttgtttgatcattcatatgtcatatgaacatactgtgttgtcgccaatcacatttccctcttggcttcgacaaactgttaacagaatctgattaatgattgaggggctgtgtcgaggcacgcgaaactaaccatgacgaccatcaaaagtctcctcacacaaagacatgcttagataaacatacagtgacagcccgacattcttcactgttcgactcatggtgtcagctttccagcgtgtttcctgtgcttcctcttgtgcacagaaataaatgagctcttcccacttccttgagtgtctgtctgaaaatgacagttttatttgcgcatatatcgctttcgctgatagtaagtgtccgcttacctctgccgtctgctcctcagctactgctctttctgtctgcaactgtgccgtctccacctgagagggagcttccacttcctttacggctgctgccactccgtctaactgtatatccgcggtggcctggtgtaccttcctctgtcagaaactcatgataagacaacctgtgaggtgccaggtccgttaaatacttacctcagcttcagcatcttgtgtacgaaatttaggtagcgccgactgacgaaatacatttcctcgcgttacgtgactcggtctgtgcagctatcacccgacgcacctgtatctgttgcacttctctcttcacaaaatcctgtgtcgaatctttggaataagtgccgtgttgattcactggcaaaacaaacctcaccagctcggcctctacgcttttgcttagtttgtgcgccttttcaatcgcgacttccttggtcttcagcagttgctcgtctaactgggcggctttttgctcggatttcgtatgagcttcgcacagagcagctagttccttttcgagggcttggacttcctgtacacacctggcttcgatagcgtaggcagatgcattcacatttgaaagcgtaccgcctcggcaacctcggcatcctttttggccttagcctccacagctttggaaaccagtcgctctgcctgctgttgtgtcacaagcttcgctattgcattcttgatgcgtacagtgttcgcggaatctcttgtctcgaccaggtttttgagagtttttgctaaagtagcgagatgtcagaacgcattccctggtcatgcgcaaacacgtccccaccgagttctttttcagcttccgcctagatgcagcgcaactgatggagagaatgccttccgcagacagaagattgtctcacttgagttttggaagcatccgatgcaacagcacagcagcctgctccatctgcggcgtttgtgaccggcttagcttcctcaagtggcacaggagggacgtagtcggtcctgccagtctctgccccttggcctgctacgaagagtaaccagaaggacaaaacacctaggaaatcaatcaaaaatatggtggtcttcattataacaaaatttctgtccacgtttgacggcgttttggaggctgacttttacagttgcctgcgcgcgcgcagaacgcatcggtgtctgccagagtagtgtacatgcgcagtgtagcgacacaacacggttgtgcgttgctttcagtaccgttctacgtatttgatatggggacttaccactattttatttctaatcgttttggattcgtgcgattctgtttctgttccgttgacaacctcgtttatgcttctagctatatcctcaagtcttgtcgcagttagctgtaccatgtcttgtctccaccagcgagaaatgggatggtaactgctcgaaatatgcattgaagaagatcgattcttcagaga

SEQ ID NO: 1916 - DNA, 1760 bp, Toxoplasma gondii
  source 1..1760: mol_type = genomic DNA
ccgagggtcgaccggacagggaatgcggtcggctgtagaaatttctcggcattcgcctgcctctcgacaggaaaattggctcatgcatggaagatccttcttgtcctttctcgtacctgtctcagtaaacaaagacgcatctgagccttcccctggcacccctgcacccactctgctcccagcgggagcagtgctctccacccgtgacactcctccatgttctcggccctccgttggcctgttgcttgataatgaagacgaagagagagatatggaagaagggacattcggaaaagatctggattgcgctccagacgaagagcttgcctctgaaagcatcggattcgaccaatggattctgctctcctctttactggtcggaacgcttctcctggggtctcctgcctccatcgcggcgccgtgttctaaaaagcctggcatggaagaagacggtaggtgaacaaaatgcgacaaacctctgttttaggaggcaattgactcgcagaccgccttcagcacgaccagtctatacgaaggaatctcgaaaacagaagtgggattacgggttacaacacaagtggaacgacggtttacgaatagtgcctgaaacgtcgatgcagtaacagcttaccttatccaggtttccaattgaaacatgaatgtgacacctatgagaagcgagaatgcgtgaataaaaagttacggagaacagagaggaaatcctttttttaagtccaccacacacgccaccgcgcaacgccgtgcgaatacgacatttctgacctcaaccgattctctgaatgggagggaatgatacgcagtgagtgagtccagtcgcctaaaggaaccttccaggacgagaaacgaacgagaggaaaaccagaggaatcggacacaccttgtttatccttgaactttttggttaaggcagtccccgtggggcagacttgccgcatgggaggcaataaacagcgataaacttaacagagatgtggatcaagagccagagcgtttgcgaggacgaaatcaattgtggtcttctttgggcagttaacctcaaagggtcgtcaacattttctggcggattttcgcaagcatgcatctttgtcttgcgcatgcgcatgcgcgggctggaaccatggggccgagtgcgatggaagcaccagcattacaacatacgaaagtgcgtcgcttttgcgttcgaatgccatccctttcttcctatcggaaagcagcattctctacccgtctgtcgttcctctttgtcgaccctttcagctttggcgcgcgctgccatcagtcggtcctttccgcatcatcaagagagaccagccaagctcctgtggcagttttcctttaccttgttctgtggacgtcacctttttcccttcccgtaagaaaagaaaaacactcagtcgaggagacccggcatcgtccagacatggataccgggttgagcttcgcgacttcgctggtgtctactcccctcgtcagacgcgtactgcctccccgtccccatcgtcacctccggttcctgccatccttttgctcagcgaggcgcttcttcccttctttggcggtcttcgctcgcgtgttacatgagcattctcctgcgtcaccgtccctctctctcttgacacctgtgtccacccctcttcagttttctcctgcattctttcctcctgaattttctcctgcgtcctcttctcttcagttttctcgtgcgctctgttccggccgtgcctttcgctcagctacca

SEQ ID NO: 1917 - DNA, 4719 bp, Toxoplasma gondii
  source 1..4719: mol_type = genomic DNA
gcaacgtgtatggtgcctgtatacatgcacatatcgtagcataacatgtttacacttaccttgacgtggccgttttcatctctgtacttccacaatttctgcgttcgcgagggcacttgggagaatagcttttttaagtctctcaacctggggaaacgctcattcgcctgggacgaggggccgtccagaggctcttcgtcgctgcccaccgaacggcccagcgttcggttacctctctgcggagaagattcattgccctcgtgtcgggaggaataaatgcggcgtcgactccgaacccagctgtccgacgactcatccgagctgtcgaggcgactggatatggcgatgggctgcagaagtttatccatttttgtggaactgactgagacacagaagctggtctcaggcgaggggcatcaataaaagacaggacgagaaacgtgcgagcagcgggactaatgcagacgacgaacaaggagatggcagaaaaggagagattggataattagaattcgaaatgacgtagatagagcgataaaaacacggcgagtgctttccagctccaacaggcaaaacgaggccatttgtggcaggaatgacagacgaggaacgatgacgttccatcggaggcaagaaaaaacatggattttcaggccttcagcggaacgccatgtacatgacggagcccgtaggcgcagatgtggtacatggagggaaaactcgcccccggaaaagtacagttgcctgtacactgtggcccgaaagaaaggaaaacgaggtgagtttttgaaactaagatgaaggaattagtcctgaagcaaggaatgagattaatatttactgggttctacagccacttcctcattcgtatttggcaaggaagcccgcaagtcaccagtgtatgtacaccggaacgatgtaaatctttcctaggcgtcggcatactggtgagcggtaagccttctttcaccgctcccggagtggggcactacgaggaaaagcggctacatagaaactgaactctgtgctcatgcaaactctgattcgaggtgcttttctcgaaaaaaacggatttacttgtccgcaccgcaaccagcaagctggacattcggcggctgaacgaatgtcaagtcttcaaacgacagagctgcaccggatggaatgcagcatggctatggaacaatatcgcgccttcatgcaacttgacttttacaagacagaaaggcacaatgaagacagtttgtcggggctggaggttcacccacgagcaagaaatgagacgcaagaagacgaaaagggccgcggccagacactaccgaatttagctcgcattcgttgcaggtgctcaccagcaaacatatgatgccacttaactcggcgcttaacggtacacactgctcatttaaaaggaggagagtgaacaagacaaagggaatcaccgcggcaccggtggaagaaaaaaactagacgacgcagaagccggttgctacggcagtgagacattcacgtctcgcgatcaaagagactgcggcaagacacagacttgggagagcgagttctaccaaatcgcggacttttcgtgagtatgggtttccttagacaccacggagcgcatcgggtttacaaggagagtcaacagtcaatgccgttctgcgttccttcccatcctatggccccctcccctgctgccccgcgaaaccgcttgctcgtctgtcacccacgtgcaggagaagtcgactgaacagtttcccacagttttgtccaagaaaacaattttcgtctggcttcccgcttcgtaatttaaggaaaagttgagaaaggaactagaaaaattagcctgtgcgttgcttgtcatctggtctgcaacgttgttacttttggtggcacgcaaacaatgccatgctgcagacaacaccgcgcgcgtgacgcggagcggttgcgtctgctttttgcatttaaccttagggcaggcaacacacgcagaggcttttgagttcaacactgccatctaggcattgaccatggctgtaatacgcccgagattcgaatctatgtggctaatcgaggagacgaaagtgaactgcttgtcttgtgcttgtcggaggccgccagtccgttgtcgagctttgttggtcgattgtgtgaccggaagggatgatatcgcacaaaaaacggatcactggtacaaagctcttgatctaaatcactaggaatggcgacgcggatttattgcagtggagctgtgggtcaacggatgggttctcccttttgttggaatgcctgaagtcgcgttcctctcgtcagagcagcgcacaagcctatgtataaggattttcacaacgaattgtttccaacggacttattggctgggaggtccctgggaagaagcgaagccagataacaccgtcggtttctgtggcaatgtcccttaagttctcgtgtctgacattacagctattgaggagataattcggtgcatcccacgcgagactgtgattgtacttttttgaggactgccgcgccaaagaggacgcaaactaccgcaccaagttgcagtacacttacattagtccatatgaccagacctagagacacgcgatgcgcgaagcctctaaaatgcctctagagtgcaataattaaacatcctcagttaacgtagctgaatggtgacttgtcgaaaaacatcagtcaccggtcaccgtgcgacgaatgtgtaacggaatcaaaaccatcggacacggtttaacaggctagaagtgcaggcaaccagctaaccattgttgtggaagggcattcacaaacggcgggcaacaaacaagaaggataacgaatctcttcttgttgtacgcttcggacaacaagagacactgctgggttcctggccgagagtaacagtttgtgctggctgctcccttcagccttatgtgaaggtctaggatgtgtctcgcctgcgagtggcttcatttcttcttcgtttctacctgcgttctttgaatggttttgccgcgggggcagagtatcccgtgcaagtcagtctaatagttctgtgtgctcgaaccgttcctcgagttccccgattcggggcatggcggcgcggcgctgtcgaggggtaaaaacgtgtctggcgctagcgcgtaccacagcattaagtggattttatctattgtttcagtttcacctaacgtttgtttcggaattgtgcacgcccaggttgttaggaggctgtttctggatggctcactcagagcaccacttcggccccgggtacgtgaccggttccgaactgggcgcactcccgtttttcaacagtcagctcattcctggtccagcagtgccccgcattccggttctttcctgttttgctaagaacatcagcactgccctttagagagcttccgcccaggaaatgacagcctgtgtgacaccggcaaaaaccaagcctgtgagccccagccccggcagctgaaccactgtgcaggttgaagcagtttggacttgattctgggacaacacaaagtctaaaatctctcccaggtcgatcgatgaaaaacacaatgattctcctttgagtctcttattgggtgctcctgctcttttgcctttcttcgtgtctccttttttatgagggagctagaaggagcccttgagtcgcgcaatgagcggactggctacgcggatgcgccttagcgggagcggccgcagcgcatcgaataagtaaggcattgtgctgaaggagactcgcggcttttggtctggagaaaacggacaaaagctcaaactcacgaaaaggatcccagtcggcgcaaaaaagccccgcgctctcttcccatcgatggctgacgctcaacgcgggatctttatctgcgagtaaacagccccccggcccattgcatcggtgcgcattgcgtgcacgcagttctcgcctcctcgcggtcaaaacaaaaaaagggtttcgcattctttcatttcccggccttctgcacctctgctccatccgcttcgagcataaaaggatttcttcgcgcgttttccgcggaaaccacggcagaaaccgacaaccggcagcgcccactagcgatccgaggattcggaaccagttcgtggcgacctgcacatttcccacgagtgccttcgccgagatctttgttttcgccgcctttgagtttgtgagaaaacacgactctgggccatcattcttctgaggaatcgtggagagggcgctgctgccgcgaacaggtcttttcctgcgacaagctcggccgctggttcgtgtcgagaacgtttgtggattcgaggacagctctgtcgagcatctgttccctcttgtttgtctagcaaaactcagcttcgtttgagtgtttctcgccgaggtctttgtgcacaacactcccgggtcctccctcgtgcgcgagcgtcgagatctcgtctggctgaagttccaaggtccacttcagtctcacttcgcaggcatttcgttctccgtctttttcctctcgagaatctcacacgcagtgtgacttctcccgtgatctcgttaggttcaccgagccagtgcgacaaagacgttcaccgtgcgctatctcagagtgggaacctgctttcgcagcccttttttttcacttccttgtggagactgcgagttgaaaacgagcggcgtttgctgccctggagttctttcaccagtaccttttcctccgcctccacaacacgtcttcgaga

SEQ ID NO: 1918 - DNA, 4683 bp, Toxoplasma gondii
  source 1..4683: mol_type = genomic DNA
ccaacagtcacgctggaagcctgtgcccatgacctcaatgactcgagggtcttccctgcgaaaagcaaaagagaaacaggtgaatcgaacatgcatgcagtctgttctgacacagagaacctcttatctgcttccaacagattgcggtgacaaggcagatgcgcaggtctcgggttctacgtcttaaaagaagctgctgcatgccttcccctgctcacgagaacctacaaacgaagaatggtttctacgcacttagagttgggcctccttcaccgcgcctgatagcctcattctcctctctgagagcaaagggcgtcaactttccactgcagtctcggtctctcattgtttcccgttctgtgatcctctcagcgcgtgggtttcgcggatcttttcgcttacttgacgaagtcccaggtgacagtggcgggctgactattttgtgtgatgagccaggtgccacctccgagtccccagagaatcagtccggcgcccgtcgcgaacagtccgacgctggctattgtgttgaagacggtggaacttttcttgggtccggggtcttggctcgcgcgcttcgcctctgcctttgtagcctcatctgaactcatcgtcccggaacgcaggtctgaactggcgccgcgggcgggcatcggatacagaatggaggcgttgtcgtgggcggcgtcttcttcgggtgtctgcgcctcgaagggcaacgcaggattcccagccgcgccggtcttcgagtgcttcagttcgctggtctcgggcgaattcacttgtgcgggggacccctcggcctttccgacgaagctgccgtcgacaccacccgctgctgtgccgtctgacgggttgctcgctttgccctcagaacttgaggcgccggtggaggacggcgaccgcgaggctttcgttggagtcgacggcgcggtcagcggctgggacgagctcagctgccggcgttgaaccagcaagtgccgcaggcgctgaacttgctcttcgcggcgggctgcggaacgaacacctgcagacgacggcggcgcgccgccgtagaaaagcaaagatgcacgcagcctggagagtgcatggacctcgcctagtccctcggaaaacctcgaaaatcgctcgacagaactcgcgactggcagagtcagagccgcggcgcagtccagctgtgccgcgcgcaacactgcggcggctgcagaagcgggcaggagcccccctcgaggcaggaccggcggcattttcgagcgaacacggaaaaggaaatgaggcgaaatatctaggaaagaggagaaacaagtggataaaacgaccgggaaaaaggtaagccccgagaaggttctgccggcacacgcgtggacgcacgcgcgaaaaggtcacgtaaagcgcgtgtgtgaggtgtcgatacacttgaagggcaactgggttcagtatccgtttggacttttttttcaggaccgtccaaaacgcagactgcgagaatcgaccagcttgagagtgtgtttccttctttgcggctcaaaagacaactggtcacaacagaccatttccctcgcgaactcgtgcgcgtctactcgcgaaaaactcgcagtccagatcgcgaaaatcgctcgcgtgccggaacctagatgggagtggcctcgggtgttctgactgttgtttgcgttttcccacgagtcgctgcgtttcgcaagatgtctgggatgtgcacaaactgcacacgcacgagaaaactctctcacagagccaaaagccaaacacacgccgtcgattcaccacacacacgcagccccgtacccggaaagaccgcggacccagtcaaaaactctcaaaaacctgcgagagaaacgctcgcggcctctgcctctgttcgccaaaaccagcgtacaacggtcgaggatcggacactcagtttgatttgaaacaggggaagttccgaccctacaacggtacatgcactagtccaccagaacggggcctttgtttttgtagcccacggcagcttggaatctcgtgatttacatcaacactgccaaaaagggaactaattcttctcaatgaacgcccgtcagcgacgacgaagtgcacacaccacaggcttctccgctgcatgtttcatctggacagcgacagtctcggaagccactctcccaagcttcgaagcgcgtgtcaagggttttctgctagtcagcctctctgcaagcgcacaggcgcgtcgctttcttttgggtaccacacggcaaaaagcagcgttttgaagtcgaggttcgagagaggaaaccgactcattttatggtgcagttgggagttacagggaaaaaatatctagtagtcggggctacaagggaaaacatcggactctcatcgggaagtctaggcaagcatgctattttgcaattgggattctagaaacgcacatcacttcgcgaggatggttccagagaaacacgccgtaacgcaattgtgatctcattagaaacacactgtatttcaggtgcgactccagcggaacactattacgttctcttgaaaatgcgcccctctgagaggacagacaccttctttgttcgcggatgagggtcggtcggcagcttccttgaaagaacgaaatcgctgattccgaattccctttttcgagatacaaactagctcctcgacagaaggctgtgttgttggcatgaccattcacagaacgctgttagaagggaaaatacaatccaagttcccctcagacggggcaagagagcggtgctcttttgttttctgtagcgacatcgcgcatttcagtgttcagctaaaaacgtttggagctacgtgcacacccagtgtccagaagagggataagatgacggttctgacgggaggaaaaagactggagtgtgtggccgcaccaaagacagttgacatctgtacagaactcatatccattgtggtagtctcctgatgctttctacagaatagacgagcccttgttggtttgtttcgcctggtctagttaggcgctctaagttactgttccccctctggaacaggtcagtgagatggtcttcatctgtcacatgaaactgtgtggaggctgggagcaactcctgatgcactgttgtcatttcgtccgcttcttcagacgagacagcacctccttttcgcttctgtcgtaaaccgaatctccaccagacatccgaacagctctcaactttcccgttgtccatcaaccagtacgcgcatgatgtttccaccctatgtgtcttcccacctcgcttgttgtcgctgagtgtacaccatttcagcgaacacgaaatgagggccaatgagggcaaacggacggtgctaggtcgcgcaccggcaaaagagtataggactcccacgacgcgattgcaagcgcagacttcccacccttatttctctttttctagttttcgaaggtaaaccttgtttccgtctttccggtgcttctactctgctctacagcgcggtccactccacgaaagtcagtttcgacttgcacgaacaacgagaattttctgccctcagagtccccagtgttcttttgtggaactcatcctttcgcttctagagaatgtgttgctttccctcgatcatttttttcggtatgctcaccgcgcgtcagggctgtctgttgaaaaccgaaagaaatcgacaccgttcctacaggctgaaaaacggagagagataaggcacttttcatccaacgaaagacaagaaaatagcagcagcaaatggaattcaaacgttgcgtagttactccgacaggtttccacgaaaaaacacaagtacagtcaatgctactgggtgccggtcggctcatatgccagaatatgcacataccgagatatgtgtatgcacaaaactgtcgaaataagaagatcttcgaaaaaagggaaataacagatgcatgcacagaactctcaaagtaaagagagatattcagaaagaggggaaatgagtatagtaaacagggaactccccagagagacaggagaggcgagagagttgttgtctcgaaagccgctctctgcaacgagcacacgccgcgaatttttttgcatgcggtggagagactttgcatctgaagacgacgtaaaaaaagtaaattggcttcgcctttcttctttttcactagttcatgtttttgttttcctgaggcaccctttttctcattttctctgtttgacgccccgcttcctagcgctcaggccccgctcgttttcaagtccgttgtgtctccgaaacgcactgtcgcatctgcaggcatttttcttctgcattcttctgtttcttctctcgctttttgtctgtgtggcttcttttttgctgagtttccttgtgtctgcaaccgcagcttcttccgtacttgtgcggcagcggaggactgtccggtctccttcgctctgctgtcgcctgcatctcttacgtccggtgcactggattttttctctttcttcagctctgaaacagcgatcgtgcacttgctcgattggggagagtggggttgacggaaagagcccgcctagaaaaagtgaggtgtatgtacactcgggcctcaccaaccgtgaaagcgcgcggagtcgcgcggtgtacatacaccgcacataagcaacggggcaggagtctccgctcgactgtctcgtttttttcacttgttctcggctcgggacaata

SEQ ID NO: 1919 - DNA, 4152 bp, Toxoplasma gondii
  source 1..4152: mol_type = genomic DNA
catcaggtggagtgctggaaaggagacgtctacgaatttcgagaaggcggagaacccgatttttcacacagcgttttcgtctgtcgcgtgtacacggtaggctactaagtacttcctctgctcgatgtacttttcggtgggtgtcaccggcagtcacagccatctaactgcagaactcgaacagtcgtgagtgaatatgtacggcaatgttattcagagtgcgacggttctgcaagaaatcgaaaaatatctgtgttcttttcaggacacagccactaccaaggaggcgtacaacgggtgcttgctagtacatgtttgtgctcgctcatccttgagccaaagaacgagtttgtcggatcttcggcaggcagcagctcgtatgacgaagtgcctgctcaaagttcgcgaaactcttcgaccgtgcgtgaagctgaaaaggcgccactctctaagcataggcgaatcaagtcttgccaagtcacctggagtcttccccattccgggagacggccgtagaatgtaaagcgactcaagtatgttaggagcacccaggggtcttcggatgccttgagctcgcgcgtttacttccgtgccttggcatgagcttgatgttattttcggccgtttcaccacaacgagcgttgtcgttgtcgggcgcgggtgcacgcatcgtccctctagtgctgcaaccaatttcgctgagtgttgttaaaaccgctgccacgtgggaacactgggtagaaaggtctgaatcgcgattcacctgtacagagacattatctacttttgatgttgccaacttagttgttatcattttcaagaggtgattccgtggagttgggtggagacgcgaccgtgctcagtctttgtcaggtgctgaagacagcagaactcccaacgcagaagcatggaccactaacacgcctaagatacaaggaggtgaccaaccacataaacgatcgccgttccctcagaagcgcgcgttagctcaacttgtgtaactttagacggcggctatctggtggtttcatgcagtagagccgaggccgtacgatataacatcgtgctgataagcgtgacgaagcttccaggaagccccatagtatcgtgcaacgcggtggaacaccggttgtctctatgctcgaaaccagcggtgctggtatatttgtttcgcttggcacttgaaaagcgctttgcaagcctggttcacgttttctgagagcagagtgcacgtaacgccccacgaaagtgcgtgcagatcgaaatggtggagcgtctacgtaacgacaggtattggagcaagtttgatcggttctacactacgaagtttcctaaaaatacttttgttaatatacccgacaaatggtcgttatcattgttgcacgacttatgggagcgattgacgccaggccgcgcaaccgacttatgcccatgcaacactcactccacccaaacgcagaaattacatttgacagcccatgtcatagttcagcttattgtatcatcgaccacactcaaaaatgctctagcttgaaaggcagaggaaagtaattagcgcaccacaagctggaagaagatgtaatgtttggctgttcagtgttttgctggcaacttaccgtgccgatgaacgatgataacggcagcaagaaatactttttctgtgatgcgcttttcctggatcaacagttggcgtcactccattttgagtgctgcaaactagaatgattcttgtacctccttcgatggatgcttcgagagcggatagtcagcagcatgcttcccctccggtcttgtaactatgggacccgctgctcttcagagccgtctgtctctctgccatacgcgggcactctgtgtgctgcatttgtgtacccaaggaccggggcccgtaagcctgaaaactaactctcgtcaacgaagccgaaatcaaggagttgtatctatgcagtgttctgtgtgttccgtctgtctcacagcgcaactgctcgcgggtggcacgcaagaacgggcaaaagatgaaaggcggtaaggacatgatgcagtctccgtgccagtagtcacaacgtacttgcagttcctttttaatatggtaatagtgcctgtaaggttgaaactacaagtagcggctactgatgagctagactgccaagatctgaaagaacttttcggacttcaaccccatgttaatatagcgcttcgcatggttactttgtgatgttgcttcagaaaaaacaatttccctgagtatttaatggccacaaccacggcaaccgattcggttgaaacatcgttgacgaccgtcaaccgtctaatttttcagaacgcctttacttctgtcagatccccacatagtgctcatttcagcatttcgccacggatgtcatattattccgttcttgttttgtggcaacacaggcagcatcgctacattctgcgctgtgtgttcccatgaggtcagatggttgctacacagccgacgtgatgtacagccaccaattctggccgttagacccatcttcctccaacagccacaacggccatcagcgactagttcggtttcgagcgagtggactgacttgtcatcgatgactatccctcacgtttgcctactggtgggccacgtgccacctctgccgaagagtacctgccgtcaactttcttgctgctaaagtacgctctatggcgtgttaacaaatctgaactcccgaaatagtgagacgaaggggatattccgtggtaggcaaccgcatcccgccctctcctgaaatctaccgtatgctgcactgtcagtcgttctcgtgcagcagataaattgtcttcaggtgacaaacgggtcttcatctcatgttgcgcgagtgtttgtgacaacacggaatcaagatgaagcctcacagataacattgtgggtccagaaattttcccctgttgtcaggggctatgcgagacggttacatgatgagaatgctctgtccaagggagaattacgactcctgacatccgtcgtcttcgatggcattttcattgccgaacaagtcgactgcgaactaaagcaagctcatgtcggcgatacctagttttatggaaacctccgcgtagcagaagcgggaggatgtgacataactatgctggataatcctgaagaataaatgcacagattgttatgcagcatgcggctgtgggttcttgtgctacccgcagcgtcatacttttcgttcgagttgtgctgccacagaaaatagaggaaatcaatggcgttgatgttgaaccacataccgttccaagctaagttctttcagaaatgaacctcaaatctgacaagcttcaacggtcaatcataattacaggacgtcaaaattcacagccacaaaactgccttcatattaacaaaaatgttcgtctcgtacagaccaagcattccctggtaacaatgtgatcccgtacagcattttttatcaaacacgaaagatgtgcaaggatttaatgctttcttcagcgaaacaaacacatgccggtgaggaattttcgtgcgaagccaccggaatccgcactgggacccttcccagttctttgaatggggtcgctcgtgcgtgagctcctcagtgaagtccgacgagagagaatgactcccggcattagccaattttcctggccagacattagtacgatgaagaaaatctggatcggcaagtgcttatttctacgggagcagctggcgtccagcctttacggtggggctttgggaagtgctatcacacgtacttatcttcagtgatgcatggcgattttggtaagtgaatccgatggattagcttgctatagacacaagtaagtacttaactgtgtgcagagaactttttgagtggggttttattgctactggcgaaaccgagtgtttcgtgcactacgcaaccccgcgttcggcttcaggcatagctcgttgctggtcacaccaagactacgttgcctaatgcttggcaatgacgccgccgcaaatttttaaaaataacagcgcataatccacgatgcataccgtgagacaaaatggttgccctctgaattgttataatctatactgaaaggcactgttggcgccggattcagacaatgcatgggggtagacgtcaggctgaggaccgcgggcgcgaacggcca

SEQ ID NO: 1920 - DNA, 1832 bp, Toxoplasma gondii
  source 1..1832: mol_type = genomic DNA
agctcccgcatttctcgctgcagagatcttgtcagagagtgtttgcccttgagccaacccctgttccctcaaacttcgagtcgccgatgctcgtcccctcgacattcgttcaatatgtttttgcactgctgaggcaaagcggctcgtcccgctctgtggaggctggcgacccagagctggctgtatatcgttgatcgacggcgactcttccagtttcagttgcaccgcctctgttttcgattcttcagctccggtcgactgccagcagcatcggaccgatctgcttgccgtcacagtctggaagtggtacgcagcggtgtgggcgggagtcggcgaagacggcaaagcagctccatccaaaatagctactctatgagcggttgcacccagctgtcgggggactggaggacacaaagatgtggcacttgggcggctgtaaacggtgctgcaagtctgtttgtgaagttgtgaagggaacctcgggcaatcctgccgcttcagatcgacggggtatctcattgtccacgtagcgtgattttgagtttgcatgcccgtattttccaggggcggcgatggaaattgccgggatatcgtagaatcaaagtcgcgagaaacagccgcgcgagatgtgcctctaggtccggtacacgacacggccgtctggtcaggggccaccccagcaagagcatacacactctccccgaggccatgagatggaagggcgggatgtgacatcattgttgtcacatcctggaagacgcatatcgtcgcaatgaattggtcgccgtggaagaagacacgctgggaaaaactgctgactgaagcgtgagtgacctcactcagaaacgaggggactcctgttctgttgggtgctcggtcccttgccgcccatggaagtcctgaaaacggtaagcaaatgaagccactggtgggtgagagaagaacccggcgctcagaatttctggagggaaaaaaatcttgacctcgctccctgctgcggccaggagacactcgtgcactagctggccaggagtgggaacagaattgcgcagcttaaaagcaggccagctgcaccaagattcatcctgtagccgaaagacgggaccagaggacgaaggaaaccactcaacggggcttgcaaaaaatgtcgttgtccacttaagattgtcggcggcgacgtcgtccgcaagcttcaggtaagagatgatgagtctttgccgtgagcagaagtacgtgcactggcggaaactggaatgtgaaaacgtcaagttgctcatttccctccgatttctgaactttagatcaagagactgccactactcgccacgaattcatctcttcggaatcactggtcggtatcggacgaagtttcggtatctctgggcaactcgacggctagccacgtaaagggaggtctggagaaggtaatcataaacgtcggagtcgaaacaaccgatgagtaaagtgtgattagagggagcaactgactctggtgcgaaaaaagcagctcttctggacatggaaaagcgtgatcgatgcacgcgttcacctgcgtcgagtgtgccatcatcggaaccactgagtcgtctgcagctggacggggccgcgagcggttgaacctcccgacaagacaccgctaatacgaggggacacaggtctcagttctccactcgttggcattctccggacgaaactcgagataagtttggctgaattccaagaaggctaccaaacgtgccacacaggtcggtggcaacaaagcacacaataaggtggcgaaaagcccgaaaccgaatcccgacgatgggtgcgcccccacgtgcgcgacgcga

SEQ ID NO: 1921 - DNA, 1838 bp, Toxoplasma gondii
  source 1..1838: mol_type = genomic DNA
ctgctgtgacgcattttatccgggaagaaaagaatctctaaactggcacaaagatttaggttccccgaagggctacgaccgcacagagtgtggtgaacgccgtttcaactgagcacactagaggctggagaggactgtgttctcctaaaccagctcctgtcgtggttctcggcatcaaagtgacgacagtagaaaatatctttagtaaaacaaggggactgtcttcctctgctccgggcacacagacacagatagaccccagtgatcattgtgagcttactgcctactggactgctcagtttgagccaaggagttcaaacaggacgcaacagcaaaacttagaggttacggaaaaaacaagtgtcgcgctaggttttacaaagagtcggccccaaaagtctagaaaaagctcatatctaattagctaattggtgacgtaatagttgtaccaaggcgaagatcagtagctgccttgtgaggggaaacctgaataatattctaaataatttgaaagcagtttaagcatcaaaatatttggggaatagactccattagttaaaataatatttcctactaattataaaatgtaacaatttaaaacataaaaataaattatcgtccattaaaacgtttactagaattaattattgaagacatctcacgacacgagctgacaacagccacgcacctccggcagcatttgaatcaacagttctacatagattcaacctagtctggtgaggttcatagcgtcacatcgaagtaaatcacacgttcctccgctcgtacgagcaacgttaacttctgaagttcacccttgcgagtgtctcggggtgcattgccagttttgtcctctcttttgagcatgcagaagtcaggtgtcgttcttggctggcgacgaagatactgggcatccggacgcccggcagaaaaatgcaattcgaattgtcgagtctgtctggcttccacgagcgtgctgcctcatgcttgattcaaatcatcgcgggacctaatttagagagcatatggagggtaagctggaaactttttctgaggtcagcatctcgggtacgcagatgcgcataagggcatgtcgaaagtgcaaccagaacggtttttgatagacttttcacttaagcatattagcagtatctctggttgatgtacagcagacactgtttggggtccactacctagtcataagttgctgttccagatattgaagattgtgcgcgacatagaacttcacaactttgcagacacgtctgccgaacgccgtttcaattgagcacatgagaggctacacaacaatgggttttcctaaacaccagctcctgtcgcgttctcgtcatcaaattgacgacagcgggaaatatcgttggtaagaagcacgcggacagttttctctgcttggggcacacagacacagatagaccgcattgatctttgcggggttactgtctcgtggagtcctcagtttgggctgaagagttctttgtgtacagtttgtaccgcacacccggaagcagaccgtcttcttcgaggaccttatgcgttcgcattggcaaaactcaaaacagaacgcagaaagtttcgcttacattttagatggtcatattttccgtagccgccagtttttgatgggcctagctgttgtccatatttcccccagctagccagagacgcgtttcttccttgaactgggtattgtcttgcaagtgtgtttgtcgccaactaggcatgagctcgtaatttttgaactccaacggaaaccgttgggttttagggttgttagacaggcgaatgccgtgcctggggggaaaccagatacaacttga

SEQ ID NO: 1922 - DNA, 4401 bp, Toxoplasma gondii
  source 1..4401: mol_type = genomic DNA
ctcctcgtcgctctgctgtctccatggaggttctgaataagagaagccgacgcgagaggtccacgcgcggctggaagtagagcgcaagcgaggcctgcgcaggagcaagaaggaatcaacgggaggaaaggagagagagtcgagaaggcgagagcgcgagaaaagaaacgggaggaagggacgcggaaaacgaaggaaatccgtcagtcgctcgttcctgggggaaccgaagaagaggggagacacgaaacaataaaagccagcgaagacgaccggagaaaggcgaccccacagacggaaccggctctctgaagaccaaaacgaggaaagcctgctgaagtggtgtagccaacttgtattgagggtattgacaactttgctggtgcaagaagtctggagaagatatggcaaggaaaaacgttccttgttctcgcgtctcccttttcagtcttctcttctgggcttcagcaaccttctcgtcctgctctcccgttccgtctcttctctccctcgaataccgccttcctcgcgcgtctttcttctctcactgctctgtctctactctcgtctgttctgtctctgcagtctcactgctgcgctgcgcctttgcgaacgccctgcttctctccgacccaccgagaggcgagacgagcgccgagcctctgaggagcggaacgcaggaaacccggagaggaaaggggagatggacaggcagcagcggaacgagcagaatgtacatcggaagagggaaacgagaagacgacgtcgaagaggtcgagcaaggagtcaaggaaaggaacgtataaggagagagtggagcaagtcagaggcgacagaaaggacaaggaagacagaagaaggagacagagagaaacgggcgttgttttgacagctcgatgtccagcgtatatctcaggatcacagagggtgcgcgtcgttcggcgagaaacggtacatgttctctggagcaaatgtgcagcgagagaactaacgtcatttgcttggcaaaagtcgaagaaggacagacggcaacagaagaaaagtaggaaaggaaccatgagaaaagtgactccgggcaaccgaccccccgcccccacgattcctcggtggctagctctgggcatccagagctgctgcggatagaagaagtaggtgagaaggaaggtcagtttcggcgagacgaaaatctcgttctctctgcgtaaaagtcaaaaggcaaaggacaagggaagcacagaggagaaggcccaattccagtcggtaaacgagtcaggaaacgctcggaaaaaacgaggatcatcgagtcgcccggcgtccccatgcacatgcatctcacgggggggcaagggctaccacgggtggataggtttttgtagagttttctctcgtctctttcctgacaagaatgcttgttcaagaaaaagcctgctagacaaacgagccagtctttcaggatctacaatttactcatctagaaaaaaagtatggcgtcgccctccatgtatacgggaggagggaacgttggatgagttgactgcgtgtagagaaggaaaagagtagaaaaaactgtggagacggaagaatgtctctccccacgcgcctctttgctttagttagaagacgttggactgggtcaaaaaaacgtataaagaaaaatgtatctatatggagtcagaatatatctatatatatatatatatatatatatgtttgtatttgagatatacgcacatctatagggggataaatagaagtatagatacctctctatctctacacgactatcttataaagatttcgagacatgcttgcatctgtaggtggctacaggaaaattcttttttctgtgagagagttccgtccattttcaactgggtttcaccacgggtgcttttttgtctcggagtttctttcttttacggcggaaggagtatatcgaaggacggaagtcgtacacaaatctgcttgtgtgggcatgcgaacggcgcagaaggacagactccacgttacaagaagtgagagccggaaattcgctcctcatataaattgctcggaactcgaaaaccgcatcgttctgttggaatttcttctgttatgtgcgagactgaataaatctccagttatgaaacaggggaagcagttccacgtcatcgtataccgacgacgccatgaaatgagtagagcagctgaagatgtcgatcttcagtgctgtggaaatgtctcaggtattgtcaatcgcgttgtcggtttggaatcccggacaaccgcgtgagttgttcatttctctccttttcgtcttgcgatatttgtaaaacatctgtaccacgagaggaaggacgaatcagagaacttctctttaagaaatctcttgtgttccctgcttatgataggaaacggcagaaaccgtcgctgaagaaaaccacgctttgttcgaacgctttagaggccttctggaatttttagtctccgaaactgaagacacctccgattttcaagttagcttcaattccagagagaaaaccaagacagtcgacgcagtccaacttttccgtggctgccgacagttccgtttgtttactttcttatgctcttttagagagagacacaagtcaatgccttgttcggtgtcgaccgtgcgatgctgcaaagagagggacggtttggctttgtggggagagatctgctacagcacaccgttgtcttgcaagacagttgcagaaacgtgagtgaaacctgacggcgagattccgtccagtcgtgtgcccggccgagtttcttccgttttggggaagagcatgatgtttctgcaagctgtcttttctgccgtttttcgtcacattgacttgcgttctcctcctgtcgtcctggaactgaatctggagcgaatgtagacgctgttgcgcaaggaccgagattcctcctcttcacgctaacggagagtttcgctgagactggaggatcctcatggcgcgctgcgcctgcacagcatgtgtgtagaaccacttcgagtttctcgagaaacatggttgggttttccgtcgctcgtggaaatgtgtgaaccgcattcggggacgccttcctcggccgacctgcgtgctgcatttccgtgtgtttcctgtttctcgcactggcaagacagaatgaaattcgagcagaaaaatgcacacgcacgagacttcagaagttcccctttctcgtttcggagtgacgcgggagacagccacagcgagactgttcccttggggcgactacgactgagaagcggactcgctccgcgttcaacagcaggatttttattccagaaaagttcctgaaggctttctgtggaaatggaggtccagctagagaggcaccaccattgcaggctccgcagtctgcgttttcctgggaggaatccgcgaaacaagagtttgacgtaaacagacactcggaaaagaagcgagtcccgaaaggcagcgatctgaaggaagctcctcgacaactgcttcaccttcctgcgtttctgttccccacgaattcctctccctttcctcgccatttttttcgttcgctgaaaagcttcttaccttgccgctaccttcgacagcctcccagctgctgggctggaggatactccgaaaaagaacgttcgtccgttctgttttcgatcggcggctgttgccttcgcgttcgcttccggttcgtcgagcaatggaagtcttgaaaacacaggactcttcgctgcgtagggtcacccccgtcgggccgtctttgcggtgtgctgagaaaagcggtgaagacgcacagcgacagagcgagacacctcacttttcgtcgtcacacaccccagcagacggatcgtatgttctctttgcttctttttccattcttctttctcgttccctcgtctcctctctatccgcttcgtttctccggcgcgcgcgcttccgtcctcggcccggcggctttttgtctgcgcgctcccctggcgagttgcgaaagagactctctctcccggaccagccgactgtctctcaacgagaagaaaaggcctttctgcaagagcttctgtctcgcgttctgcgtcgcgacaagctgactacacacatgcgcatgcgccgttgtcggcctccttcacctcacttcgggagttttgagaaggcctttcctttcgtctggacgtctctgttcaagcgtcgattcgtgtcacctcgtcctctgtgactttctttcttctccttcgccttcctctccaaaaacccgcggcgtctgctcgtcctcccttccttttctgcttctgagcacggaaacgccggtccctgcccagcgagacgcagaaagagaaagggtgtgcagaagctcggcgaacagaacgcctttgtcctcgaatcaaacgttgccaccctttgaccaagagaatca

SEQ ID NO: 1923 - DNA, 2584 bp, Toxoplasma gondii
  source 1..2584: mol_type = genomic DNA
ttcttgccaaagacagcggctgcagtaaatgtgttttcgactaggagtggaactttagcttctagagctgtccagcctctttctttccgctgcgaattctggagcccgcaatctgttgtctgcaattacacatatctctcctccttgtttcgtctgagcaacgttagggcagggacaactatcctaacaccgaggtctgacgttaatttcgcggagaagcgaaagttttgtccctcgtgtgttccgagttcatcggcagattccggtgcatccttgagttctgaaggacacaacggtctcgatttcatttgcctcctctcttgtctgttcaggagtctcacttgcccgaattcctcaggttttcaactgaagttaattcagtgctcttaattgctcttcggccctttgatgcgcgttggaagcagagtgatgtccagccctcaaaaaacacggtactgaaaaggcttgcgtcatggttcgatcagattagcagggcaatgatcagcaagggataatcctggaagcctgttatttggtgatggaactttctccaaggccgctttgctcgctagaattgggcagagaaggtccttttcagaacaggccttttttgcctctttatttcgtaaggaccgcttttcctgctctgtcgcttcactcaagggcaccgtgtgtgtggagacgacacagcctctccacgctttctagtcagacaacacactgtgttcacaaacggttcttacccctcgcttcaccgcgttcgcaaaccccgcatggcaacttttctggctgcctaatgacatatttcggtttctcggcaattgctcgccaacccaggagtgtatttgttttcgtccataagtcaaagcaaaactctgcagcaagctcgctgaccagaaccaagccgcggtgtttcgtccgaacatatctcttgccacgggacatgctttacacgagatcctgactcttttgctcgggtgccgaccggcggttcgggagcggggtagctttctcctgtgttgatcggattgaaaagctgccatcttcgaggggttcaataaaggagaaaaagatgtctcagcatcgtcagtgcgcccacgagtgacctcaaattgagacggggttcgacggcgtctgttggcacagtcacccgccactcacaggaacaagatgccggtatacttccctcgttggagcctgaatgttgtttcgaacgacggtgaatcacgaaatgatgagtgaaaggcattcgatcctggtgtgtttcgatgaacagctctctctgacgtggcgagacgaaaaacctgcggctactagcaggcgactctacagactgaacaaacccagcgcaagtgacagttcctcgcgaattcctcaccgtttggttttatcacaacgttgccacctgtgtgtcgactcattccgttctcgttcctcaacacgattcactgctgaaaacttttcttcctcgcaacgtcctgacgactttttcgtggcgaacgtggaccccacaggcaatccattgtgttgcgacctgccctccggacggtttacgactgcagaatgtcaccctttccccggaaagcccgataggttcctgtgtaaaagaaagtggcaaggcgtgcggttttgaacgaggaaacagccaaactgcccgcgggtcccagcaggccggttgtgcccagagattcacccgaaaccttctttgcgcagttccgtgcgaaagtccgcctgcacagtccgtacatccgccgagtgtgtctggcgcgcgctcgcggcgccaaggcagaaaagggtgacgaaatggaagactgagcgctttttcctgtacggtgtggtggctttcttcctggccgtgtgttgtgcccttctttctctcctcgcttcccctgcacctgctgtgcgccgcgagacttccgtcgccacgggtgcctcgtttctgcgtttctcggttcctgtcttcccctccagacgagccaagcagacgaacgactgggagaacgacccttctttgcgcactgggcggccttctgagaaaactttcccctttctttctgtcgccttgcaacttcctcgggcacttcccccgtttctctcgacacaaactttgcatgcatcgaactcgctgcgcaacccaggtttccgttctcagtatcgcgtcttcttcgcagctcgggcctttgctctccgttcagcgaagcgggcgagtgtcttttccgcggcctcgagtctgaaaaatccaaaaaaatacacagctgtgacctctctccgcgcgcgctccccccccctcccctgcctcttccttcccctaagcggttgcccccagggacttttgattctctccgcagtgtttcttactgagcctcgctctcagtttcgtttcctttctgttgctgtctgatctcgcgtccttgcctgcctccgtcttcgtctcccggctgctgcctgttttcgaaaaaggaacgctcacgccgctctccgtagcggccttgccagagcagctgctcgcgcgattgaacttggaacaaagagctcctgaggtcgtttcgccggtaaagaaggtcggggcgcgacgcaaaagcca

SEQ ID NO: 1924 - DNA, 2511 bp, Toxoplasma gondii
  source 1..2511: mol_type = genomic DNA
ctgctcattccacccaagaagatagactggttgtttagagtttagcattttgaaacgtgagcgagtagacagggagtctgcgcatagaactgggcattcgtcctgaccactgttgcatgtgggacgaatcatcagagtatcggaaatgttgatttgataatttgcatctcctcaacatagctgcaaaatagaatgcacgttctataataacgtgctgctctatctacatatcaggctgtagagagtcaacaacttccttagctacctatctatcggtatgcttatcaacctacctacccagcacatgatgtttgtgcctgagagtcctctacttgtgtccacatttgcggttccccccgtaattattgtttctctcgtatgcagagactagacttatatgcatcattcaccttcgacaacggctgggtatacatgtctggttgtcgcagcacacgctgccacagaggaggttagaaggaagtcgacaccggtcctattatgtactcgccaccgagccaatgcggtgccgtacgtcggagcaataaacaacgtaaccataatgaatacgtatgtatagggaggtcactatatacatatgggacctctccgaacgtcgtacaaggagcacagccatgcacaccaacgcgcaagtagctatactttgatgctagttgctgcattcgcattgtgtcgtttatgctttcatgcgcaaaaatggaagcaagaatcatgccgaatgcctggttctaagtggactgaatgcaaattttggcaagttttacatcattccagagcccttcgttatggacggggctcctgttcgggctgctgggttacgtgactctgtcagctttgggttaatgtaactagatgaataacgatcgtacacatttggtgggtgggtaggctgctgatggttattttcagcgattaaaacaccactagcgaactcttctgggtacgcacctaccaggcacctgccgaccactcttcacatgccatttatctaaaactttttaaaatagaattatctttgaatatgaggatcgacatcgacaagctcttgtcagcttttgatgaggggaaattgtgactggcgattatcccggataacgcaattcgataaatctacggtctaaacatgtgcaccgcctgtccgtgtaaccagcaaacctcaatgtgctttttgttacgcggcgaactggatactttcatccccactcgcagacgtcgaggggggatagcatccgcatgttaacttagtatcagtaagtcaggcggttcacatcggaagtgtacgttgcttgccgttcattgcattcagaatacggaactcatctgaactatttatgcttgtacaggtgatttaatggaaccaaccttgtggcttggcctttcggtgtcaagtggtgggaacctgggcgtctctaaaaggatcacgactgcggtaccgacgatggcactttacaacccgtatcgataaacagatgtttagagtacacatatgttcctgttccagacagacaaatcaacagcgacgcatgaatcaacggtcaacccttgcacgggctatctggcaatcgttctgctacttttcaggtctgacactgctggtatgccggcgcggcgttaatgccgcgttctgacaacaaacgtgtaaaatgcttttcagtgccgcagctcacgctttacaaatgacttgactccatcctcgtggaccaagccaacttcttgcgcgcttcgtcgactgatagttagccgttcgccgattgtgcttcggaactaactacataagctcccgctaagaaccccacacggtgtggtgttgttttttgcgacggccgcagaacaggtgcttcttcacaggccccacagggccctttcaaggtggtcacagttttaaggtttcattcttattcccatttcttctgttacaagacggacggtgacagaggagcgtattcatctgtttgccgggttcgcactctgaaccagttggctgttttattcgtcactaataaggccggggctcggatcgccgttcagcgggcttgttggtctgtgtcgactttgtttggcacgcctatttctcgtggcgccgtaaagcaattcaaaggaacgcgtggggcatccgaacgaactcacttttcctgggagtttgttcggcttccggcagatccattgtcattgcttgtctgagcgaggacatccaatccgtgtttctgtgttgtcttagcggctggcttttgtgtcagaaggaatcggagctcgcagcgcgtcggtcaaagctttctgagacgtgttccttacactttggtgcctccatctttatacctgtgtgcgactgctcggcctactgtgaatagtctccgagctgccgtgtcggccgaggcttaaaccgatgatcggatgcctactgaggcacagcagcactgtgcagatactttgagtgaattcgcaagtgtgaattcaccagcaggaatcgtggtagactttgtgcggataccgtca

SEQ ID NO: 1925 - DNA, 1584 bp, Toxoplasma gondii
  source 1..1584: mol_type = genomic DNA
tagaagtggacagcacagaagcaggaaaggtggagacaggcaagaaaggagaggaggacgggggaagcggaggagacgcgggaggaagagacggagatgactgcgacgtaggggaggaaggcgacttccacgggagcagggagtcgaaggtagacggcggacagttggtgtacagcgaggaggcttcgagagaagaggcaggaaagcaagaagttgatagagaaccgggaggaaggagcgcgtttgaagcagacacgggagaagattcagagtctatgtctgtagcgctggaccgcagactcgcgtggtcgaaatccatggtggtttgcgctttgaggcgcccaaaacgaagcagagggccttggtcagcgacttgtgcatctcattttcctgtctctgtcatcttgtgtaccgcgcccgcggcctcgcgtttcaatggcgaagggcgaggctctctctcgaagacgccctaaagaaactcccgcgaaaaaaagagcctcacaggtcaggcacacgagtagcctcgcgcgacgcttttccggtccggaccgggtgtatgagaacgcctgaggtccacgcctgagaggccagaggaggcgttgcttcgcgcgttactccgttttcccttcttgcatgttcgccgctttgctcttcgtgctcgtttcgaaaacgtgtctcctcccggatgatctggaaactgtgtgagacgccttattcgtttgaagaaagcggcgggggacggtcgtgtatgttcccgtaaagtttcgaacagtagacgtaaactgggtcgaatagcaaggggcttgccagatcgaggttcctcgcctctctggagcgtcgcttttccttcacgagaaaagccacaaagaaaaaaagaaagacaagacacatctcacgtgtgatgttccctcgtccaactaaaaaccataatgcagcgtcgtggcaaaacacttgcaaccttgcgactcgccgagacaccgagatcctgaggtgtatctacacgcaggtctctctgcgcgaaaactccagcttcagtgtttcatacgcaaagacctatatgaagctgcgttccaatgctgcgatggacgtatcctttttttccgtctcttcgcaagtctccttctcgagactcttcttccgtgcgcacgcgccgtggaggccagctgactggtgtgtctcgagatcgctctcactgtgccgtgtgcccgtgcatgcagttctgggcttgtcggcttatattagggcccccaattttagcttcgaggcgggcgcggccagcgttttattagccgacacaggaccgcggcgggcggctctcaattattactctttttccctatcggcttttagaacgaagagtgtgccccgcatgagcgtttttcggagagaggggaagagcgggagacacagaatcgcgcgcggtgtatgtacaccctgttctcaacggattcgaagtcgccttcccccggtttgctgcccgcaggctctcttgttcactttctttccggtttctcgcgaggcgttggacaggggactcgaggcccgtcagtttcgcgcgttttcctgttttcgttttcctcaaaa

SEQ ID NO: 1926 - DNA, 1859 bp, Toxoplasma gondii
  source 1..1859: mol_type = genomic DNA
cgtcgcagtggtttctgcatgttggacaccgcgtggtcggtttttttatcctggcatgctcttccgtcagcgcccgaggcggacacttccagggcgttaattttttgtttaacgcgttaattgtgtatgctgacccgttggtagaccaggtcgggtgtacaagaatgctaagaaacagagaactatccagaaggagcagctgacagagacgttagcacttttggggccccagtacagtggatcttcttcgaccctcggacacaaggttcatctcagactgctcccagctgtcgggaacgtagcattggcgggacacctgatgctcatgaactcgcctttcaaaaaaaggagtcactgtggttagcgagcacagaccgaaatgcaatttcacaagccgtggacggtgcaggtggcatacggaattgctgtagatcccgcgtagctactgcttgtgcacttcatgtgacccagctatgcattttgatgaaatcgacccgctctttttgacagtgatacgagatattgatacatgaatcgaacgccacgacaggtgctttgttcgagaaaagctggcagtccgatcgtatatttcgttccagggaccgtaccttgagtactagcgtgaatgattaagaaactggtttgttggcaagttatgtaatcatcagtagtactgcaccaggaaacgaatacgcagcagcgtcgtgtgccagtttagaatctggagccccaacgcgtgatgggaagtcgcaccatacaagggattcgtttggccttatgcaatgaactggttagagattgatattctagcagaatagagaactgttttaaccaagcagagaatatgtcgcggaaacgttcggagacattacacgtcaacaagtggatagagccagtgcacacatgacatctgaatcacgaaaaccgataaaagtttgtctcctgtccccttaatagctatggaggatgtggtatatacgcttgtacacaatgggtttatcttggtgatacttgtagacccaagtatgtgctccgtcgtggaagttttctctagctagaagaggcacaggaaaatgggtgagaaaataccaggcttatgtcccacctttgtctgccaaaatcggtccgcgctagacgacaggtaagctgtgcgtgacaagggagtcactattctatcgcgagtcgcgcgccacacacattctgcagcttttttgctgcccggagctgctgtttcacacgattgatagctggaccgatgatcgcgtaatcacggctgtgatgagtaagatatcgtcacgctcttgtcgttcggcaacgacggtacaaaaacagacgcaaagtttgcgttcgctctcgccttgattttttcgcgggacaccaatggcaattgcctcggagcagccgaccattctccggcttgccaaaaagcattacatgcggaaccgctgtgcgtgttttttttctgaatcgtctatatgcgtggttgaatcgtgaatctcgactaggacgagaagaacacacccccggttgtatgccaatattgtacagggagacttcgggaggtacctacacatgtagcaactgctcgaatggcttctcgtgctccctgccactcaaaggtgtatgacttcttggcgttggtatttttgctctttcgtaaatttgggagattttcctcggggaaatagcaggtttgaaataccacttgcgttagcgatttgtcagcgctacgctcaaattgatatgcatacccatacctacgcacatacacatgtttgaggatatagtctgaacgagtgtgttcaagatttctcttccctggtagggagagaattgtatttcctgccagctgggagcaa

SEQ ID NO: 1927 - DNA, 2681 bp, Toxoplasma gondii
  source 1..2681: mol_type = genomic DNA
aatcgttgtgtattgtgtcataacgaggtcaaactctgctctgcaagggagcagcagagcgttcgcgtatgcggaggctggtaagagataggggtatctccggatgtgacggactgcacaaatttcgacatcccagtgtcataacggcggccccaactggcatgttttgcagcttttccctttcggcagcatgaatcaatgaagaaataacatggggctgccacccatcctgaaagacagagaattaagccacgttacagtggtgctagtcttatgcgtttattatgggtggcacactggacggtgtatgttgttgattctcttgaaacagaggtttctcgtttgcgtaagcattcgaatagagctggtcaccgtgcgatatatctgtacgcggatggggggatggcaggcaaccgcgctatgttgaatagacaacatgaaatgttatccgagggagttcgtcacctgcatctggaatacccgttcagttcgcgaatgtgcgtaccgcggcagcatgttccgccgtgctgtgcgcagcctctaaaggcggcagcagcacatgcaagggcgtcttcaagataccaaaaacttaacaagcgcatatcaaatagcgtggcagccatgtggtgcacctgtggttgtgtgtcctctaatcggctgcctcagcatactggacgacaaaaattgttcgccggcacagtgacggccctacagtcgtgagaggagtgaatcactaactggaacagggggcgcgttctcggcggcgactacggctagagatccagcaggtaatgaacgagatggctttctccttatttgccacctggcagtgcaaactgtacctcagcgccaaggatccaaatctatcgcatgtcgaacacttcgggtcgcgcatatgctgtgtgtctctagagcgatcactcttagtcggcaggctactctttgttcctttcgcgcatgcggaataacagttgctcgttgcatgttaaatcaaaccgtcatgttgatgtgatgtcatgaattgagaagcatccgtcctatccgtgacacaccaactctcgacactacaatagctgcagaccctaggaagcacagaagctcaatgagggtaacgttttgctgtgcccttgaaaatggaatgcgctagctaccataaaaaacggtttagctctgagtttgatcaatgagtgaaaagcaatcgctagcatcgtcagcatccactaattgctaccactcctttcgtgcccgtatgtctcatcggcgtgaagccctacactgcgcaatgtaacgcttttgataccgcaacttaagcaactcagcgagccgttctccctccgtcgagatagccctcgtctacagaatttcaggtacctattcgccagatcccgcgagatgccgtttctctgacagcccttctcatttactcttccgccttgccggtataactcccgctgccctatgttgattctctctgtgtcactaagtcaaaggaaagcaccttcgcagaccgccgtgaccacaacaacgtgcaaatttaaggcagatgaaaacccgcaacgctaaagagttgccatcgccgcagtgcccgtgtgataaggttacaggatgcgctgcaccgactggctcgtcctgtcgagcctttgaggctaaaccaccatacaatttgtatacgtctttcagcggaccttaagtgattatgcagtagtatacttgcacctgtgccttgagaaaataatctgcaacagtcctggtcaatgaatacaacctgatatccagaattggtagaaactaccagcacctctaacacgcgaccagtgacgcccactgccacgaaggccgttgacaggatgtctcacttttccccaggccgggtttgcagttaaggagaagtctacggatttagggtttgccgttccagaagtgttgacatggttagcacccgagttatgttgcgaacgctggtaacaaaccagagccttgcagaaagcaggcggtaacacaaagcttgtcgtcttaattgtggcgaaaatcattacgtgcagcgagcgcacggagtcaactactattgagcagaagtatgcttgtaccatgggggggcttcacagtgatgagagaacaggaaccacgcaggaatcctcgtagacgttttagaaagcccagttttatacggcgacgtcggcgtgagacacaaatttacgctgatcgtagcggggtccccaaatatatgaattgaacctcatccttgttgtgctattcacaatgtagccttactttgtcttcagacatcgaactctctaccacatcgaactctctaccgcggcggacgttccctactccatttgtccaattccctttaggtgctcttgcctccagacaagaattatcgtgtcactagacttctatcgaagtgcctcggactttttggcagtcctgcccgaaaaggaaaacttctaaagcgcgccatgtcgaaactcaggtcgctgcaatgctgtcttgccgtcgttcttgatgctcgaaagggactagcctggtagcagcagcatgggacgttggctagtacggagagcttttatcccattctcttcgttctttcgtttgtttggcaaaattgccacagtttgcttgaatctttgagtttcttgagtgtctaaaagattttgtcgaacagttagtgagcacca

SEQ ID NO: 1928 - DNA, 1482 bp, Toxoplasma gondii
  source 1..1482: mol_type = genomic DNA
caggtgtgtgttggcagaaaacaaaggtcggaaaccagaggaaaaacagaaactcacagaataggcgctgccatcgtacgcgaccttgagcagaaagtgggctgtaggtacagcgtcccagttgaatgcgcgtttctgcttctttctcttcgcctcgccaggtgacgcagctcctgcaagctcgcgctctttccctgctccagaagggatcgaaaggggagaaggagaggaagaggaagaagatgaaaaagaaggagaggaagaagaaggagaggaagaagaggacggagaggaagaagaagatgacaagactggcggggaaagagcccccgtctccatggcgacgaaggagagagggaagcagggaagaagacagataacaaggtgaaggaagttttccagatgcctcaggcgtcgacagaactcaaccttctgcacttgctcgcgtcagcggccgactcaggacagcggggaaagcggggacggcggaatccacggaggaaatcgaaaacatggagaaagaaaggcagcgacacagagaaaaaatgcggaagagaactagagaagagaggagagagaagaaagatccgtcgggcagatacgaaacctgcgtagatgcgtctaccgtctatacgaccagtccagcgaaggccccaatgtgaagagcagctcaagcccttcgcatttgtcgacagcaattgatgaaggaagaaggcaaccgacgaagcgcagtatctacgcgttcagcgtcgcgatttcttttttgtcgccttcagtgtgattgaagaaaggttttgattcgccaaggaaaagaaatcttccagagcagttgcaaggagtccatcgagactttctctgcgttgcgaggacttgcatgcgcatgcacacttgctgccgaacctttctctagagactcgacaagagttatcatctcttttctcgctctctttcgctcaaactttctcgctttttttcgtctcccagcgagggtcttctcttcttctgtctctgcttgtttccgcgtttccctggaaagcatgcagtggcgagggagttgcgttttagcaaccgagacgaaggagaaacatttcttagagttccttgcgatcgtcttctgtcagaattctcagtttcttccagctttcgcaggaagaaaaaaccactgcaagacttcctccctgacctgcgaaggaacgaggcggatccgcacagctcccgttcctgtgttatcttttctttcctcttggattcttctcttgcgcgtttcctcgccgcgtctccatcgcctcactttgttccttctacagcatcacttcttgcctctctgtgttgcccttccctcttcgtcttctctctgtctcctctctcttcttccctctccgctggctccctgctccccaaccgtcgctctcctgttccactctacagccgcttcgtggacatctttcgtgttccagatctcgagtttcccctgaccatcca

SEQ ID NO: 1929 - DNA, 1536 bp, Toxoplasma gondii
  source 1..1536: mol_type = genomic DNA
aagtcgcacaaaatatacacataggcaggccgatgcatagctggataaaagtatacgcatgcagatatatatatatatatatatatatatgtataaatatacatgtatctgaaactctcagatgattctatggatgtagaaagacatgtgcctctacgtgtgtgtcttttcgaaccgcttcttatgtgtgtttgccagagtggacatgttcgtctgctgttcttgaaaacgacagtttaaaaaggcgcataccgacgcctcatttgcagggggggacgaggtactcgcagcggtggaaacagaggcgacgtgagaggtcagaagactgtcatcccacacagacaagccacccgtgaaaggagatgccatggtgtctgcctgcaaaagacttcgttctctgttcttccagcaagaaaccgcttccctgagacaaggaaacggcagacaacgtagaggagagagacggagagaagaggatcggcgagaagaacgcgagtgaggaggcgtggaggaagaggctgccccggcagagtagatggcagatgtcgaggtcgaagaagtcggcgagaagggagagaatctctgaggaaagagaaccgttcctggagtcggtgaggaagaggacgccacagtggaagcagttcggaagggaagaggaagaagcgaggagagatccgacaacagaaaactcggcgttctcaaacgcattccaggagagaaaaaggcgaggaatgttaccgctctactgaaagccactatattaaacgccgcatgcagcggaggaggacggagaaaaaagagttttaagagaatcgcggggacaggcgaaaaaactgtagagaaatcccgaccgacgtagccgtgtctgcgatttaaaaaaaacctcgacgcgaagaaagaagaatgacaggactcgctgtctctctcgtcctctccctgtctccttccacagggcgatgcgtctccggtgtcttcggggatcttacgagcggaaggactggtcgaagactgggacttgaagatgtttttgcatatttgagaccaaagagacacccaacctttggaaaacctcgctaggcttctctgaagaggacagagggagagggggcgtgtctttccgcttgtctctcggcttcctttttttacgtctttgcatgcgaaggtgaagatgcgctttgccgggcgaccctcctggaagcctttcgtctgctgatttgcatgatttttttttcgaaaggaaggaatttttcaggttattcgacatcggttatgtcctaggcgcaatatatggattactgttatccctcgtattaacagcgagagaaaactactactcagatgctggtctatccctcaccgacttcttctgtgcataagctgaatatttcctcgcggacagaagccgccgtccagattcaaggccacgtttttttctcctctgtcgcttgcttctccagcgcccgttcaaactcgagtttcctgcctttgttgtgaaactccgaatcaacgtctgctcttccaggaaagacaccacca

SEQ ID NO: 1930 - DNA, 1873 bp, Toxoplasma gondii
  source 1..1873: mol_type = genomic DNA
cacaagccactgtgtcaacaatattgattccctcgacgagtgcttaactgaaataaaccctgtccagttgaaattacgtgagtacgcatgtgtctgccaattcccggtttcaaatccttccactcctctgtttctcccgatccaacatcttcttttgaagggtctcgatccgctgggtggcctcctttaattgcgctttcatgtccgaatcaagcttgtcacaccgctgcctgatgagagacaagaaagcaccgtcaagagatgtataaaagcattaacgtatgtataatcggcatgaaactccgagaggtcgacttacagttctcctcgtatgtagtccagtcgtttgttcacggtcgccgttgcgtcttctcggttttgtctaacaagcactggtcctacaattttgtacagcactgagtcgtcctggagctggcccagttcctgaaaaagacgaacgcaacaaaggatcgtttctcttcagtttgccggctctcagaaaggcaacccctgcgtattcgcacaagagactaaaccatgaacgttccgcccaggacctcaccttcgcaactccttcgttctcgttctgttgtgtcattagcttattcctcatctggaggttctcttccatctctgggagacagcaccaaacatggacgaatgccgttcactattttaaacgcaacagcggaaacacttggacggaccgaggtgtgccgtgaccatcaacaaatgcagagaactcgcgggaaatcatagaaaaaagcatttgctcaggagcaagaagtgtaagccgcctaactgaaagctctagctgttagatcggtgacgcgtgtgtgagcatgtcttaacagagtctgtcagcggcaagagaccaacaaatagcttcacaggactcctctcctgtgtcaccatgaaaagcaaacacaatatttatatctgttgaagaaggttgtcgcgagtatgcgtgtcttcagcgctcactcccgatgaggcgatcgaactctcgcatcgcctctgtcaactgctcctgtgacatgttgcctgaatcggtccgttctgtttcatccacggccacaacggactagtgttccacaacagaaattaaattggaggtggtaacttgcagaacgtccataagtgtctgaagctgcacgcttcgcacaggtatcgcagttcgcgcgggcgtttaaaaaaaaacgatgtttgcggatctgcctacaacactgcctccccctactggttgcatgtgagtgcgcccagcctacgccaaaagacgttttactcgatgcatgcaccaccggtttcagctcgcaaccacggccaggccacggccattcatgacagtcgaaacaccacacctttaacactacccttcgtgacttcagcagtcatcgaacagctgagcaacaaaatagcggaagggcagagcgaccgtttttcgtgcggacggtgtctctttcgaaaactacaacagtcactcgctgccgctgctgcctcgtctgccacgccccccgggggaccccgcgtgccggtcgagttgaaaacgggctgtcggacgactgtgcggttattgtcttttatcccgcttcattcgtcttccgctagcttagcaacgtcccagggtcgggtgcgccacaaatatgttattctcactcctgtatagcaaccgttgacgggaatatcaccccctattatctgctttcacggatactttcttctccgtgttccccttgcgttgttctgttttcgaactttcgcggttttgtccccttggtcacaatcctcggagcgtgtcggtgacgttgtatagcgttttgcgtactcatccctttcgaccactggtgacttcttcccttccgtgctaacagca

SEQ ID NO: 1931 - DNA, 775 bp, Toxoplasma gondii
  source 1..775: mol_type = genomic DNA
gtctccgtgcgttccagttctgcagcttgacaggcgaaagagcgaagagagaggaggcgacggaggaagaagttgactccacagcatgcgagaggaggcgaagggggtgaagcattttggaaaggaagagaaaccgaaaaacctttgaaatgtgcgaaaaaggcgactctgacgaaaaagcagagaggcgggagaacgaggtcatcaagttcaaagagcagacacagctcgacaccgtgtcttcacgggtgtctgcgctcgagacgtccccgcgagaaacgtctctacggtgaagagcgatgcgttggactctactcacccattttcgtttcgtttcgcgctctcgttattcttgcgcaacgcgattggccctgggaaaacgaagagaacctgtttcaacggaggcgctcgtctgtcgctcacgctgtctcattgggaagccagacaaaggctccgttcatgttcgtggagggaagttgtgaagaaaacggatacagtcgagttcacagctcttcaaggcaaggctgcatgcagctgaaaaagcgaggaagaagatccggaggaaacgggagcccccccactcctagcgagtctgcagcaggggaacagaattgcgtctgacgaggaacgtctttgttctcggaaaactgcagagaaagcaacagcagaagcgaccgaatcgaattcgagttccggtgcgatatggggaccgagaaaaaagtgtagaaatggagagagaatttttgttggcggctaagagctccctgttctcaaa

SEQ ID NO: 1932 - DNA, 4258 bp, Toxoplasma gondii
  source 1..4258: mol_type = genomic DNA
gaacagaacgaagctagcggcattcgtgcaacttttctgcaatgaatgtgtacgagcatttgtctctacagactgtctgcccattggctttagcacgcaaccgcatgttttgcgtataccggttgctggaatgtgcgactcaacagagttcagtctctttcaagctggcacacgtcagggtctcgatgccatgataaacgcaggcgaaggagcggatacagctcataatcctgtgttcccggtagacgccgtagaaaaaccagcataatcgtgtagtcttggactgtgtagactggacctaaactacttaattgttgtcagcatcctgtgacctggttatcgaagcatcattttcttttaccaagcgcaacaacacagcgctgaggacccgtgacctgttgacgaatattagtccaggggtcacttcagccacgtttttgcttagtgcgtacaagcccgcttcctttcgaacctctttaagaagcctcgcgaggagaagaaacaccattggtatcagaagggcagcagtctgaagtcttctggttggcggctctgtcgctgggctaaggcactttgctgaagccctgtcagccttggacattcgacagcacacgcacgtccacatgtcgatttcgtaagctcggtcatcgcgtcgcatagttcttgttctatgcctctacgcaacagctggacatttgggacttattggagacgtggtgtttccgtcttcagcttgtgcggatccttggacaaatcctgcttgcactggttgagccacgtaaacggcacagcctcaccactgttgcaagtgtacaaccgcagaacaatagtgcccgaactgctatcgtaccacgagagaacagaggatgcagaataagcgatcaactatcacattttcggaaaactaggtatcttagtcaaagagtttttaccaccattcttcctggagctgcgtcgaatgacgagagcaccttcgccttcagaagtccacggctgcttctgcaagcgattgaacgtatggtgtttcgtgcaaattttcatcagtttgccgaatgattacaatttcagctctcacaacctggtgtcataattaatttcagtcagatgagactagattttgcaagtgatgcttttcacagtgtgtgcacttgcacaccagattgattgtgtattacaagatagagtggcgtatgtgtccaagccactgaatccctcattctggctctgtattgtctaattaaggagctgtgaaccgatattttcggataagtgagactcgtggcgaccgagccaacactacagtgcaactcttgggacacaagcatggcagaggggctttgcagtgatcgaaatccaaaagaccaacatccgagccctcgcttttgggagcttttaaaatgatatttggaattgctgaaggcagaaatttgctgcagctgttcacccagacaacgaactcgacaaggcggatccgtgtccgaggctcgacgagggcgtttggcgcagtcggtagcgcgtgggtctcataatcccaaggtcgcgagttcgatcctcgcagtgcccagtgttttacctttgcatcataacaatagtccctgtattgcatggttctttgctctggctatgacctcttgcgtcgaatcttctttcccccccctttacggctacaaatcatattctctgggtcactggtaggtgcggatccagtcgctggggtgacaacacatgtatgtgcataaggcactgattatgccttaattcgaaacattcgtcgtcttgcaatacggaacaccatgactacatgagttaaaaatgattacattgtatctgcactgcagcgtggaaggcggagccctcttcgacgtcaaaatgccttcctccttcgggccccacatgctgccgagttttggatgccggtgttagcgtttgtgatttcaacatcagaacatcaacacagtgaatcatctctctttttttcctctgaaagggcgaatactttgggaaatgtttaaggcgcgtaggaaattaagggcacacgtgagaagtttttaataagtttccttcctttcttgccaaggcgggccgttggctgaacatccctccggagatacaaccgtcgcgctagaccactcaaaccttgctggcgacatcaggcacactcttgaagagctgtagtcattaacaacgttggttaagtataagcatagaaccaattcggtagttgacgactacggcaggcaacgaatcggggtaagtggcactgtgtcgccttccctctagcacactgcccttaatttccagggcaccgcaggacgtcgatggatgatggtgcgtttgaccgtaagtcggtgaatgttcactgtttcgttattctggtacggaaacgtgtgaaacctttgactaccatattgtgtaactggaaaatgtggaaaccaccacacgcaaggcactttccactgactctgcttctgtcataagtttagtgcttgatacgaccaccgactgccatcctgatgcccttcgaaggccgtagctgctttgcgcaccaaaaaaatactcatagcatatccccttcttcttatgcaaagggtggaagaccgcgacagctaatacacgagagaggagaacgttcgtgtccatggagcctagcttagacagccctcctggactgtgaaacggactgtgacttaaagtgccgacaatttattccacagcggctctttgtgtttttgttttggccgaaaggttgtcatactgtgcatggtgaaccactttcatgtatacgagaaatgaggccttctgttttctgttcgcaacctggtgctgttgctggctacggcagtcagcatagtcaacaaggtgtgcccctgatgatccatgtattcgaatggatgatcctgaccgccccacctgaataccgcacatgatcgtccgacgccacaaagtgatgattcagatactagtttacgcaatgcgagagaggaacactgaaaggacgcactgtcgctaagcgtgtgatagaagtttcattttgtactcagctgctctctgctgtctgcgagcacgttatcaaatcttggcactcgagcatccggcttcaggttcaattgtgcttacgcaagctcggcattgctgctcgggcaacctaaaacgggggttaggaatgatagacgcatgtatacgggtctccaaccgccagagacagaaacaatttttgaaggagcatacgcctctttctttcacgttgcagtgtctcagaacattcaggactgcctcctgagaggtgtctcgtcttgactgagtgtgacccatcagagctcgtatgaataactatagagccagaagcaattcctaccacagcctcgaatgcccagtccgttccgaggaagcacacggtcgttcatacggttagacctctcggacagtgtcaggcttttccgctagaaatgacatcgactgtagcagtccttctcccctgcttacaagcaatactgaccacttcgaacgtttttctgaagtcaccgattcgcgcgtctctcatttcgcgtgttacgttctgcgatctccgcattgcgcgggcaaatgcacagtgacatctatctaaaccgtttggtgctggtgcctgtttaacgtttcactgacggatcagccagggagcaggtaagacgtttacggggtgagccaattttcggggaaaacaagttgagccgttgtgataaggtggccggcgaagacaagttgcgggggtatcctttctttgttggtgcgagcagttaccgccgcgcatcaatggggagcggccacaactagcgagaagtctcgattgtcgatgcgcttgtggtactttttctcttctgccgttgagaggtcttacagacaactttttccgcacagttccgtgcctagaggcagaatatgctcaaataaggccaccccaattctcaattgcagcacaccggctcggtacagggagatgaggatctacgcatttggcctatgacgtacagatgtgttacgacaggtagtctcttctcttcttgcaaagtgcatcatctgctagtctaccaaagccacgaacgctgtctcttaactcagatttcctgcagccttgcctaatgctttggatacgagatccctttccattgtataagttccgtgtgtgtgcggttccttgtctaacacctttttatgaaagaaggaccacaatcgccatcttgtttccgtatgtctccgatcaccgtaacgcattctaaatcga

SEQ ID NO: 1933 - DNA, 2315 bp, Toxoplasma gondii
  source 1..2315: mol_type = genomic DNA
agttttcttccacgactctgttgcttccgcttcgcctttttcgacttgggtcgtctgtctcggagactcgctccggcggcgactcctaccccaacgcacatggagcgagagacagatggcctcccagcgacgtcacgacgtcgaaaggaagacacgagacagcatttccgcgcgagaaaaacagatacgcgtctcccctggatatatatctcacgcgttttcgcctttttttccgactatatgcatgggtttctcgcacatgaacactcgacacagagccgcctcctccacgtcccccagagcccctcctggagtgtatctacacctggtaggtcgcggcgagacggtggagaacgccttcgaccgccggtcgctgagctcggccgagtcgccaggcgacggccttcttgtctgttccgttggccgtcaggtcgaagacagcgaagcaccgcagagaaggagcggcaggaaatggtgaagaggaagcggacgaggaagagagtggcgaacgagtttcaggcttctgagtgagaggaggggaacacggggaggacggttgagtgagagcagctcccccgaacagagaggcgggcgtcagagaagacagagaagaaaacagagaggaggactcgcggtcagacgcgccagaaacatgggggaaacaggcactcttctctcgatcgcgcatcccccctcgcgagcgaggagtgcaggaaaggcggcgcatcgtgagggagagaactcaacgcgagcagagaagttctattcggtgaagcgaggccctccagagcggaacgagaagtccacctcgcagtgcatgtacgtacatgtacgcatatatccacgcctgcacatagtttgcggcaatcctagtacatatattattctagagtcccgagaagacaaagcaagaaaaggaggcagaggaagaaagcagaaaaaaggaggcagaggaagaaagaggcgaccacaagaacggcgcctgactgcggacgagacgcactgaggcctctgaagtgtcagcaggagacgatgcgaagaggacggcgcgaggacaaaggaagggaaaagcgaaatgagagaatcagcgaagaacgcaactacgaaaaaacgcgcgggtctccagagcgacagccctcgaacaagagaggtgcttttagagtctactgttggggaggaacagccaagtccacggttagctatttgaagacgttttctgtgttagacactatggagactcgtgacagcagcaaagtagtacggacaagaattcagtcccaaaaaaacaacgagcctttgagacgagcgacaccgcgccgcaccgaagaacggacatactctggacgtcgtttctcccaagtgtgcgtgccccttcgctgaagagaagcgggagcgagaaagaggcaaaggatacgaaaaaacagcaaggaaagaggatgaaattgcggccagacttggacggaaaggtcagaggcgacccgcgatcgcatctctgtggagagccgtgaggcggcatgcggagagggagtcctcgtccgacttttagctcgtgctcgccttctctgccttccggtgaagtttgtttctgaagccaagcaaaccccagtttctgtatttccaacgaaggaaaggaggtttcagttgcgcggaaaagcgcttgcggaaccgccgcgttctggtgggtgtctcaaatatacctgagcctgagaagagaggactcgctgcatgcactgcaggcacagcgtccggcgtgtagaaaaggaaaagcttcgttgtttctcgcgatttcggcatcattttcaccgcttgacggctccgcttctccttttttcgacccccgaagtggttgtttctccatactggctggtgttttgtttcgatccgccgcctcgacggcctcgcggcgacggtcttggtaggcgacatcctgtgctgcagcaggaggttcaggtcgtttcgggccgtgaaagatgtttgttcctgcgtgaaagtttcttttctttccgagtactcgtctcgtgcatccacgttcgtcttcttctctgcgcaggcttcacccttccgcttcgccgttccacgcgcatgcagccgtgattcttcccgcagcctaccggggaaagcctcgttcgaatcggcccttgaaaaacgctgcaagttgcccagcgcgctggagagccttttcttctttcttcctgtccgttattgtttctcgtcggttccttgcgcgcgcctcgtcgctcgcactcctctgcggggcctctggctgtgccgcagcgctccgtcgcgccgcgtttcggttcctgttcgagacaaga

SEQ ID NO: 1934 - DNA, 1847 bp, Toxoplasma gondii
  source 1..1847: mol_type = genomic DNA
cgacgaaggaaggcgtgtgaacgaaaaggtggtggagagcagaagaagaagaagaagaagaagaagaagaagaagaaagcgaagcgaaaccacagaggaagagaagaggcaccaagaaggcgaagaagcagaacgcgaagaagaagtcaggagcagaagaagacggaagaagacggaagaagacggaagaagacggaagaagacggaagaagatggagtatggaacaaaaagaaggcgagagaggacactggggaacgaagccgtgaaaaaacagatctggtagaagagaagaaggagacgcgaaaggacgatattgcagcttggagagtctacatggtgttgagaacaggaggtgtatctccggtgtacgtacaccgggcctggcctggatgtctcttgtgggtgcttcgaagaacagagccagtgagacagggagagggcaaaccaccagcgcaaaacaagactggagagtggacaggaagacggagttttatagccattctaggaaaacgctctgaagtgacatcgtaggttgcttgatcagatgagaaggcactcctgcgagaaaaaagtcgacaagaagagaaaacggcggaacgaaggaaaggggagaggtagagaaaggaacgctagatgaaacgggcaacagaaaggcaaagaaggcagaaagagaagaaagagaagaaagcgaagaaagcgaagaaaggaaggaacagaaggaagagaacggaagaatgagatggacaggagggaagaaagagtcgggagcgaaccgcccctcttcctcttctgatgtcccccttggtacggaacaggcttgtatgaagtgtaagcagagagaagaggcgagaatacgaaagagaataggagtgaaaaaggtctctttcttcctgccggttttccactcttcacaaacaacttgtcgcagttgcatgcagccgctgtgtccgcttgcatgcgccgcgagctgtatcacctggcgaaatgaggagaatcgcaccggaaaaggccatggtttttcgtctcttcacggatcgttcaagcctttcgattgcttcgaaacaaaggaccagtttctctgcgtcggctctggcggtgtcttttcatccccctcaagggttcttgcccgctcggatctttgggtgactgtaaaccaaacagcgctggctggcacttgggctgccggcttttccgccgcatttgtttccgaaacgatccaagggagagctggacttttgcatttttccatgcactttccgttttcttgtggaaccgtttccaggggacagaagaggcatcccctcgagaatccgccgacgacgttctcgcggaatctcaagcacacagtcttcgtcaagtgtctcgtctccctcggttttcttgtttacgttttctgtttcggtcgtcgccttccgtcgttttcttcctcgccaactcctcttcttctccgctacatcatttccactttcttttcgctcccctcctcctttctgatttgtctttggaatgtcttttcttctgtctgaagtactgttagatctctctgtgcgtctgtggcttccctcgtcttccggcctctctgcccgctctctgtgccaggcgattcgtcggtttcccccgtttttccgtctttcttgccggcactctctgcggccttcttggccttctctctcttcttcttccccgggcagtcgaaagacctcagccgaccgtcgcttcgcgcttacctgcacagaaaaaccacccactctcggctcctcggcagttgcccgtcttcgccggctcgtcttcgccagtccgcggcctgagcactgccggtcggtcttcgttcctttcacctgagaaa

SEQ ID NO: 1935 - DNA, 2818 bp, Toxoplasma gondii
  source 1..2818: mol_type = genomic DNA
acggccagatgttgtacttttgctttgcgggcggatttttgtttctgcacgatatgtggtggtcagatgccaatggtgtatttggtgcacgcctgtcgttcgcctgatataatacctggattctgctccgcctttcgtggtgcaagagtttgcctcaaggctgagccatgcagtgcgaaagtagtgttactgggacagcttcagctcatggaggaagccaacattttatgcaacaggaattatctgcggcctaccggggaggataagaggattatttcgtttttgtacactcaggagtactagccgaaattgtcgtcttggcgtgaagacctagctgcactaactcgtgtgtatcacttaacaacgcttttcgggagcttgttctagacccaaaccgactgcattgctttccgcttgagggcgtgtgtagtttaccgggtgctgcagatggggaggcggcgcatcggtaagcacactgaggcgagacaaagcgtcacggctttcggtagagaaggctttcgcaacaccgaaggcgctgactaaattggagtgaaaaagacagtatcaagcaaggtttatgctacagaaccgctctagatcttgagtgtcacgtgacttcggttggttatggctcttaacaaataaaaggcgtggaacaagcagaggaaataagcgggtcagcgttagcgtttgagtgtgctggggcaggtagtccatagggatgcacaagactatcgtcacgcagacatttcaacatctgcaagacacctcacggacatacgttaaacgttttctggggagcgactcaagacgtatgacatgccctatcgctggctgtgtttgttgatgtgcgacactgagaaactggaggagcgcactcattggcgtcacgactttcactattggatgcatacgcgtgatgtggaggcgatcgtgttcatccatgcatgcaccgttgggaagttgcagaacccgctcatatttccttattttctggtcttgcgtctgaacctggcacacgagtttaccacgagcgactttcttcagtttcgcaggaggtggatggtcaggcgatgaaaatagcgtcaggagtcaacgaaaaacttgattcacgatacactattcaagggaaagagagttcgaatggatgaaaacaagccgcggtttcatagtaagtgcagctgcagccagatgacggaggagcgtggcgcgttccgtcctgtgacagttttggtacagagacactttttacagagcgaagagtcagtactatcgcactggcagcagtcatatctgagataggaaaatccataagcgtttgctgcagaacataatctacgactttggctacttgcttatatcttcagtgtctttgtttacctgacccaagttctggggttgttttcgtgaccgtccagttaagtgcatcaagcataatggtgttcaaagtaaagccatgagctggtcatttacagcaggagagtgtctgcggaagcaacataacaacgtagtggaacgccgctcccgtgcacttcacattttattctctatgctattctcactttttagttcgactgcacgcgatcctgaagcttctccgagtctcccaagaacttcagttctggatgagcacactactcctacaaaaaggacatgcaaaacttaaactttttggattcgcatagatacctgagccccgcggctgtcaaaccgggcaggtgccagtcaacaggggtttcccgctggatgaatccgacacattcggttcgatctttgcacggaacgtttgtaggggagcctagtctgagacacgggtgggctggtgccagtgtgtagacagaagactctggcgacatctccgacggttttctctttcctaggaaatccgtaaaataaaactgtcaccatggcttcgatttaaaaatgtgttgccacgtgcgtgcagcgaaatccggtcagccggcgaaatgcatgcgtctccagctgtcgacttccatcgcagcagggaatccaacatttgctttcttgtttctgcgcgtttattcgttgggtgtgatcgggcttttcagctacattacgagagatgtcggacaaatgtaagtttcgactgccctcgttgctcgttttaccgcctctatattcctcggtctttcttcggcgacacacgccatattcgcgcctttactgcgggaattcttttcttgctcttgcgtcttgcatcgtcggcttccatctcctctttttctgaaatagcgacttccctggcacgcattggcagacttgggctccggcagaaaggattcccgcgccttttccgctcgggctcttcaggcgccacgttggtgtcctttatacacggaagactttggcattttggattttctgcttcggctttccgtctctgcggaagtttcccttgctgcgttccgggagggtcgctgtgcccggtctgttttcgtctggatcgttcgtttttggttttggcggctgcatgctccgcaacaacggatctgcatctcaaccctcgacctttttcctccgtttgcaccaactctaaagaaaacgcagagacgtaacagccggaaagccaccacatcattactgaacgcctcctcttctatcgtcggcgtagagctgcggcggccagcggcctgcggttctctcccgtttctcgcgtttctgagcttgcatcttttgtctgccctgtgaaagccggagttcgccagcgacacagacctcgtcctcccccgctgctctattggcagttttttttctgtcggtctttcctcccagtcctaggcaatcttttgctccacaa

SEQ ID NO: 1936 - DNA, 2390 bp, Toxoplasma gondii
  source 1..2390: mol_type = genomic DNA
ccctcggagacaagccgatagatgtacaccgcgtctcggtcgtcgacgacggcgaggaaactcgcagggaagcagcgcaggagcttcacgcccgcctctccccgcgtatgcggcgggggcgtctcgaacgtcgcgctgccttcgccgcaggactttctcggctgcttgcagtgagaacagtttgcgccagaggcacccgcgacggcaagaggcagacgtcggagcctcgcgggtgcgcgcagacgtccgggagggcctggatgcagcagcagctggtagatgtcgccgagtcttggttgccgtcttcttcttcgctcgctctctgaggcagcggcggacgcgtcgcagggggcactgtctggaacggagagaaagacggcgccgtccgccgtcgaggagaggaacggagaaactttcacggacgccgcgccagtcgcagcgcgcgcagccgacgagaaacgcgaacgcagagactcggggaaagccaacgaaaacgactccagacgaatcaaacgaaaggcgcctcgacgccatcgaacggtggggcacacccgcccagaggaagaagcagagagaggagaagagaggtccggctgtacgtacgaggggaggaagagagggagggtgccggtctccgcagaccggaagagcgggtggtctgagggcgccgacgcgctggtttgtgacgggaggtctcgcgcaggacagctgtcttccgatcccggcgccgcaggaagcaagacgacggcgtagacgtggagaatcgagggagtgaggaagaagaggaggtgcgaggcagcaggaaagaggaaacccacaggtgcaggcgacaggtggacggagagaatgtctccgccaggcagcggcccgactcggagacagggcgactcctgcgccaagcaagcgagaagcagggcatcgttgccccgagagacacacagcgcctgcaggggaggcaggagctggtagcgaggttcgcctccgctctggagacgtgccgcaacctctggagggaagcgtctccgaaaaaccgttcgaagattcagagacaccggcagcagcggcagaagtggacgcttgaacgacgcagcgaccgagcaggccggagacagcggagagagaggagacagcgaaggagaggaggagcagggatcgacggcttcgcgagtggagagagacgagaaacggacgggggaagttcttcgccgcctcgccgccgtttcctccttttcacgaaagtgccgctgaaggaactcttggacaagtcggtagggcgaggagaaaggagtcaaactctcctggatttcttcgccagacaaacagacgtcaagatcttctgccatccgctcctccgccgcagccaggagagacacacctcgcttctgggacaaagccagccgccggaggccaggctctggagcccagaggcgcgaggatgcctgcgcggcttcgcgacagagcgcggacaccgttgacggcgcggagacaaaagaaggaagcattgactcggcgtccgcctccctttccacctcaccacatcgctcggcttctcgcggcggcacacccgccgtcgccggctcgaaagactccaaaggagccccaggcgcctctccctccatggagcatgaaagagagaaagagagaaagagagaagggaggaggagagaaagagagaaagagagagagaagggaagagagaaagagagaagggaggaggagagaacaaggaaggtgaaacacacgaagaggagggagcaacagtgggaggacgaggaaggagcgggagaaaggatgagaaggagagggagaggaaaaaaagcaacaagacagcgctcgagaagtcgaggcgcagattcacaggtgcatcttcagtgcagtgcgttgcggcaggtctcgaacctacgcccgcagctgcagaagagagaacaagagagcagagatgtccagaaaaacggacagaagaagatagcggaagaaaatcgaagaaggaggacggagacgacaatgcgtggagggacacaggtatcctgtgcatgcaaaggagaccggaggagggagggcaggttcgcagagagcgccgctctaatccatttttcagaagcgaggaaagggagaatttgccgccagattttcccgttgaaaaacgcgaaaccgactcgagggatcggccagcctctgggttgcggtgtacctacgccgcaccccacgagatcgtgtgtgtcggcgtcctctctccgcctcttgtttctccgttctgtcgcagagaaaacttgggcgagagcctccctgaagaacgccggatttctgaatttctggaattcgagctctgtgcgagtcgatctccaccgtcgtttttcgattgctggcaggacatggagctgcttctcgca

SEQ ID NO: 1937 - DNA, 4276 bp, Toxoplasma gondii
  source 1..4276: mol_type = genomic DNA
aagttctgaagataggcgccttggctgtctgtattctgcgagttttctcgactccgcagcatcagcggcggcgacggccgcaacaggcagacgtcgtcgcttagcaggagcgcctcgtcctccagaggcgaagcagagcacagctgagaccctctcatcgcgcgttacaagcagaactcgtcgttcaggtcctgcgaaggtcttgcttcattgcgcgacccaagttctattggcttaactccatcggtcctcgtagacacacgagtgcctgagagcgagaccggcgcggccgcaggttcgatggatcgaccccacccagacaactctctccgggccaccggctgttccacatcggcgaccttctaggcgaaattgaaagtccgcgccgagaaagtcgaagcaggacggtggctgcacacacaccgtcccctcgccgcagcgccgggcaccagactgcgtgaagccgcgtttcgggatcggggacgaggaagacgcgcgagtggcatgagggcagaggagaagcttgtgtctccgcaggccggggaccctgcaggttggaaaagcgtcaaacgtcaccactccaaagcgcatgtcccttcagcagaagactggacacacagaaagagacgaaaatccctttcaaatggactggtgggggtgcgcagataaggcgaaacggaggctccaggctttttttcgccacagtggacagacaccgaagcccgtcagttcagctagttgtcgggctgctgtctatctgcggtccaggactcgagagggcattttgcgcgagcgacacaaggaagggaataccaagcactgcggccgccgaaaagcgaagggaaaggaaccggtcgaggcaaagaacgcctgaaaacggcagatgagaaaggcacaaacctgacgcacgaactcgtattccagcgacggttctgaactcgcaacgtgattttaagccgattcaaaaacgcacaaaagaacgagaaccatcttctgagacaactttggggtttcagacaaggcaggaagggagcaagagggggctttaaagcttcttcgtcttcaagaattgggaaacggagagaggcgttcagtgtaaggcagcacacacgagaactggagaagccggtttccagcgcctgaagtcgaaaggagaacactgtgaccaagaagaaaacggtggggaaagtcaggctgccggatgcaaacgggtttctcacgtgaaagtgttgtcttgtcgcatgcgtccccgaaggagccgcaagccagcacagcaccccagcagctttacaggcggtggatgtctgatcggtctccgcgtcgctcccgttattttcttcaagatttacgtcgaaatgtcacgcatctgcatgtgttcaagtgtttcggcccttccgcaaaaacgtgacgacaacagcgctcagggtaagtgctttcagacgaaaacgcgtgcgaacgcagcgtgtgcacgccgcgttcgtccaccctagtatgaatgcgcatacggtggggcaagacaccatactatgggaacgaagatgccaaaccttttccgtcacgacgaaacagtctgattcagatttcgttccagcaaaatcaacagttctgcttcccgccccggacactcttttttgcatgtggtcaagttccaacttctgagagctaccagattttcccgtgtgtcaaccgacaaggcgtgggtgctcgtgacccgttgtttgtgtgtagaaaagtgactgcttaagcaaggtgctcccgttgacgtcggatgaggatctgctttcttttttctgtccatctgcgcacacagacacaaagtaacagtgcaacaccactcccgcgaatacgcagatatacacacgaatgcgggaaaacgcaactctggaacccatgtaggcagtcgggaatgccagcaactttatcatccggaatgagagacagctgcattgagaagatagccatgtgttacaactctcttacggagaatcaccttagatggacggcggtacatgctgcgacctcgtgtatgtcttgtgcccacctgactcctcagttcaaacagagctgagtttacccggatcaccaggaaacgttgatttaccttttttacaaagtcatttttactcagatattattgttggtgccttaggtatcccatcacgtatgaatttagggcaattatttgaagctttagtcagaaaaaagcactcgcagactgataagagtaggaagtattcttttaatagatgacggagccggaggtggcagggctaaactgtaaggtgtaaaagctgcagtcggtagcgctcggcaaaaatcctcgcgcatattcggtggacagacggggcagcaaggcaggatcccaaagcataaaagtaagcctctagtagaaggtcacgcgattcaaacggatcagtcccgaacaaagaaaatcaattctctgtcttacgtccccctgtggccgaaatcgacatcatgcgtatttccctgtagcattgaaccgccctaaagaacggtgcagctgacctgtttcgtagaaatgcctccattggatggagctgctggcttctagcgcgtgtcatttgtcttcgcagtgtagacagaccgaaactagaccattcgacacttcgaaaaggtcttcttgttccgagggactgccgaactgttgcggggtctgacacgagggctgggttaacgacgtcgaaggcagtttgtgctttgccagtcagtagcctcaggattcagcacaaagactaacctgctgggtcttacagagacatgtatgcaatatgctttagcccctgacctgggttggctcccgctgagatcacttaacgttcacaggccgcgtgtgactctgcttgttactgcaagacccctcgttgacacaccatcgagttacaggtgtgtgtctatcttcttgtggcattcgcaaaatgtgtgttaccccctgtattttaacaacatggctgcagaaagcgatgacagtgacgcatacagtgacgcatgcagttgcacccatggaaacgtgacagcaagtctggaatcgatcgaggtgcatttcacaagcattccgcccagagacgaagaactttcccgcgtcctcgactcggtgcttgtcaaatgaactccctcacagggcatacgatatcaagttggtctatacggtgtagataaccagacaaattttcccgcgtgaccgtcccgttttttagcggagtgagcagtcacatgcctatactcaagccacaggaacacagaagcgatgaactggaaattcccgtgttgaggaagccagtcgagctggtagctgcctgcaagcggatccctctataaactcaagaggctctgaaggcttaacttcctttcgaaggcaatgaatgtttgtttttgctatagttccgacttcgacacatgtgtgacttgtcaagctgtggcgtccctgacggtacacggtttctatgcaggcgcctctattcatctgcgctttatatgcttccgcaagctgaagaaaagcaaataccgcgggcttcgacaatgtgttgccgcagcttttgttcttggcgcctgtagcactcatttattatcttttttttgtatcgtgacacgtgtattatgtttcggtgagggacaaattgcgattgtttagctatttaagcccccagacaaatataagtgcatgtttcttcgcatccctggagcgggcgccgctgtgtccggccgctactcagagaaacggtactgcctactggcaagcgactattgcatatgaaactacattgttgctagcatgtacagctaccactttgttgagctttatttcgttcagttgtacaaaagaatcttgaaaccctttctaatgtggtgccgtatgtggggtgtgatgccgcatagttaaaaatatactgcgagaaggaaatggcaaaacggtcctggaaagacaatgctgccgagcactcattccgctgcctcccgctctccaatacggggtatccattttaacctgtcgacgctgttcttgtccatggattgttcgttttccagtgggtggctccgatagttgctgcggcgcgcaccattacatgtctctcgcgagcattttttgcctctccattcgcattttttttcatctcgaacatggttgtttttcccttatcgcctacagtcgctccctcccagttgtagctgccgtttctggtgtcgttaaaatccgcaccaattactaataatgagtatttgtgtctgtgcagtgcgattcgcatttaattcgctggta

SEQ ID NO: 1938 - DNA, 3268 bp, Toxoplasma gondii
  source 1..3268: mol_type = genomic DNA
atcggtttatatcgtgtttaagttgatctgtttctctgtatccgtctctcttgttctccgcgttgcgcactgcgtctctctttcttctcttcttcctttcctccccttttgtctcttttccccgttttcccaattttttgtgatttttcattttcctttttcaggagaagcagcgccaactggacctggaagcgtcagcggctctgcggagcgccccgcgcgcggcgcctgcgtctcctcagaaggtcgagggatcgatctctccggcgagcagcgtccctccatctgcaggagactcgtggcgaaagggtgaccggactgaaaccgcccgtcgacgggtgcctgctcagagccagggtcgcggagaacaggacgagggcttcgagcgctggagagaaggaaaagtgaactctggaaacggaaacgacgaagagaagacgcgacccagattccgagtcgcagccgctgcactgtctgaacacctctcagcgggaaaggaaggacgcgatgaaattcagaacggagatgcgcagaagcccgaagacgacggattcaccacagtgtccaggaaccggtaaggaagcaaagaagtccaggggggcaaagggagtgaagtggagatattcagtgggagaagacggggggaaacaggagagaagtagaagttgaagagtagatggacgagtgcggatgtcaatgaattgtgatgtgttttgtgtgttttcagaagaaagtgaatgcatcgacgcagggaagagagtctcaggaaaagggatgggtagaacagcggcgagagacgcgctcgggagacgggaagagcagaaacggagtggggcagatgtccattcgagagttcgctggactccgcgtgacgcttcacaagtgtttctcgcggtgtcttgaagttttcttacacttctcgagttaccgcaagtttttcgggtgtagactactctctgctgcggcaaaaccgctcctgtctagtagcagagccggaacgcggttgcgaaactataggggagaggggcagctctgctgcagctcgggtgtacatccactgcagagacgcgggactcgcgggtagccctgggcaagctgccatgaaagtcgatttttctgcagaacagagggcgctgcccgtttccagagatgcagttaagcacctgcgtttctgtaaggtgtcgagttttgcgtaggttcttgtcagctccgagggagacttttgtacgatgtgcttgtgtctgcatgcgcgcgggaaaagaggtgtgtgctacggctgcgcgggcaactgaagatcgcgtttctcgtggctgaggatcgatgtgagacaggccagagtgttcagtgacgttgttttttgcgatacatacgacttcgtttcccctcaactcgagtgggagctccaccaaaactagaagaaaacggagtgccgccctagtggtggtgtatcttttgccatgcagagccttcttcgttcctctgaggcgcacgcacattctttgctcccctttccgccgctgacacgctcgtgctctctactgggcacttaatggaaaacgcaaaaccacccaccccacagaccctcaaaatactttaaaacgagtatctccactcgggtacagcacataaccaggccatcgaccctatatatttcccgatgtatcgcggaaaagaacacaatttcgagcatttgagtggagacacggtccgatggcccggtatttctgtgttcatattccggctttttggcgcagtgtggcgattgcaagtcgccatcgcaaccagccctctaagcgtttctctgggaagttgagcgcccgcgtccgttcgcttactgaaaaggggtcgacttctgaacggaacagcccgtggaaagcgcgcggacagacttaccgctgtgctagcgtttagggtaacacacggatgatggttgccatttgaattaactgcgagaggaagtaattcagatgcgagtgtgatcaggtccgtccccccctcgtacgtactatctctgaatccgtttcgcttatcccgaaaccgccaaccccgcctctgcatgtgcctgtttaggctcttcacagcgagacttggggtagcagtgaaaggggctcgaggcgcacgatccctttcctcgttttttttttcgtgcttcgcttccaacagaaaacactgtggcaggcgtagagaggtgatctctcgataccgtcgcagactgtgcatccactccaggacctgcgggaagctagccagagaaaagtgtgtgtctcagcaaggttcggagagcggcggggtggaaagaagcaacatgtagtgctctgggtcgccattcacttcgcgtggaaacgccctttgctttatcacaacgaaattctcccctcagcttgtcgttaagagtgcggctgtcttcatctcgtgcccccatccccctggtggtgccgtgtcgaagccaagacggcccggcgtttctgtgttgtttgcgatttcatttgattctgcgcggtgcaaaacggcctctcattgcgtttctaacgctcaaaaaagaggaagctgggagacttctttttctcccgcgaaactgcgtagaagttttttcgaggtcgttcgcacgagtgcgtctgccccacatgcccgcagcgtcttcccaagtctttcttccgcaaattccggtgctctcgcgagcttcacctttccccgagttcccgcgtcttgaaaacgcggacacgactctttatgcaggcgttgtgcctctccggtccctgctttccggccggttccccgtggcttgatatcgtgcaaacgccggacctgtaccgtttcgaggagctcgaatctccccggaaggaccgataaagaacacggctcacagacgccgcgtgcttgtcggagttggacatggtcaacttccgagattttcccaggtatcttattcggttcattgtgagtctcgtctgcaggacaactggatgaaacaacctttgttcttgtgggatgattccgtcctcagcactccgtgcttcgattctcggccgtcagctgctttgtcttcgagagagaagcggcctctgaagaccgcgcctgcttgcgctctctaaaatgtagcgtcgtctcctgtttcccttggcagccaagtcacacgcgccgacgcctgcgtgggtggccccgtctgcgtcgtcacacaggtccatgtgaagcgaaggtcacttcctgctccgaagaacgagggagaagacaatttacaaaattccccgcaaatcacgaaaccctgcca

SEQ ID NO: 1939 - DNA, 1823 bp, Toxoplasma gondii
  source 1..1823: mol_type = genomic DNA
agtcaacacagccctgtcagctgtatgcaagcttctttccatatgcacaaatacagacgcctggaagttggaaactattccgtaggcgtcttcactgagacgggttgccgcagccgtatctttcacctcccgtgctgctagaagcagcgcattttttaacaatgtcaatgaagagccaatccagctggcggccaccgctggcttttgtagagaggaaagacgtgaagtgggattcacgttcgagtgaccctctacacctgtgtctgctgatcactaaatcgccaccgttgtttcttttgagcctgcctcataatttcatacagagttagatatagggccttcatgcagaaggttagcaaatgagcaaacacaactatttgtctccccgtactgatctagccactacaaacacccaggtgcaccttaactcacccactttcatctgcagcagcagcagagaacaaacgcatcacctaaagcagcgaagtctaccacacttgctggacttttcccagttggttgcattttcttgatggtgtttctcctctgcattccctggcgctttcaccatcgcagacgaggagtgactgcgttcgtcagatcgcgagtcgagtaacaagcaccacactaagatacaggagaaccgcaaccgtacaccttccacttccggctgggcagctgaccaagtaggaagcactcctgccttctcccaatgtggaatagtggaactttgccctcatcagaatctgcaggtactggcaatcgctacagacagaacttgtttcgcaaaggtgacaacactgaaacgcctctcgctggtgcataggtgacgtcatccgtcgactgtgtttactacagcaaccagaaccgaatatcgagttctttttctggagctgtttgacgctccgtacagttttaggtgcctttccaagcttgcgtgtccacacaggcacacaaatagaatcgaacaaactgatacggtcttgtacgtacgagcctgaacgtgacagcgccgtaccttcacaggcacggcgggtgagtagtggcgtcaggggggaacttgagtgggaattcgttctttgaagagcagactgagtgactcttttggccacactgtctcttttgcaacctgagtgggcgactcaacgcgccaggaggtggacagaagccgcaaagaacgtcaatcgacgcaggcacgtggattagacacatgcatcgcgagccggaaagcgcttttctctagtcaactgcatgtgcccgtttcgcattgtttcgcaggagtgcgtctcgatagaaacccacagcttcttttaatctgcaggaaagagggaaaaggacgtttctgtggatcgacaagcgagaggaactttcccgctggtggggaacgcatctgcactcggcgtttctccagcttttatccgatttctcaacccccatatacggagggaacggggtttctcgcgggtgccgtatcgaactgtccttgcgccctttcgcgaagctaccacgcgtgtctgtttttgttttgtgccgttttctgtctgcatttgccggcgtttctcgaaatttctgacagccgctttcgcgatcaccaaagagcggaccgtattcgcgctcaactgcgcgtccgcgtcgttgactggtcttcttcagcacgacccgaagtctgtttcttttcctcgacggccgcgggaattgccgcgagcactggacctctcacattcgtgcaactgcgtcgaaaagccgaggcggaaggccgttcgcctcgtttcgacctgccgaggatctaggaacgttcccgctctttttcgcgctcctaaaaa

SEQ ID NO: 1940 - DNA, 3770 bp, Toxoplasma gondii
  source 1..3770: mol_type = genomic DNA
tgtcaagccacttgcgaagaagtagccatgaaaatgttgaaccagtacatccaggcagagaaggatgatgtacaggaacagaaggcactggcggctctacaccttagagccggacaagatttgtgcgtcagcggatctaatcttcagctagactccgacctgcttacagctgcgtgtggggacttactcgattctcggcaaataattaaaagtacctttcaacaggtaacgaaggagacatccacatggagtgccacccgctctcgcatcctcagcgatcctggatcccttgtattcagggttgctttttttttctggttgttacagaatgcacatacaaagcgacgtgctgattgggaagccgcttcacaacagccttcttggagagtctcgtttcactaaacgggaaggccacagacagaacggagttagcctgtatccccaacggcatcgatacatgcacagaaactcataaaacatgactactagatactcgctctcaacagtgagctttacatgaactcatcatgggaggaggcattcaaacatgaggctgcgtttcttttcgctcccccttttatacccacctctttcttctttcttccttcgtttttcatcttgctggccgctagggtcgcgtgtgcctggaacaatgcccggcgaaactcaaagcctgaagacgttcaccggaatggatgtgctgcgtttttggggaactgtgcagataagtgacgaaagcaacgaaccaaccgcagacacaaccaatgcgcgccgctcgtacttggctccaacaaaatctgttcagaatcgactacgctgtacacgaacgctaggagggttgaagtgagtagacgaaaaaccacgttatttcgctagcgcctttcaagtcacccttgtatccactgcttgagacgatctgtggtgcattcggaatcaattgcacacaagaccaaacaaaccgtaaagagttctaatattttgtgcacttctagaagtgcccctctgaccagagggaagggattgttctggggaacttgtcctgtttggtggacggcaaactagtgggcatttcgcagcaaccttagtagtgagcaaaaggagctgttctcaaacaaactgttcgtgtcagctaattgaactagtcaagtatcatgaatacagccagtagatgctctttcgacgtccatgaccgatgttacatttttgattatcttctctcccaggctgcgtagaaggccgctccggaacgactccggaaggcatccatggcgccgatgtgaattgtgcttacgtcgcacgacgccctacaatttgtagtgttccatatcactcctcgacgctgtgagaacctacgtacttcagtgtctgcgtttttcctatttcatgtataccggtctggatcgcatatcaaatacacgaacacaatgtccacctataacggggtctaacactacatggcctagcagtgatcttcatattccacccgtgatgcataggccatgtggcagtctcgacttacggaaaaaggaggcaagaactgaaagctttctatcaacgcagtgtaactttgattttggcactcggggatcctaatggagagtgtgcatggcgtgtgtgcttttgggcagaccgaaaacgctgaagacaaacagtcgaatcccattgctttcagtgagaagagagatgggaaaaccgagcacgaatgccactgcggatagggctgcagttgcaaaaaatgaaaacaaagaacagctcgcaaaactgcagcggagacaaagctttctccggaattctcgtcaagatcctaacaccgctctgaaaggacagtgcccattcgatatcgaacccgatgcggcagtaagcggtcacacaccaaaggtcgttttcgcagacagcctgtacagttcctcaagcaagaaatgtctgatatgcacatccgtcccatacatcaacaatgctgatgcattctgctgcacacttcagtgaaagtacatctactcagtttctgctccatacgagtttgccatgttaacctgcgttccctacaaagctcgactgatatgcataatagcaggaatctttgtacttccccgactctttttcttgtgccttaaacgacgctctgtatagtacatctctcgtcacctttgaagtcgacgaaaatataggaagcaccatagagcgtgaacgcatgcataagtgtgtttcaccgcttagcaccagctgttcgtttttccacgttatttgacactatggattcccaccttactgtagtaagcagggaaggatacaatatgcgttggcagctgctctcttgttgcagtgtcactgtctttgtggtatgtgcgaacgaccgtcacttctgcaacagattctcaatttggtgtttccttattgtcggaaaaccttgtgtggctactcaccatcaccgcattttgatgcgtgtttgtagattttccatggcttcaggataggcctctcatacaagcaaactatcattttcagaaattcgtcgcatttaggccggcggcttcgggttgaactcgctgctccaaacaaagacctccgtgtatctcctgtggtctacaagtcacttgcttcttcgtatggacagccaggtgtctccgcagaacacgaaagtaccctctcaatgaagggaaaagcctcttccactttcacctcagcccaccccacaggaaccattgccccgggactctctgctcaagtaagcaggttgtcgagcagagtcctacagaacacatattggagagttcgcaaacatattgttcttttgatttcatcaaaactcaaaacaggtgtagacaaatcggcagtgttaaacataaaccgagtaggtcaaagaatgtgcatacatgcttgaatggacaaacatgcacacatacctccttatttacgtacatcatacatgcacaccgatatccctgtttacataatcaaacatattgttgtctagaagcttgtctccttcacctaaaacgacgacttttacagcctgctttcctacacatgcttacatggattcaggtagaggttcggtttcagcctacatcttttgacgacattactacccatctactgttgcatacagatgtgggatccttcagcatagcggtgagcgaaataagataggagaccagccgaatcttcagcgcccgtttctgcgaaggtcgatgctggaatgttgtcactcacctgccggaagcttctggaatctgaatgagacagttatctcggaatgccgacacaatcctagtttgtgttttggacgggctgggtagcgcaagacagtttccgtttcacagttcccttcgcaatgaaacctgtactgcaagtttgggtcgagcgtctctcggccctccagcgtctctcgggtgtagcagtgtgatgtggctgccaggggaatgtcaccaacataggaacatatttcgcaagtcgcctccagcattggagacagcagatgacagaagtccccctaacttctgtccgactcgtcacaaacctgagaaagtcacaatgagtcctcaaagtcagtttccgttctaaacaatacagttttaagttctatcacgaacctctgacacaagatataaaccaactcgctcctgagtcacatccccgacaccaactcagaggcaatcagcgagtgaaaaatcctagaatgattgatgaagacgtgaagaaacctcgcgccgtagaacacgcttactcagcgtctttattgatttagtctctgtttccccccgagttca

SEQ ID NO: 1941 - DNA, 2773 bp, Toxoplasma gondii
  source 1..2773: mol_type = genomic DNA
cgacccagctcgtgcacacttcagggtcccggttcataaacctcaaggttatatttgtgggagacagcggaactcgagaccgttcagctgtcttcctcaatcttgcggtctgcgtatttgggcgatcgcaagatgcggcaccaaattttggaccttttttaatgattctactgcagggaaatgcgaagtcctcaaatgtggttttttcatgaatccccaatcgacacgatttttagcaacttgtaaacggcagcactggcacttcagtttaggctgctgcactgtctaaacgccttcgacggcagcagtgcgttacctcacggtcaacaaaaacgaatgatgaagtttatctacttctgtgccactgcattaaactatgagaggcgggaagaacgcttagtcaaaacacagcgttgtcagtgatgacttaacaagaggaacgacaatattcgatcgcatctccgtgatccgccatcggtgaccgccggaatggaagattctgtccacgcgtgaaatgatgcaaatattacgctatgtgcctgtctgcctagcaccaggtagaatctgtgacatttcggttatccgtgttacagcaataccgctcggttcgagagaacttgacgcacctacagccctgctgcgagcgcgactgtctcctacgcgctgcaaggcatgctggttcccacagactgttgcttttagttctccatagatagaaggactccggaaggtcccagtctgacgagtgtcggcaattcgtgactcttcgaaacttcttccactgtcgccaacttcgcttgcggcacggtccccgagagagtgtgaacctcgaccagaatccgtggaaccgagtgaaaactgtttcccgtaaatattttcccttttcaacattctttcggagtccgcacaaaaacgccaaaagtgaagatcctctgagagtaaatgcagcgtgcgccgctaagcaggtgtatgtacgctgggtccccgatgaaccaaattcaacagtcgttcgagcgctgcgtgcgcaggaaattcttctacaacgcggaacgaaaatctactgagtctgtcggaagaagactcctcggcaagagcttaactttgttgatgtggcgcctttatcccgtgagtcgggcaaatcagccgtccgcggattcgttcagaaaacctgccagcaccatacctgacacgcttcccacagtcgtggccgtcggcgggatgattcaagtctctactctgtggaagtggaaccaaagttttccatcctcgctccttagcgcagaatttccgcaaaattcgccgtccagaccgaggtcactaagtcgttgtctggtgaacgcgatgagggcgggcgcggctctcaaggcacaaagattcagcagcgcatgcttgaggtagacagatgaggcggccggatttttttccggttttcaggcaactgaactgagtcaggagataacacgtcgcatctgcaagggaccgtcgagtaaaaatcgtacccccgttgtgttcgttctgtggaaaacgcaggcgcggtcgcgctcccgcatgtgcatgcacgcggtactcgaaagaagggcaaagaaggtcccttctcctccctcagaagaaagaccgagctgccagccgagctcccctgtcgactttcatactttccgcttcggagacgacgaaggcacagtcttttgcagacgtcgctcacaccgtggttccgcgtcaacaaacttttctttctgtcttgcggagggaaagagatgaggttctcgtgagactggtccgaggttgccggctcgcgagaagaaccctgaggctaaagagaaccggacgtcgaaaaggagttttttctgggtccatccgtcgctcttttattgagtgaattggctcgggtcggcgagaattattagctgataaagcctccaaggagtgcctgccctccgaccccttttttctcggcttctgcgctttcgttaccttctctgctcggggcggtgccttccattgcctaggtatccgcagagtgcctgtgcagcagggcaagagtgcatttttgttctgtctcttcaaagtcattcccataattccttcctgccgtgtacatccgtctgccttcccttttcgagcgacgaagcccgctcttctcggcaaaggtgtcacctttcacaggagtgccaccgcacccgctgtgcggccaggtccaccatccgaaggcagttcgacgacgaggcacaccggcctggtgagagagtttcttgcgtgtttcttgctccccgttgtctaattcgtacccagcgaaggtgtcaggactcgaaagcaaggcgctctgaatcgcgctctcagtcgagcggcggtatcgcgacatccctccccggccgggtcgccttcacagatccctccggcgagtctcttcctctgagtgttcctccttgctctcttttttgcgcgaaaacgaggtcgaggatgggttttctctaggctttttcgtgtagtgtctcggaccccgttctgtactctccgtctgtcccatcgtctcttccttctccttgctctctcccagtcttcgctgcctgtcttctgtatccctgcagacacctcgatagcctcaccctgccactagcctcctagccacgatgctcgccgcgcctcttctgttcacggcttaggatttagctgcctccactcgcttttctggtctccttcccgggggtttccttctctgtcgttctctcctcgcgctttgttctcctctctctttgttcgctgctcttcgtcgaca

SEQ ID NO: 1942 - DNA, 2392 bp, Toxoplasma gondii
  source 1..2392: mol_type = genomic DNA
ctgcgagccgtcgcgagtccgatcccgaatttgcgtcacgaaatagtgatttttttttcttcgtcagtgaacaacgagaagcgcgctctggcgctcggggaaaatcaaaggtgtcttcaggtttgaagaagtcctgctgttcgagagctcagagagcggccagctctcgcggttgtccgcgtgccgcgcattcacgcagagttcggagacgaaaaacgagggggcaagacgccgagttgtctgtggcgccctcaaaggacgcgctcgcgccgtacttgtccatctcttgccacgaaagagcgactcttttgcgtctcgtactccggaatcgcgcattcgcaatacggagagagtctctgcgtccgcctccccgtcggatggacaccggaaacgtccttcgcgacttgtgactcttgcggggaatcggccagactgtttttcggagacgaaaacagctttctcggcatgcagagcgaacaaagcgttgtttcaaagtatttttctgccgcctacgcggggaggcacccttcatgcggagtatcgcacgcgtcgcctctgtctcaacgttgaaaacatgcgagccgcttcgaaaaacctcttcacttctcgaattaaccacaatgaatcctcgatgctgacgcgcagcttctcaggggaacatcttcctcagctcgcaagctgcagcctgaccaagtgctcccgaacacagggaatgatggttcactcaagcagacagaaattcaggagacagacccaacctaggacgagaatgaaaaaatacgaaattctagagagatataccgtaatgcagaaaatagagtacacattgaagagatacaacctatggcaggaacacagagggaattctgttggattcatgaggagagttcgagagacgaacccagcaaacgtggagtctatccttttcgacaacggaagctcaggagctgcacagggcagtgccccggcggaggacattgagccagggacttctgtatctacctgtgaagctaaggtgattaacactgatcctcctgttacaggagatccctactcgcaacagagctgtaaggtgatcgacggagactctgtcaaacaccgtctgtgcctcccgaaggagatccgatgtaacgaaacatgcaccaagatggcagaactggggattcccctgccacggagaacctgaacttctttacgcaaaacgcatctgtctgagcttctcagccttggagactttctcctgctgtatggaggtcggattcttctttttttgtgtcgattcttcatttcgtgtctctgcgccgcttcgcttcttccaatcagcaggcggggggcgtctggaggaacttttttttgtggcgcgtcttttcacgcatgttcgtcggttttgctcgcatttcttagatcgcattcctggtctcttctcccttttttggtgcactcgacatcaacgcgagtagccgtgtctgcattccaggagtgctggagtgtgtgtcggtcctccttttaccggggccccttgacgaaggcattttcacgaagtcgcagagaagcgcggtttattgaacagcattttccgtcgaggtgttcgttcaggtcggttcagcgaaggcatcccgctcaaactgtaaacaagcgagagaaaccaaccgaactcccgtcgaagtgcaagggctgcaggagcgcccgctgcatgcgtcgaagcgtcacagcgagcatgcgatgtctcgttgctggatgcatcgcaagctgaggagagacacgcgtttttccggcttcttggttttctcggagtttctttctacagcgtctccacctttctcgaagtcttcactaccgccctggcatgtctcttcagttggagaagagtgcctagtccctgcttcgtttttgctggagttgtgtgcagggaaatcgagggatcgccgtccctcggacgaggacaacccggagagaagatggacggcgcagctaaagcagggagttgtttttatccagaacccacgttctgctttggtttcgtagtgtcgcctgtctttgcgctagagaaacgacctggttttcgcgactccgcatcgaccggccgcgctgatcgtgccatgagcctgtcgctttctcgctgatttctcgtccccgagagaaaagcacgagatctctgacttcatcgggcgacactctctttgtttgcgttcttcgtctccggtcaggtttcctcgacttgcgcacagctgcgggggtatggtcgcccaggctctccgtctccgggcaactgccagaagccgcgtttctcccggacaaaagcactcttactctcttgcacaaattcttcgcctctgcgttctgacttgacacactcgtttctggaaagagttccgccgttcctcgcccataa

SEQ ID NO: 1943 - DNA, 4204 bp, Toxoplasma gondii
  source 1..4204: mol_type = genomic DNA
acgccgttctcgaggactcgcatagttgggtacaggaagtttaacgttttgcgcagtgtaacgctttgctctgcacaactgccttcaaatactggaagctcctccgctacacttccacacaaaaatgaagagagcagcgaaaaagtgtgtggtggttttaggcggaagcggcgtaacgaagtcactggcaagcgtaccttggaaaactctgcggggatctttctcttccagagtaagcaactctctggctgcagaacgaatcttagcaagggcgtactgcacgcgccacacctctcgcttgttcttcagaccgtactcgcccaggagtttcatttcctggtccaagcgttcctggagagagggaggaaagagagcagacaaacccgcacgaatgggccttttgcacacgcaacgcaacgacttcctgcacaagagggtagatccaaggaggggcgcgctcgcaaacacgccacctcagaggtacagcacaagtttggacggtagagtcatttgctagcactacggggcacgaggacttataagggaaccagcagatacatgcaggtccaaagactgcaaacagtcaaacaaatgcaggcacagaagcccaaaacacgcgccgagtcccagaaaaatatttgaaaacccagacgctccagctcacggaggaacgcagctgaagcgctcagtggcggaggtgcctaacaacagcctccacaatcgccctgaacaatgccagatgcccccagtactccacagccagcagtgacacgcgcgtaagcatgggtgtcccgaaaaaggcacaaaaacgcacgaacatctcccaaattgttgaaggcatagttccacacaaattcccagctgcgcggcgcggccagcacatgcaaaccttcccataatgcgtagttgacgcgaaaccgggggcaaatgcaggtccgcttcatcgtaggactctccatcgaactgccgccctttgaactgacgaattgtaggggaaacgcagaatctagaattccaaattaggtcttgaaaggactccaccccacagggctcttcgaggggtggcccggcagaaaagcaaggaacggggagccaatgcagtaattgtgctagtgtttaccttttcaaagggacgcttgggactgcgagcagtcttgctatacgtacggtaggacttcgtcatgatgccgagggaggtctacaaaagagagaaaattgccccttcttcccaaaataaagaagtccacacaacgcacaagaaatcgttccctccgccaactgctgccgtaggggacaactgggtgtctcccatccgcgcgcgagtcggcatggtgtttgcgactgcatgccgccaccactgaagccgaaaattctccggtttccccgtcagtcttggtaggtgtccttgtctccccatcgcgaagcggggccgtctcgattataagacgaatgtacctcgtattttacagggtagccgtgtcgcaaaaacgaaaagagtgtgtcttcgaatgctgttttctgcgcgaattcgctaccgctctcgcgtgagcatggaaggactatgtgaccgaatacaaaaagcttacagaaatctctcgacgttatatagcgcgaccgagtcgttcatgcctagaggttgctgactgatccgactatgtgtaagaagtcggccgacaatgaaatggagaacttccactgtctgtgaatccgttgcgagcaacatcatgggaataacggagtaaaccgtggagtcgtcaaccagattttctgctaacgtatctgcccggcaccatctcgactcttgtgaacgaatcaagagggtggggagctcattgtgtagttgtagacagcttgcttgtgcaaactcgtgcccacaaccgagtagctacagcccccgcttacgtcagcgtcagtgagaccacgcctacgccgtaggaagttagtgagagatgtggtggcgctacccctttttgttgtggacggaagcttgaagacctgcagcgcgtgcacacaaagcgtgcatttatggcttttctggcaactagaagggtcaattagtagcaaacacgtgaaccagcatctctttgcgggaagagtgtagaggaaatataccgggaacgggtcaacgggtttccggggaagggtattcgagcaattcctgctgttatgatcacgagggtccttcctttggcgtatgtgtaacgcgacggtacgatgttatgtgaacgcaagcagggacagggtgcgctagttttgcgtctaccgagaaatttttgtttcgccacggatattgccaggtgaacttctgggctcacataggtcccagcatcgcaccagatgcagaaaattgggtaggggacgcgccagtctggcgtcacaacccatctggatgagttgaacacgtgaacccgcctgcttcctcaaaagactcagaccttccatcatacttatataagggaccccattgtctctcaggcagttgtttgcatacgaatatttgagaacggcatcctaaacgtcttttccatgcgcacttcttcagcggtgttttcacaccacagtttttactttggtgaatggtcgactagaagcggtgccgctagactggttctctctttgttaagaaccgacaattcccgacatgctgaacggtgacacgctgagtgggacaggggtgcggaatcgggcaacagcaaaagagttgttctttgtttcaagcggtaacagcccgaactattggggatacagacgcatcccgtgccgatgcttgccagaacgttttaccaatgttttagcgtgactattgcccatcctccaacttaaacaaacgggagaatgtgcgaatcacgtgtcatctccagtgcaatgtagtattccctgtttattgaagaatcacggcgttgggagtcgccagacgaccttctgccactgagaagactacagacatgcgcggcgataacgccactgtcgacgcttgcttgaaatgcgtggttgactagacggaattggaatgtgttgggtgtatagaagacaaggactaaatgtacagctattgaacgacgaacttctatttaagggtctcagttttcctcgacgctatggcatcgtatcgaatgagctgcctcccacaatcaagattatagcgaaagcaacttgcgagttaatgaaaccagatcatctcttcgcgtaaagctgtggcgttgttttgactggcatacagatgccagcgggcatccattgaactcgtggcttaatatttgaggcctacgcttgggtgcaagtcacctgtggtttttcaggtcgtctagactccttaatacttcttgcttgtgggcgtctctaccgttgcttcttatactgtggatgctctttggtgccgtctcgtaaagagaggcaaacaattcacgttgcaaaacacgctagggaacaaatttttgaccgcgaggggacaaaatgacgaaagaaattgtctgttttactgtctatggcactcctttttcgtgacctcattctttcgcttccttcatgagtgcgttggcactcctttcttggccagtgactctactattgttcatctagtacagcgtactataggagatatatgcagccattttggtattttcagattccgaagagaaagacaacaatgcttgccagtttccccaacgggacggaaaacgcggtaaacaaaaaaaacatacgagtcctagactagcaccgacaggaccgccagtgtatcgccccggttctgttagaagcgtctctgtctctcccaaattggggcctcgtgggggctgagcaatgtttcctagcagcgttcatggactggactctgagtgaaaacaaacattggtggggcgagacacagaacggttggtaatcacgctgtcaagcgagaaaggagacgtcgtacggaaatgggctaggagcaaagccgttcccgctacaccccagcgacgggtccctcttcccgttggccatttcttggacggaagtcaaaagtttcaggaggatcggaagggatgaaatcgaaagaactgtgcactgacgtgtgaatgctttccctctctccccggagaatggcctccgggcccctcctcgcgaagtcgcccgctagccttgccggatgcacccaggaagcggacgttctgtgcggcgcccgccgattcctcctaagttcgtctgctgacgcagtatggcaaga

SEQ ID NO: 1944 - DNA, 2270 bp, Toxoplasma gondii
  source 1..2270: mol_type = genomic DNA
tctcgaaactgagttcaagcgtctcgacactgcaagggtgaggcgtctgggggcctcttccctctcgagctccgtccttgcgcgacctaccgtgtcgcgttttttgcccgcgagttgcgtctcctcgctctgcctgcgctgcgcggagcagccggcggcggcgtcgcacctccttttcgacgttcccgactccctcgtcttctcctgctccctcggcttttccttcgctctcttcgtcgccttcacacccgtccaagatcttctcgccgacgcggtctcgtcttctcccgcgatgcagcaaactgagctcctgtgaaaacccctctgcgcggtcatcccaaaaggaagacgattctccccgagacgacgaagaacgagaagaagaggaagaaggagatgaaggagacaggttttgtgttcgggtggctctggtcagtggagcagcagcctctgttttctcgacttccgcgacgaggtcgttgaaagactccgagagcagattctcctccagacgctcccgctgtctgcgtgtggaccgagaggcgaaccggcgacagaagaagaaaacgggtgaagcagcgaagactcgcgaggcgggagaagcaggggaggcagctggcgaggaacgcgacgacgcgacggaaggcgacagagactccgacagagaaggacagcggacagaggaagccgagacagacggaggcgaagagacagtggacgacggaaacacagacaaggagcgaggagaggagacagaaggggagaggagaacgcgccaagaggatggaggaagagcgtgaggcaaggacgagcgagacgacgaagcggtcctttcgaaagaggaacggttcctgctcatagacctgtcgaggtcagatgaggaactgtgaggcacagaaggcagaaaccacaacagagaagaaaacgaggaaacgtccagtgaagaggagacataaaggaacttcgttcgtctctggaatgaagacagagacgcgagacccccagaggcagagcctgaagttttctgtgcgctgctcgggagcgatcctgcgtatctcagcgccattgcgatcttttcgttctgtatattggggagatcttgcctcttgacttcgcttctgtttcagcactggagtctcttccggccagaggccgagccgtcgaggcgcagagagaggaaacagatgcgagagaaacaacggagaagacagacgccaggaggagggcaacagaaactgaggaaaacgaggaactcgatggaaaagcgaaagagcaacggagacggaaggctgcatgagtcgcaaaaacgcagcgagggaaaagccacgacacccgagacagaagccaagaaacagtcgcatgcagagccggagagacgaagacagtcgcagcgaggcggctagggaaacagagagagagggaaagagagaaggaaaaacggtgagaaaaaagagtaagagagagaaagcgagaaaaagcgagagaaacagagagaaagagacagaaagcgagagaaggagagaagaactcagcagattctgctgcacaaaaaaagagcgcgaagaaggctgtttgtagtggaatacagtgtgcacagaaaagatggggaatgtctctcttctcttttctcctggatcttaaaggcgggactttctcgctgaaacgctaaaaacgctccagttgaaacacccgcgcgcatgcagtttcgtttgcatgtgtacatacactctggcgacgccagcgcctcggtgacgacaggcgcttctttttttttgtccacggtactgttttccttttccccgctctttctgccggagagaaagctggcattgttctccttctctctcgtcttctgttcgtttctctcacgcagctctctctggctgacatccgtcttcgcttctcttgtcgccgctgcgctgtgccgcttcttgtcttttctcttgtccccgttttcgctccattccttttcttctcgcgcgaggcctcctgcttgcctcgacggaagcgcgcctccgaagcaaggatactggtgcgtcggtggcttcctcgcttcttctcgccgttcgttcccgaaggcgacagcgccagacaccgtcatttcgtctgcccttcctcgatggaaggacacaaacctgcggatgtgtaattatgactgtttcgcggagcgcatgcagaggttctgtgtgcttgcatctgcacagacatccagggaggcaagacgctcttccgttcgtctccacgacctccaggcgagggcagagcagcca

SEQ ID NO: 1945 - DNA, 2396 bp, Toxoplasma gondii
  source 1..2396: mol_type = genomic DNA
acgaagtagttcagctccgatacgtttccgtaggcagtgaggacgtcgtggagcatatgtgcgtattcgtcttctttctctttctcctctcctccgcgtggagagtctggcgtccggccgccgtcccacagtgtctcccgcgtttcagcgtctgcggcgtcaagcacgccgccaacgggtaccgttcgatacgctctggatctgaagcaaaagtgtgcccactcggggaccgaagtgtgcgagagaagaggggcaccgtccaccatgacgctcaggtcttccggtgactgtacggcggagacagccggcgggagaacagcgtttgtctctccctcgcttctcgcctccatcgccacgatgcagttcagcggacagtccgagctgcgataaagggaatgaccaaaaggactcgtttcgaccaggaaaagagcccagtttggaacaggggtccttcgatatcttgggtggaacacagagagctgaaacgcggtttgtaggagcgtcgcacttggagtgccgacgagaacagcgcaaacgggtgttgctccacccgacgttcgcgggaagaaggtgcactggagagaggaagaaacgacagggtcatggggacggaaggaaagagatgcttcagcatcctctgtccggtgcgcgcatccttctgcattcgcctctgcgaatgcactttagagctggagagggtccgccgtctggatgctgcctctgtctcgaggctcggcagggtgtcacgacagagcgagcgcatgcagcttccgctagcctcctctcttccgtcgcatgtgcgtggaacgagggacgaaggaagcggcagtgcgagaagcaagaacaagcctcgggaggaagcgccgaccgagagcacactccacttcttttgaagagccaggacgtcgtccacctgaagagcaagtacccttgcctcaaggcggacgcgcctacaccccgttgtcttgtttttcgaatctctgtgtgcaaggcaaggcgatctcgaaacagacgtgacgaggtgagcgtttcggagtgagcggaaaggccggaaggcgagacggaaatcgacagcgacgcggatgtctacatcggaaggagacagggcgacagccgacacaagcgacacactcgggacgtttcttccctgtcagattccacaaagcgaacgcaggacagcgccgaggaagctccgctctccgctttaagtgactgacgctccgattgaagacatgtcctcactctccagcctcgttctcggcatgcaccgggtgtgtctagacacccgagccgcagctggcgcggccgacgctctcgaaacggcgcgctgagcagccagctcgagtgcatgcactgccaagaagagagacctctcacctttcttcggaaaaagagtcgcacaagtcacatcagctcacgaagtgcggcaaagtcgagaacaaagtggaagcgaaccgccaaaagcagtcggagagagggcgcaacgagacaggcagagaagtatccgctcgcccagcgcgcatgcgcgaggtcgacctttcctgctcaaaaagtcgcgatacgccgctgtctccagagggtgaggcaccatcgagcagccttgcacgtcgccgacttgcgtgatttctctcgattcattcagtgttgcgtgtctcgatcttcaaaaacgcgcagactccacacagacgtgaaaacaagctaacaacagcctgttttcgtagacttccagtgcatgcattccggttgagcgaggtgtatgtacacctcacaaggcctgaggaggtccgaattgcgatgagcgcaggaccggctcttctcacttccacgcgctgtgtcgcacccctttcttgagttttttgaatttctttgacggacgtttcctctcaaccgtttttcttctcccgaggaaatctctttacgtctctgtttttctgccgcaaacgactctgcgtctcctgatctcctgaatcccccccaaagctggagttgcatgcgtttttcctcggactgctgagcggtcgttttccgcagtttcttcttttccaaagtctacactcctcatcgtttgtctgaaagaactttttgacgcgaaaaaatgcgtcgctagcctcggcgcctctcgttgtggtgtatcttctcgcgatctgcgggtcggcatgtttccgcgctcttggaagaaaggcaatcgaagctgagtttttaggaattccattattcttctctcccgtttttttcgttccgtctctcctctgcagaatccgttgtctggtctttctccgtcttttttcgctcgaccctttctgtgttcaacgcgttaggaaccttcctccgttgcttttttcggccctcctcttccctcttctacgctctccactcacctcacttcacagacaaaa

SEQ ID NO: 1946 - DNA, 2893 bp, Toxoplasma gondii
  source 1..2893: mol_type = genomic DNA
aacaaccgtgccaaaagctcaaacgcgagcaggagcttaattgctgcagcttgtggcacaccacgacgtcggtactttgcagacagttctgtcattgcagctgggtcagtgtataagaacgatgcgacggcgagtccaagttcgcctgtatctcttaattcggggcaaggccctttggcggcactccccagtaaccgcgcgtagaacaaaaagtcgtatggcggattaggcagtataacggggaagacattgccatccccagcatttacttcaaagctgtggaagacagatgatagcttcccgctttgtacccaacgatctatctgttgaacgcaatggtcgaagacctcgtcccgttctcctcggcaggctcttctagcatccattacccgtgggagtagtcgcagtttctcgaggcagctgcctaccttaagacgagctctatctgattcgcctagacgctgctgaagctgcagaagtgctgcgtccagatcactggtttctgaacttacatcaactggttgttcgtcaactggatacactccactttgctcctccgttgagggctcgtttgcctccctcaaacttctcactgcgctgtccaacatgttgctaagcctctgttgagcttgccagtagtcttcctctggtacctgctgctgtatctgtgcaagagttcccacttcgagccgcggccgctcacgctgaggcgtctcagctccggctgttagtctcttctgtccacccgtagcatcgtgtggctggggaaaagcttgaaatttgttctccacctgtgataccttgttttcgttgaaaacggtgtcaggggtgtcagcatagccagcgataacgcgctcaaagcgggttggcctgcgttgcgagcctatgccattttggactcccaaagctgcaacagcgtaatttgccacaaccaagcaactcaagaagtgccaaatcctggtcactctataaagatagggtgtcggcatttttgtgtcgactacacagagctaccacaaacgatcgatactggaaggactgatgactgtctcaaatcaccacaataaccctcaagccaaattcagcacggcgggattttgaactgcactaaagaaaagaaaaattgaccacatatattgacactgcgcagaggtgaaacatgcagaatcaagctgtcacagccgaactacctcctactggccacctttgacagatactctgtggcgtgtctgattcaacaaggtgttctgctcgttcgcccaaccaattgtgggggcatgtcgaaaaagaacgtggaagagcaccactgattaatgcacgcaaatgacaatatatcctggttcttttccggggaatatcggaaaatgattttgaaataggatgccggtcctatcatgcgacaccgcgtcgtcttgggatttttcagcctgagactagcgaaagtggtactcacgtgagacaagacaaggaccatgggcctcggcccggctagccgcccggtgtggtggcccagtgctgcagacgtcgtttgatgcttgttcaaggcaaatctttcagctgtcgcaaatagaacgggagctggcagccatcatgcatcagcaaagaagatgcagcggcaagcgttcgtccgacacgcacgcatgcctatagttcattcatttcttgtggacttgtcgctgagccaacaacttaccgtgtccacatctgttcctccactgttggtgtttgttcacggggcactcgcagtgccattgttggacgtcgaggtggtgaacgcgctgtgacgctcatcttacagaagggcattaccgtcaagggccgctcagggttctgtgattgaggtaggggtgatttcgatagattcctcacaatgcactgggtagcgggaagcttcccagcggcaactgaaaacgtagacaacgcgtaagttactgttgtggtacctgtagtccgactagcagcagcagaggagcactccgcggttcggcagaatatgacactcgtgactcatcagtggtggagctttcgttttgacgtcgcctgcgatattgtacttctctttggtctactgacatatcctatatcgatgtttcagttcccgttgcaacgtctcgggcggtctcctctacccacccacgcagagtgtgtctctcttcttccgcgctcggatggattggtaagtgtagtgtcactggctaacacaactggcgtcacagtttgtgtcttaagcgctggcaatcaaaagtatgctaagcacactttctggagcccagcacccaagcagcatatttctcgcgatgaagtatatctgagaaatgcacactttgcgcgagttccgactatagcaacacttttccgatgggacaccacccctgactcagagaatgttatgcagctcagatctggaatctggcggcaatccgagaagcgatttgaggtgagtcaacagacggaaaactcactgtggtggttgttctacagtctgttttccgccacggcatctcgggggcagcatccgctgcggtcgttaactgtttgtctcgagtctctgctgttcttccttccccagacttcttttggctaagcccttttgatcaccacacaccatttggaattgatcgaaactgagaaatccactcattccaacaaaagttatgggagatcctgctcactatatcttgaaactaacgatgctctcacgatgctacccagcgcctttggtatcacgattatcgtatcttccgggttgttgcatatcagcgacgcataagctgaagaaggttgctctgcacctcacatgagctgtgtggcctgctacccatttcttcttcgactcgtcgacggaaacagagaggcgacaccgcttctcgccactcagcactgcaatctgaga

SEQ ID NO: 1947 - DNA, 1720 bp, Toxoplasma gondii
  source 1..1720: mol_type = genomic DNA
tagcaaaggagaacattacggcaccgcattctcgtggccaaagccgtggaaggcgacttgccgtacggcagagcagtctgcccttgtcgcaccgaaggggctgcatgcgtcgagggagcctcacctgcagcaggggtcctttctgcggtcctcggtgaagtcagttcctgctcaggggaaatgtccttggattccgccgcgcgttgttgcggcttctcgcggttctcaaaagccttagacggtccagaaaaagagctgttgtcgacatgtaccgccagacgaattttacccgagagatccacgtcggtctccgcacagggtggcttctcgcatctggagcgctcgcattcctctccgcttgattctccagccccagtcccgtcatgcgaaacgaaagaagctgccgggtcgaatttgaagctcggtcgtagaatcgggggacgcaccggctcttctctgagaacctgcttcgttgccaggtgtagagcgaggtcaggatggtagcctccatcgtgtgataaggggtaaaggggatttaatggcaaccgcacgtcgccggcagaagacaagccacttgaagtatttgagagtcggcacccgcccagtgacggtgttgacatctgtgctgctctgttcgagtcacctgcagtcctggagtcctcgggagaaaaccttttcgcggtgcgtgaggaaaacgaagagtgaggtccaccaggacctaaatgggaagagagaggcatttttcgcattgctggtcgccttatgggttcttggaaacaggtgagatgagtcacggaccgacgacggcgacacctcgctgtcgcgtgccgtgctcgcgaacgggggcaaaccgaggtgagtagacacgagtggttgcagcggcaaaaggcaagtgagtgaaagtaaagttgatccgacagcgaaacggtcgaagtctagctgcttggatgcaagtttaggtttcagtggtgagagtggagagagacgagtcagaaaaaagagtttgccatcgatcacaaaaaagggaggaaccaacatgtaaaaaccgggaagagcgacgcaggtccttcgtaactaatgcgagggccgggagtggaggccggaacgcgtaccccttagtataggtgaagacactgagtgactgagcgtttaatgaggaaagactgttttgctggtagatggtagcgaggacaccgcgtttactcctcaaaaagtaagcgtgcccacaagaggacccggttggttttcaccggacgtgaaggctaaatgttggtcaaaccagctcggcctctgaagagagctttcgggaaagtcagtgctggttcatgaagtccactttcactgtgcgctggaaagcagtggtctgcgaagaaccaccgcaggactgtttaagaaagactccgttcaccggttcaaatgcagaggaaggggcccaaccgacaggaagatagtagattggcccgaatcctttggtccacagaaaataacgccggagtacatggacagactcaaaaagcgaaaaataaccgagttgcgagacaaaagaaaaagccgtaatctgttcaatccggcactctctttgtcttgtcgcatccgcgtgcggttgccaactacccagcggcagctgaggcggtcccagccatacaaacggaataccgatacaagcgggattcgttttcagcccgtttttcgatggatgctattccgtagagccaaagaa

SEQ ID NO: 1948 - DNA, 5010 bp, Toxoplasma gondii
  source 1..5010: mol_type = genomic DNA
ccgcgagctgctgcagattggcggtagtctgatcagaagatccgaactgagaatctacagcgctgtcgcttctgttcggggcgtggagaggcacgcgtctcgcgccttggtctgtctgtccaggtggagcatcaaggtgttgagcccgcgccccacacaaggacgcttcttcggtagactcgaaagaaattagctgaagcgaggatggcgagtctgctggggacacggcaaccaactggttggacgaatttgtcgcgaagcgtgagctttcagtctgcgactcgctaggacggtccgtctgtgccgaggcaacgtctagacgctctccatttaaaggtgcaactcctggagccgcatctcgacccggattgttcacctcgccttgtcttccactgctgacgggtccttccggctctctcgcgtagattcggtcttttcgactggcgacagaggggagcgggacagccgcagtaggtgtcacggcagctggtgtggaggaatcagctgtagttgtcaacgagacgaattcatcgcccggcagggggcgtgcgcttttgcctggagtcgacgatttcagtttcacatctggagatgaaggatgaagactgcctggagttccctcgcttgtttgatggagaggcgcagagcgtccgttgggatttcccacggcaaggtcgggaggcggaccatggggggctccttggacataatcattgactcccgccatcgaaaagatatcgaggaacgcacgtgatagtttacagtacggctggaacttgcttcggcatgcatgtgtaagcacggaatatgtctgtcctcttcctgttcgctgctggcacgtggcttgcacgcaggggccgctgaccggcaaattccggtaggcacgggtagtcgaatagttcgcttcagccagctgttacgaagtactgactgcacgcatagagaatggagacgacctttgttgcgtgatacgtgaacagctttgaaaaaagaggcagacaccgccagtcgcttgttcaagtccgacaccaaatctagagactgccacacggtgattcacagtaccaccgaccaggcggaaacgtctacgccagcagagtccttgagacttcagccaactgatggaaaagtccaattgcccgggaaaaggtaggaagacgaagaacgagtgaacttcgtgaccatacggccctgttgaagaggcgtctttggcggatcctgaatgacgaggtgttgaggccgccgacgcaaaaaacgaaaccgacaggcatacggccacagccgactttcaacagttgagcacgttaccgtacattgaaaagacatgggaagtgacattctaaaaaattcgctttctgtactgtcaactttcaaacatgcttgaaaaaacgagacgatgtgtccaagcgaacatggggggcgccgacgaaaaggagaccccagcgctggaagactccggggcaggaccaaccattctgaatttgcgccctacggagtgtcacttttctgtataatccgctggtgtttgtagcccaactttctacctggtagcttggtagcaggttacacgtttctctggagacagcaacggcgtccagggtagatttgctcgcagaagggattgtggccagctaccgtccgtcgctcggtgtgaaagatcgagccgttactagacaaattcgatctgccaaaatagtctcggttccgtgctgactttgacatttcgggtaagaagttagacaagaacaatatgagtaacaacatataaatgcaacatacgttgattccaacctttgggatccaactgggcgatactagtgcctctctgggcggcggagcagtcttttgcctgtcttgagagcaagccgtccaaattcattttaccgccaaaatattggacaacattgcgggaagcagatgtgctcgtgttcgtctttcacggactgcacccttctctaagttaaaggaatttggtaacagctgtctgtaactctctatttcaaagcaatttcaatcccatggtccggccctaagtggccgggacgaacgatccacagatagctcctggaggtttaacaaacgcgaaaggaccattccctcgatattaaataaaacacatcggtgccaagcgggacatggatgaggagtgagaaaggcctctctttcgataccgtggctgaagccccttacactgtttcttaccgcagtagaacggggtactgagttctccgtgaggcggttgctcctgtctttgttttggtggcagtgtattctatatagtgcgttaataggcaggatattgcttaccctatcaagagtactcttctcagattaccgcaatcttaggaaacagtcttgtacgtgcatgctgcatacggtgttgggagcgctccacacttttacagctccctctaaaattgagatccgcggcaaccacaaggcacacctgcgggcggcacttgtgaaaatcgactgaaaaagcactagaacatctagcagtctagaacgtgcccaacagccgctgttctgaagcatcggtgcagttgatccttcatgggcggtgttggcttcaaagaaccgcacacttgcaaacgcttctcatggctgtaacaatggctcggagtggcatctgttcgcgtgtgacattcgtatcgtatgaacaatttctaccaaaagtctgtcattgaagacgcctcttctctcctaggaaaatacttttgtacaccggtgtaatggtaagggcagttttacgtgatatcgcgcagggatgaagatgtatgcaatggaagaaatcctccgtccaggcttgagctcacaacacggcagaagtggaatttcgcggccatgcgcttctgaccgtaagccaggtgttgcgttgccaccacaaaacggtggcctaatcttacatgtacaagagctacagcacattcgcctagaaaggcagcatatggtttgaacgttcatcgttcaccagatatcatttcttgaataggctgcgcgttagctttttcttatgttttgtcctccgtgcgcggaagatctggctcccactgtatatgcttcgtgaatggccgatgtctgttgtcgaagtgccgatacgcgcgtgttcttccctctagatagctctgcgtcatcctaaaccgttaccatagttgtagttgcgcatgaagaaacataaagaacagtagcgttggatgcaattcagattagagtcagcagaacgtcttcggaactgagcatacgacccatgaaaatcaggaatcagcatatggggcacttataaacaagaggacctatttgaatatataccgtcgtacttacaataactggacaaaagaaatgccgaagaaatccgccagcggaagctggctgaggtggccaagcacctcttgaagatacaggcagttttcccacgccgggactcgaacccgggtcgcccgggtgaaagccgggtatcctaaccacctagactacatgggattgcaagtttcctggtgacagtcacagcgccaaacactcggtttcaggccctttacaaatgtcaaatgcagaagacagtggttggcggcgctcgcgaacattgcacgatgtcgccgatcaccacctcgtgcagttgtttctcctggatgtgtaacgattagtcacaaagacaaaaccattaatcacgaaagcgaaaaagcttcagaccggaagaagcaacacctcgataactggatttctgcgacagcaggaattcgtctttccggcctgcaacgtttccggcttcgtgattaatggttttgtctttgtgactaatcgttacacatccaggagaaacaactgcacgaggtggtgatcggcgacatcgggcaatgttctcgagcgccaccaaccactgtcttgtgcatttgacatgtgcaaagggcctgaaatcgagtgtttggcgctgtgactgtcaccagggaactcgcaatcctatgcagtctctgtggtgaggacacgcagctttcacctgggcgaaccgggttcgagtcctcgcgtgggacagctcttcaaactagtatctaatctccgcgtctgtcgcgagcaggaatgttatcttctcagacggcgacgaggcactcatctgggtgagcgagtcaccacgtggccccccaatgtagctgagagtcttcgttcttggtaccatttaacatttacgtgtaaattgcacgctggacggtgtcgatcggagttggtgagggatacaaacaggataagtggcaacgcccaatttataataacctactctaacatacactctggacgtagaaccttagcgctctatcgagcagccttcttgtgcgtaggtgtggtcgttcaccgtgtagatcgcggtcaagcacaccgcggactgacctcatatccctggccacctaccgacacttgctaaatacgaagaaggcaaaatcaggtgacggctcacacgctggagacactcagccctgttcgtgtatataagttttacgacagcaatgtcaccgttgtaaccttcagctagttgccgaatggtggcaacgagcccatgttacattgcggtttgagctagggttctacatattgtggttcagaacacaacaactgttttgggcatgaatgaccacatgcagcggatctacgaggccgtttaactcgcagcttgaatttcatttataaccatccgtatgcatgttccaccggactacgcgtcggttggtcaagaagagagtactatcgctccctgcaagtcaatcatggagcgctttagcattgtagcagatggagaaatagttgtaacttgagtttttcatccgacaaagcattgtgcaaccagccggtaccccgtggccaattctcacatcagcgttttccacattgatggatttctattataccgtggagttccgagtaaacttcactcattgcaggaaagagggaacagctcacacacagaaaaatctagcatgaaaatcctctaccaaacaagcagttacgactgcgaaaagggcgcat

SEQ ID NO: 1949 - DNA, 3505 bp, Toxoplasma gondii
  source 1..3505: mol_type = genomic DNA
ctagccgtaatcgtgtgacccttttctgggagcgggagaacgaatagtggaagtggaggttcctggaattgtgtcgtttttttagaccccccgtgatgtgggcgatacgatgtaggcaagccttatgtccgcctgcagctggaaaagaggctttctgaatcttgtaaacctcggttatgactgaagtgccgtgctagatggtatcggatttatgtggtggcaagcggaattccacgaaggcgtgtacgcgacacacatagcatttctggtgtaactgcctcgacggactctattcctagttggagaggaggaaacagacatagacgttcagcagtggtgagatcgcagcaagtgatgggacgtatggtaaagtgttttttcccttttcgaaatagactgccttcttttcacacaattggtaatagtgtaggggcgtatgcgacagcagcgctcattatttgtgtttgtgttttccgcggtcaccgtgtattttattggtctggttcacgtgccacaagactcagtctcagtcttctctcgtacgatgacatacgggaaaaagtgtcatggtatcgttctgcatccgatggtgtcagagctttcactcaacgaccaacactgcagccattgcaaaaccaattctctgtctgggcagttgttacttcaatttatggaacaaaatgtgttaagacaccgccgttggggtgcttcctcaaaaaagcgtgtcgcagcagctctgcagcgttatcgaggaagacagtggacgcccaacacgttatttccggcgaaatcctggattccgcttagagacacacgagagacccaatagctgctcgcgtggtagtcgtgtttgagacaccaatttcgatttttttcttttgactggagtgataccaaaggatgtcatcaaacgtggaggcaacgaaatctagtttgcgtcagcattcgcttacggctgatggaaacgctttggcgtagaaaccaaatacaacagcaacggacatacaatagattgtgtatcgtatgttcaacttggaaacagtgaaatgcatacttttgggtgggctacagctttgagcggcgctcgtcgggcctgcattcggtgcggggctccgggttgtctatatgggttcactgggtcggagaagctccaggtgcacacgtggttggtaacgtcagaacaggatcacttccacgaagaggccttaatattttgcgatagcactggcttgacgcgacggggataaaattagctttgaggataccgatgagaactaccaacaacccgacggcattcgtgacgagtcactaatacatcgagtgagttagatttgggttctggagaaaaaccacacgaatgagcgagtcgtcttgcgcatgatacggtagaatccaagtgtggaatcccgtgcttccagccccccgttgctgggagcaggcccagtgcggaggcgtttactggttgctgcggcgcagtccacgacggcaatgctctccctgtctgacccactgatatgaactgttcatcttaggttgcctactgtatgccctagttggcatgttgtcgagaggctccgttttggcagtgcatagtgaaggcgaaatgatgtaatgccgacctcgatgtttcatagggaaacagcaccaggagcactcactgtttcgtctggcatgcatggactgccattttagactgcgagcgattcgcgcccgatccgcgcgacgggctgctatcggtaaactaacttccgcgtactcggatgtctccaccatccggcagcatcgggcacagaggatgctttaattggaccgccggttgatttttgacgtgaggcatcgcgatacagttaacccaaatgaagaaacttgaggaaactaaaatggtttgttcaaccgatggcctgtgggtcagaacctcatcgccgatcgagactcacaatcgaacctacgtgcattcgaggatatggaactacctcctgttgtgcacatgcggagacatgtacaaacttcgatgatggtctagagcgtgatgttgtgctcagttgttattcttggggagagggtgctatgggtagcgagtccctctagggaactgacacccgattgacgttggtctaaggcttccgtgagagcagcccgtagccgaagtcagcggacgatgggggacttaagtcaatgtactctgttcgacagttgtgtcccgctgacgaactttaggagtacgtcatagcgtcccaagttccccgcctgctacccgggctccacagagcgaagaagaagtaacattgaccattttgattcccccgaaatatcgtccccacactatcgaaaggaatgaacgacagcgtgtcctgaccaacaaaccagcttcggcctcttccttacaacaattgcagaattgtgggacggaggtcctgcaagagcatctaatcaggaacacaggcaatatgtccgtttctccaacaaatgccaacagtcacgaacttgccatgagacgacgcgccatggtgacggttcggtgtgctgcgtggtgtaacggggtcgcaagagccgcgtctccggagcatgcgccgttcgttttttcagcgtgttgactcctagacaagcactgtttcattttcttcgtacccacaagaaccgtttctttgattatgcacgtgagaggaagtacagtcgcttttttgcagcgagttcatctgcagtgcaacgtgagttttcagtgcacccgtttgtgtgtgatgagattcgtccactagggacagcgcgggcggcggcgtggaagcgctttgctgctgttcactacttcgcgaggacggtgtctccaagttcgcacgcgtcgggggccaactctgcgacatcggttccctgcttcacaaatcaaagacctttagtgaaagaatcctccaggagacatcatctcggggccacccagaaaatctctttttaaagaccggagagtctcggaagacacgctcctccttttgccacctggggctctctactagaaacgctgtcttgtgccggattttaccctcgcctcactctttctgatctaccgatttctcggataaataaataagtgatatgtgtcggatactaagcacagaacatggtggagacgaattgtttgaagctggtgtatcttttcggaagagttttgtcatgagcacggaaggagacgacagcaacttctgagtcattgcttttcctcgtgtggataaacacgcaggagtctctgcgcagcaaatccgtcctccaggatatctccggttcgactgccagatcaatacggaagttggactgggaaggctcatgactgaaaggtctcgttccacagcggaagatgtttgggtaccattttaggaggaggaaacgtggtcaggcacaacatcgcgtttaccggaaatagcaatataaaaggcgcgacgagttccatcatcggagcttctctcaaggattggtgcccgtttttacagcggttttgcgagcacatgcggagtgaaga

SEQ ID NO: 1950 - DNA, 2890 bp, Toxoplasma gondii
  source 1..2890: mol_type = genomic DNA
gatacttaacgactttcggtttgtccagcatcatcgccgcttgtagcatcgtgtattttgtccccgctccgctgcagcgaaatccgagagacaagccgcatgctgtcgaagcatgttgtcagcataataacgtggattacagctgacaatgaatattcgaaatgcgtcacagtcacaaatgctgttcgacgtctcccggtggttgaattgtacatctcgtctgagttatagattgaaaaagcccgcctaactgctagtacacctgcggcgacaactctgacagtacaccacagtcgcaagaggcacagttcaacatcctgcacgaacccccttcccctggccttccctcatgttcgatcttcgtacggatataatctcagtgccgtctgaagcagcagcaccgcgttaaatctcgataatattgattcaacttttcgggagggggtcagggttgaactaccagcggaagcctgtgtcggtgatctgggcacaggtcacggtcaacacgaagcgtataaacttacagtgctacaaggaacacggcaaggggatagtgtcaatcgagactacggatttatggatcgtcagattgagaacacaagagattttacacagtcaccggacaaataaactcacattgtcaccggacaaatcacttcagttgtttctccgagcttcggctctgatgctgtgcaaaagaatttattttatcgcatggtgctgagaccgtcacttaagtgatgaggttcgaacccacttaccttgctgttataggaacaaaatttttgttccagtacggtttttcagacttaattttgtctatattctgtgccacgatggacaagtacatccgtttgctgtccgggcctgccatgatgctctgggcctcgtcccgagaggaaacttcaccaatgagacaagcataactagtcgtgtgagcggcagtaacgccaccaactacgaaacctcgagttgattgagattttttttatcagtagcgctatccaaaatttcctgcaagccacccccgtccaatgtcatagtagcggaaaagggatgcgtcgcgcatataaggaaatgcgtggtccgtaacgttggtcctagaggagggaggtagtttgactaatggattctccacccacttgaacgacagtctagctgctgtcgtcgatgcgatcctttgtttgctgagccttgcgtccacgtgtcaacccgctagcagggtcaggcagatgttcgaacaatcgagaacatcgtgcgtatgtacaccagcatgtgagatgcaaaagggcactctctctgggccaaagaaaagtcccaaaactgcgccacgtatgctggtgaaggtgaatcagtggcagggttcgcaaaaccgcatatacacacttaaagcatgagattcttcaaaagaagagaaactgcattgccccgctgactgcgcgaaacctggcatgaaagggacactgccagtaaagaaaaaacgctatctgagcaacgagaaacggcttgctcgagtgacacgtgaaacatatgttcaattatccactgccggagcggaaattatagtaggtttcatacgtaagaaagcctctacgctcccaggagagatcacaacgcgggcaacgatcaatgtccctcaaccgtgccgacaacaaaaaatttgataagggcgtccacttttgatgcctcgcaaggttttgttaagatgaacatgtctacctggacatactgcgtaaaaattggcgcacaagacatgatgttattcggagcaaacaccggcactacggacgaaaaccttgtcagggagaacgagacacgctttctgcctacacgcgtcgctctgaaagagcaggcagcgagagaggtattggcgcttccttctctcgtcaccgatgtcctaggaaaaacattatggaaggtttgttaactaaaacttcatatgaaggtagatgtgttttactttgtgtaaactcaccgtagtacagctagttgacatacagcatgctagttgagtttgcccgtggcgttccagctgcgcttttctgctgtgtcccccgagacccaaactcggggtggtatagtggtcacttgcaagtcgattcatccggtgaattcgactttactttcgtctagagtgcagacgttgcatccgaagggtgttgaactagggacctagctgtgtctatgctgtgtttgcagtaatatgcgtggccacacagtcagcggataacccgctgttcacactcacgcatggcatgcacatctgatacacgacctgatgaataacaagtgctgtgctgcaaatgattaacagacagcctagtcctttacttgcagaggtgctcaatttctcgtagactggactttcattccacatgaatgtaggtgggggggacacccgcatcgcagagaacataaattgtcacgcgtgccacgtgcatggtggaaagccagcagacgtcgtgagggcttccgcctgtgttcgggaggatttgacgcggtgttccttcttcttgaaagcccattggcggtcggtttccagttgggctatgtaacaaggcgggatgcatgtgttggtgtagtttgcaggacgctgtgttcgtatggagctggccacatcatcgcgtccgcttgctgaacccctgagcctcaatccgaacgtggaagcactgttttccacccaggttttcaaacgcagataacgttaaatgaataagtatctcatgtcgattctttgtcccgtcatgtcgccgcaacggaatgtggtcctagattcttgagcgtgtttctcttcgaagtcaaccggatgggtacggctatcgaaaagtcagaaatgttgagtcgcaacgctcgaatacctctacctaagcggagcttgatttctcagtca

SEQ ID NO: 1951 - DNA, 2105 bp, Toxoplasma gondii
  source 1..2105: mol_type = genomic DNA
acccgtatctgcctagagagttagaaatgcaaacacatgcaagcaaatccatatatatatatatatatatatataggcagccgcgcatagacagatttagacggacatagacagagagatagacgggaactcgtacatggatatatatatatatatgtagagagatgactagttactgatagatatgtatatctgtgcgtagacacacacacacacacaaatataagtatgtctgtgtcaatgcgtatgactgacgagagtgcatcctgaagcttggatgttgtactggttaatgcagtggcactgagcacagtgttttttgaagaggatccttccgcgctcgacgtctccgtcgggcaggacgaaatcgtctggaacatcgtcgtcgctgaacgcgcgtcgcctctgttgggagcttcccggttctctcgagttccgcgacattgcgcagcagagaaacggacaggagagcgggcagagagagaagggagaacgacgagacgagaggcaagagctggcgactaactggtggaccccgcatagcgagaggaaaaaagcgaacagaggcagcggttcgagcagagaggaagccagcaatcggaagagaaagcaacgagacaacggaagaggcaagaagaaaatgtcggagcgagaaaggaaggaaagaagaggaagaagagaggaaggcgcgaggagagaaggaagagagagaaggagagaaaagagtgggaagaggaggaagagagagagaaaaggaagagagagaaggaaaacaggaagagagagaagaggagcgagaaggaaataaacaggggatgcaggaagaacacaggagactcggggatccccaagcgaccagaaagacggaggaacagatattcgaaaatcggttagatgtaagctggcagatgtgcaaaggcaagtgatgcgcgacttccaagatccaccaagtccttccgcgcggggctacagagtctccggcgcagggtcttctctgaaaacaagaagcgtgcgttggacggctgcagaaagaagcaaacgcgaaacggagcaaacgcgaaaaaacgagagagacggtaagccgatataggagagaggaacagaagccgtctgagagtgtctcttgctttctgatctgcgccgcgacgctgcgaagggttactagatgttgctcgtcgcgttctccctgcgacgctgaaaagaaatggaaaccgtctacagttttgtgagaaaagccactgaaaggacctgcagtcgggcgcaaagtttccaacgctgtcgggcagacggacggccgcgcagacgcggcgctctgccggttctgaggtgcacgtctctgtttgctctgtttgtctcgcatgcgaagactctcgagagtttcggcaggttttacggctttccaagaagcctttttccgcatgtgttcgtcgcgactgagagcgagaggagtcgcccactctgcgaagggaaaaaaccgcgagaaacgcgacgcttttttcgggcgcggaggggaccgtccggcgctcgagcagaagtgtgccgagttccctttgtgccatggttcttttgagctccttcactctttccaactcgcggtgtgcgccattcctctctgtgcccgccagaagctccagtgtatgtacaccccaagtcgaccgtcgggtgtcgatacacctgagcgagttcgtggcggccaaaaacccacgcggcgggcagaacggacagaacagtccacatctgtttttatctggatgtccttgttccgatttttttagtcctgttttccttggcaaaactcaggttctctctgctgcggcgtctcggcactcctgggccctgcagggcgtctgcctgttcatttcttttgatagattccttcacacttctgtttttcttttgcctctgtgcttggttctggctctccatctcccttggttctctctggacggctttctccaactctttccgacgtcaccttttcctgctttctttgccctgctctcagaccttgttttctgactcgaaactctgccttcttctttcttctccctttcttcgttctcctcccgtccttcgtcctctgtcacttccgtttgtctcgacaa

SEQ ID NO: 1952 - DNA, 5012 bp, Toxoplasma gondii
  source 1..5012: mol_type = genomic DNA
aaacatggatcgttggcacatacaaactgtgggcgaaccggagagaagcgctgcatgccgtccttcggctgcggagatttgtggtgttctttgctctcccacaagagacagacggcgtagaaaatggacgtcgtcaagtggcggagatgacgatcagagacacaaacgagtcagcgaggaaggcgagaaaagagaaagtcgaatgggaacagtgaacacaacatgacagagaagcacacactgcgaatgcgtaacgggggaaaacaaaagcgaagcgaacaacgaggatagagtggaagctaaggacgatgagaactgggaaagcttcgatggaataccccgtgtaacgcgttttctgaataaaaacgagtgatgcggccccttgtgcaggatgcagagaaaaacgcttctccatatttggcgtccttcttcaactcaaagctacgcgacagaaaaccacagggcctgcctcgcgccatttttcttgtgaactggcagtacttctccgaggcggcagccttctctttagaaagcattctttagtgcaagtcgctttcgccactcctagaacattttttcggccggctttcgtttctttgcgggtgcatgaacgcgcttgctcgagcagtcgaagacactgtcatcatctagaaatggtccccacgagaagtcgtagatgccggggccagaaatggtcgagagccaccgcaacgaatttcagaaatggcgaaacgcatatccagctgcgcttccaaaaaacggcgagcgccgtacttgcccccccgtcttgtcgcaatcccgttggcgggcagacccacagaacgaaacaattccacccccgcacacctcgtctttcaaatgaaaacctgctccctcgcgttgtttgagcagattaagaacttctcaaacaacagaaagaggaactcggccgtggaccgaaacgctcggagaagcgaccgggaagctgcctcgttgcgcgcgcattcacaattcaagaccccgtcgcacaaagggggtgcgttgctcaccaaatcaaaaggaagacgagcaaagatgagcattgtcgaaagaaaaagaaaaggtgacttcacaacgcagcaaggccaactaggtcgaggacatcggcggctgtgcacagtcctattgaaagggattctgtctcccaagaagaggaaagggtacctcgtcaacttttcagatggcttcactcaaaggaaagatcagccagaaaaactctacccagtcggcgaagccacagttcggactctctcagatagcaatgcctccatttttttatggctcgtctcccggggggcgatgccacgcataggaggggcaaggagacccgccttcgaaagccccgaaaagtccgagagacagcggaaaaaatcaaagcaaacagtgaaacaacgggaaaccagcccaccgatcaccgattcacgcaaacagaaatatcatttggaagacagccacggctgtattttcaaaatgggacctctgtccgcaccacgagacgagcaaaagaacggcacctacggatagatttacgtgtggaacggctattttctcccaagtgtttcactcctagtgaacttgcacagacttctgaaagtaccggcaaaaacttgtcgtttcttcctctgcgcaacaacgaacagagacggtcgacaagccgtgactttgactggacacgggagaagtggagtcacctggcaggacattgggaggccgagaagcggaggaacaaacaaattcggcaaacgacgagtacgccccagagacgagcagaaagataaagagttcgagactttggccaagaacacaatctttccgcaaatatctcgacgcttcacaattctgggcggtcgagcagctcgttttgcaagcatggaacatcacacgctttttcgagggttgtgaggaggcgaggaggaagcgctacaaaagcgaatggaagtgatgagattgaagaggatgagggcgagagagatcctctttgtttcttcctccgctttttatgcagaagaattccaaatggtgaggccagtctcgcagaaaacgcctgacgcggcttcgtcggtggcaaggagtgtacccgtggtcaacatcccggtgcactcctctatgttcatttctgagtgaagaacgtaccagacaagacgccgatatttctactatattcgttgaaaggagggcaaggaggaacaaaagcagtacgagcttcaacaaacaggaactgtgttccactagaagacagacctaagtgtgctgctctgacactgaaacggttcacaggctttcctcttctactctcttctacagctgtcgctctctcatattcaacttcatatagacctgcatacgcctacccacatttaccgaaggggcttgcaggacacggcagcgcgacagagagtcaggtcgactaatgtacacaattacaatatagagcacggtctctcatctttttgtcctgtggatggttgggtcggttctggagtgacttttttcgttcccccgtcctttaaattgtctcccgtacagtcgatgcgcaccagttgcaattaccaatgtatgtgtctcccttttaaacggcggatactgcatcaaacatcatcagacgtgtacataggtaaaaatttattaccgcagtgcatcgaggggaatgcaacataaagacttcttgacatacttctcttcggccacccatgcattcacatatagtggcatgcaaaaagttagtacggttcaattatgtcgatcaatatgcataccaaatcacgaatatgtcgcttccttcaggagaaagatgcaaacagtcctctgacactgcgtgtagtcgatccaccgcgcgcgaaaacaacgttgtctcgagttcactcccaggacatggagggccttgtgatgccttttggcctgttctgaggattttcatgaaacttccaagtctgtaacggagaattcatttccactgttctgtcgagccctttctgtgcaacgataaggtgaggggacaggacgaaataattcaataacatacaggcaggacagaatgccaacaaaccagactacaacagcaagtcacatacttcgaagttctggaacagggattagatgtcgaggacctccaagcatttctttggaggaaaattcactcagagctgcagtgctttttcttcgaggttgcgtgccgcggaaatgtgcaatacgcgaatcgagcaagcagctgctgttgcatcttttgttgacaaagttgggaagaaatctgaagcgacgaatgtatgtgcggggctgtgtttgtacgcgctgtctgacttggagcactcgttgatgaaaaagtttcggtgtaacgctagtgcggtacacatttatgtatatataaggaacttctatgcatgcacttcgacgaggctacgaaagaatgtctccgtacacacacgacatgaacctattagaggacagcgaccaacgtacatgtgctttcatgtttttgcatgtatttccacaaccactactgaagtctctctggttagcagtccatgaaccgtaatggcggtatgtatccgcgtatacagagtacatacatgcatgaatgtaaatctggaactccacatcctgcgaaaatcggggcgtgccgaaggtggcgcgctgcgcaaagagaaacttcctccttgtctgctggactcgcgaacttcactccgaggcggtacatggggtaaggatcgacaacagaaacttgattcaggaacctcgcgttcaccccatacgcatctacaaagagagattctctcatccgtgaaagagtgtatctgccaacagacaaatatcagaaccaaacgtttagatccagcatcgattgcgagactgctactgtgtagccaaactcaaaactgggtgtgccgcaaagacgtctctgtctcgtcttgtgttttaacggttttagttcactttgttacgcgccaggtgtacagacacatccataaacatttataagtaaataagacaatacaattatggagaggtgcatgcctggttctggaggacagtacatttgccgatgaacttgccatgcgggaagacgcctcggcagatccttcgcgctgtggctcaactcaacgaggtttcccagattccctccccttttcgcgccgcgcatgacgcgtggaagtgagctgtgtcgcatgtttgagccgcgacttttcgctttaaaaaccacggactgtgagttgtgatttgccgcaaattccctctcagttctcattttcttcactgtatgttgactttttcgcggggaagccgacggagcaaccgtgaggaggagatggatctctaaccggaagtggagcttcgattggtcactcgattttgcctgcatgtgcctcacttttccctcccgattatcgtccagaattagctctgttcttttagaaaagggataaaaagccaagctctcgaaaaatatttggttttggaccgaacctcagcgcttttgtgttgctcgtctacatcgacggatcagagagtgacagacccccttggcggccgtggtgagaggatcgcgagacatcttgaggcggcttacactcgcaggcaggaattcacaaaacacctgctgccgcgttctcttttctcctcctctttgtcgtcgatcgttttttctttttctttttccgtctcgttgtcgacctctgtaacagcctccttcgtaggtcttgtcaagcgccgcacgacttttccgagccgtcaccgtctcgattttcttcttcttcttcttcttcttcttcttcttcttcttcttcttcttcttcttcttcttcttcttcttcttcttcttcttcttcttcttcttcttcttcttcttcttcttcttcttcttcttcttcttcttcttcttcttcttcttcttcttcttcttcttcttcttcttcttcttcttcttcttcttcttcttcttcttcttcttcttcttcttcttcttcttcttcttcttcctcttcttcttcttctcgcga

SEQ ID NO: 1953 - DNA, 3319 bp, Toxoplasma gondii
  source 1..3319: mol_type = genomic DNA
ggcagttttcatgggctcgaggtcttaaaaggttcgagtggtttcccggatttggcacgaagttttcgggaatttccttcagaatgctgaaccattgggcctttcccagttcaggtccctgagttggtgtgtattcttcatctccctcctaggggcatgcaggatcacaacatggacaagggacatggtgatagtgtctttacgtatggtcaaagtggacgtttttccggccgcacttcccacgagcggtacaaacgtatttcttgtctggtgctggtgcaccatggagctttcatgactctgtgaacccaaacgtggacactcaaagtccaagggttcaaacagcgttgagccgtaatggcggtcgtgtgagacagactgcatcctcctttttgagggattttgaagaaggcagccatggtgtacgacggttgctgccaatcgaatgcaaactctactccagatgtactgcccctaccgtgacggtcgtggcaagcacaatagaagttcgctcccgtaaacaggcattcaagatctaagccggtagttagcgacaggtcgtagggcgtttctcaacgcaagtgcacttcatgaagataggaccaccaatctgcacccgtgcatcaaacgcccaagcgagccggcatttgctaaatgacactctgcggccagaggcttgcttctcgcgctgtcgaaattaaatccgacttcgtgtcagcagactatcccttagtggtgctgacgaatgggacgaagaagtgttcacgtgtggaccacagcgaaagatatctaaaaaggcatgggagcagttgccacatcatcgtagaatttgacactgctgggtgtccctctaatcagtattctgtagtggcagaattgcagccgattccagtatagagtgaaaccacttctgattctggaagaggatgctgcgagactcacgcaacttggtgccctgtccgcgcaatgtataactacaggacgcgggggccatctggatgggtgagacatgtacaaaatttcggccactaaacattcagctgagggaagtcatgcagaacagaaaaatcgtgttattaccagttgccgaggcatgacagcgttactctctaaacatgatggatgatggcgtcatgatcgacgcccggtagcgtcaaaaggccacctcgttgaacaacaataaatggaacgacgcggccatattcaatatcaagtagacagaggttccttaaaataaaaccaccttcgacaaactctaaaatttttgtactgtggcagcttggggccggacgcgctccagcagaccaacttcagcttatctccacagacctggaaaagtgacctacctaacagggtaggtgttgctgagactggaaatatccaggaattattcagcagctaagggattgattatagaaagcttgtacatcaccaccagcattgagtcttgattctgatcacaacatcaactgatgttgctttgtgccttctctcagaggaagaggaaggaaccactgtccatttacctttgtatgatctccacatgacagacagtcatgtaattctggaaatcatagaagcgataatcctgggagtggtagaggtagcccccacccggcgtctcaaaaacatcgttagacagaagatctctgtaaaagcaggagctccccaaaacgcgatgatccccaaatatattttcgaccagcacgggtcatgaacctgaccttgggctaccatccatagtcagtttctgatctagtatacccaataaaatatggagcgcatggatgcacagaatggacctgaatcctctggaagcaacatcacatctcaagggcacttcactgttctgcaatactatttctttcgccccattcttgtactgcacggccacgctgcgtccgttcccccaggtaaataaagagattcgagacgtagaccagtagtccaattcgttgtttgtcctttccagaaaatggtagattgcgtaaacttctgaatcccttgtcacaatgtgtgacagggactccagtttcagctgtcatctgattggaactgggttctcctcacaactcgttaccggacacggctcgtgtctgcagcttgaagctggtgctgtcgggtgacctgcgtccgctgtgcaaaagttcgagttttcttttaaaaataggggcacgtaacatcgaccagcggaggtcgtgcaaacatgaatctccttcggtcttagacttcctgaaacagcaggggaccgtgaagaaatggttcgagagtggactgtggactgaaacagtgcgttccaacgctagtttgagtctccaacatgcctttcaccgagaaccgtagggaacgtaacaaactaaggggactccgccggctgcgttcaggttgccagtcagtacatgtcgtttccttctcagcttcttcacccaaccccgctcgctcgaattccctcaagacactgtgagaaacacgcgcaacgccatgctggcagcaagttgcgttgttccagcgttaccgttttgcgcccccttaaacccttccacaaagcagtctttatgatgtgaaaaatcatttgttgtcccttgaatctgtttgccaactgcggcaacagacgtgtccgcatgtggagtagctgcatcgcgggtctgcgagcctcatccgtgcctccgtgtcttgggttttttttcctactccgcagcttttcagacacactgcaaatcgagatgacacttaaaaataggacattttaattcgtggatgaaatgggtaaatgagcgagtcttctggttggttgcggcttgccaacacacgtctcgctcccgtcggaccttgctgttcatttcttttgtcccagttaacgaatctctttctgcgtttcgatatacggtgagatctctgcctcgctgtttcttttctggagtcttgccgaaacccgctcgcttccaaatgcgagatccgtctagtctcctctggcacaaaatccctggttctggcactgcgggcatccagttagccaacaaactaacggggaagagcacttctcagccgctttccctcttttccttcgccttcttgggctttataaagttcttcggcgagttcctcagctcgcctcctcagtcgagttcttttttggcactgaaaccggcttcacctcattcgacgccggccgcgtctcatgtgtgccattttcttcagtgattcgaactgtgaaaaagctctgctttcctactccatgctgcagaacagtcgttcttcttgattcgtcggtttctcgaccaattctacaggtaacactccggaggtgtctggtgtcaga

SEQ ID NO: 1954 - DNA, 2137 bp, Toxoplasma gondii
  source 1..2137: mol_type = genomic DNA
tgtccttttcatttgtacactttcgtttagcgagagatctgttcctgtttcgtgcaaaaaacagagaaggcgagagcctgcagaatttgaaataagagacctctcctgacattttctctgtcttgcgacgctcctctttgagccaggcttcagctgtgggtctccaattggtggcaccgctaaagtggggagggggaaattttgagaaacaaggctgttgtgcatatcttttgagcggcgtttgtcaagagtgactgttgcccggtcattcgactaggaaagcgcgtgcagacgcaagcatatactgaaatagtacgcactgacactcattcggaaccttctatagttctttcatgctaaatcatgtataccgtaactcgtcgtttcttacacaaaaaacccagattaaatacagaggctgccgcgtttggcacttgtttgttgtaggcggaacacttggctcactcagtctatcggacgccacgtcacagtcgaaatgctgaggtcctcattagcgaatgccatcggaaaggaacgctggtactcagtctgtcctctaaggataagatctgctgcgttttttttatcaccgtaccgactgagactggtgactctcgggatttgagcacagaggactctttcttgagatataaactgcgatttgtggtaatttttggcacaaggacatttccgcgccgctccaattgtttccaccggtgtctgtgtgctaataacgcagacaacacacactagcagacacgtgcacctgcattatggtggaaatcacagaatcatggtattctaaaccctccgctaaaatgtgtaatatgaagaggcgaaaggttgagatgaattctgcgggtcgttagaaacacactgaatctaacgactgatacaactgtggtcgcatgaccgccttgctctgagaaaggtctaagtctcaccgaaaagtgcagcatgaagttctactaccaaaatggcgttcgttaccggtgttcccgttccagtctcctctgcagaacaaaatgttctactacagttaatgtatttcctaatgcattccaaaatacgcatcttttgtcgcgcgtctatggtttggggttgaccctcgtcgcgtgcacgtctccggcagatgccagatgtagaaaaaaccaagataaatgtgtcaaggtcaagttttagatcagggagtgtgtctagcgtttccaagaattcatattacttctgtagcaggtagatacgttgtacgagccttggtgcgtggcatcgccttgctcaatgcgtgatcgttttggaggcatactttgactacaccgcttatgttagaacgagagaccctaccgtcagtgtttagaactgcctttgccgttgatgtatctctaccttcgttgatcagaaatcggggagagtaaccgtcacccttttcggcgaatcgcagtgtgacaacctcaacagcatggtcgggaggcttttgccattcttgaatcaaacttccctgtctcccatatcgaagcaactcgcgcgtatgttatagctgcatcacttgcgcggaatagatccgccttttggctagacactttcggttctcttcaactgcaaggacagccatgtctgacattcaatccaattccattgaaggttgacgttttccagcagtcttaaggcgtcgtgttcaagattcatgtttcgctgctttttaaaaagggcaccaatagggaaagacgttgctttcacttgtttggctgttactttgtacccgttctcagttgtttcgttgtgtttcgcaacgggagtttcagtcaactgaattgggctttttctgctccctctttcttgactatttttcctttgctgcaggttcacagttgtctagatcactgctcgacggtaacattgacttccttgcctcctagtatcctgcgcattcactgcctctttagtcaaaaaccgattaatcgcatggtatcacgacaacgcgcttattcgggtggccgaaacgagttgtggtatccattttagctgcattgttactcgtcctgacaaacgaaaatgtggcgtcaggcattttcacgctcagctgccgttcgcgagacatgtcagcacagaatccttcagcgagcgaaaccggccggtgtta

SEQ ID NO: 1955 - DNA, 2387 bp, Toxoplasma gondii
  source 1..2387: mol_type = genomic DNA
cagctgttcaaacacttcacaccataagctgtttgcggagcttcttgtatcgacattccagagcgaacgtcacggtggattctgtcttgtctgagggagaaaggaatttttgtcctttcgttgtcctctctgtccggcacattccgcccgagtagtgagtggggcagactgcagtcatgaagaacttggtcagctgttcctcattcctggaatcagtttcctcagctcacactttgcaagggaggattgtccagctggagtcacagtttaataggcgatcctcgcacaagttttttgccgacgctgaaggtgcaaagtgactagtcagccgagtgtggaggaatttgagacagcctgatttgcatttggtgaacgtgattgagctttcgagttcctcatctgggcactagagacccccgtaatgatccacaaactgtttccggaactgtaaacctcatcatagagtaccaaggatgctgcatgcaagtcaagttgggaggtttcctccgtcggaactgattgctacgcagccggcaacttgggcgaggctgtctgtgtctttctcgctccccaggggagagacacggactcatttctcagtggcattcacgactgctattcctgaaaataccaaggcctcgaggtgtttaggagccaaaaggacttcgcagactagtccacaacaggaaatctatggtctgtcagattctctttcgtagagcttatctagaaatgttcgttcttcaaagctacggtggacaccggcggacgggactcacttttttcctccgtctggtccgcgtggaaggataaggggagaacatttgcagaactagagcttattgagcaccatgtactaacgcaacaaggacaatcaaggtaatttgtggcacttcttggcgcagatccgtttgcgtcttgtacgttctcagtcggttcgctgtttgaagaacacccttgattttgttgtaaactgcagcgcgcaacagcctcgagatcatttcgtagaaatcaatgttacgtgcgcctgtagaacacgactctgcttccggagtgtgcgtccttgctgtagaagattgcaaaagcgccggaactccttccctttctttgttctgctcgcaccttgacttctcctagttgacgcctgtacaccagcagctgcagcagcatgctttcgcgacgccgaaagtgcgtggaacttaccgtttctacgcggttttagtcttctcgcggtaaatgcgaaacacgagtgccttgttcagtcgtctccctcctgtaacgaagaaagtggtttctggtttcaccgccgtcagctgccgagcaggcacttttttgcggctttcgcagcgcgtgcgactagcgaagtctacgtttcacggcagacagcagactctggtttcttttttctcgcgacagacgaggatgaggatgtcgggaacgaggagatgtggaaaagaactctgtgcaaggataaaattcccaggaagatacgagaaagcccttcattcctactttgttgtgctgtgtcgctcaagttcgctcatgaaacactcgattgtattggcagagttcatcgtcgatgcggactcacctggctagctagtgatttttcgcgccttttcccgcgggcgttttccctgtttgaaaagaaccgttttctcgtgttgctttccgtatctccgcgttcggtgccgacagtcttgcgtacctgttttttcggtttcctgccgacctcgaaacgcgctgcctaaaccgaatctgaggcgtcactgttcgtttcggagctccggtcttcttcgcctccgaggaaccgcgagttccgccgagaaagagcgaaagagtaggaagaaacgcaaagaaacttttaccgctggacgttctcctgactccgaaggccctggacaccaaaacatagagtcgatgtgtgcgtttgaaagtcggttcggactcaaacgttgcgcgaaactgaggacgttctgcgtaattcaaccaacccctcgtgtggctaccacgttcttcagtgcctctctgcaagtcacttcggttttttcgtcaagactggctcgttcgtttccactgagtctatcagctctgtcgatgcgccttttccgcgtttctgtttctctcgtggacctcgagcatttccacttgtgcggaggtcgtcgccacattttccttccacgtctgcctcattgttttttactgttcagcagccttctctcaagaactctccaacgcgttcttccgtttgcgttcctcaaaacgctctcgccgggtttcgaaacgaatcttcgaattcggcaaccgcgaccgagtcgtcgaagcgtcgaccgctcgcctgaaagcttctccactccctcccctcgcgttcttctccgtttcctcta

SEQ ID NO: 1956 - DNA, 3950 bp, Toxoplasma gondii
  source 1..3950: mol_type = genomic DNA
tgctggagagtgtgcggcagatcgtggaagaagacaacactcagttcggggagatcgcggcggagttgtctgactgcccttcgagtagaaagcgcggccttctcggctggctttccccggagagcgaggaaggtcaatcggagaaaagcgacacagagacgaaaggctatagcttgccggtggaagtggtccaggctgctctccagctgccagtcggagccattagtcacgtcgtggaaagtgaaaacggagttcaccttctgtaccggattaaatgaagaaagagaatggaatctttaacgttgaaaacaagcagcgaaacgcaacgcaacgcaacgtgtcgccttttcaaccagttgggacccacccacgaaaactcctgttgtcggaaataaaacggtctctgttgtcgcggcggagttcgccggctgtctcgactcccggcgcgggaacgaacgcatttcgatttctctctgtgtgtgtaggactatggagggagatctcgtcaatgactctgaaggaaattcttgtgtagccttttccgaaggaagcgcacacgaaaagcaaagatagacgaacgcgagtttccgtgaagagaagctcattccaccctccgatgcaccttgcttcgaaaatcgggagtcaagagaccgggccatgccttcgggcgtctgtttctccccacgctaccacttctggatgggtttgttttactgttgttggcagcagtcaacggcttggtttcgggtggattcagagaaaaaagggagcttcccttctgccgctgtaaacaacattggttggacctccccagttctgaacgaggggggaggggtgcgcgttcccagacgaaatcggctttttcgattggcactcctgacaactttgacgtgagagacgagtgcattttcgatatcctttttttgtattgtctcggttggactcatgtaaactgttaactggatacctgtacgctctacgagaaaggagactagccgtgactgcactcccttctgcgcaagacctgtgaagacgcatgcaccaaggaagttagtggaatagaaagaaacgaatactcagggtaaacaagggtaacaagtacattccggtcacctcactcctggtgctgtccccaactaaccgcaccgtgtgggctggctaggtgaatggccgacgcttgataagaaagcactcactgaagaaggcgttttcgacttctatgaactgagtaaacaaagtgctatcccgcaacttgctttctaccgcaagtcctggcatcaagacgccgaacaggaccagctctgagagaactcctccaaataaccaccgacgacgttgtagatgaatttagatttagagcacaccgataaaagacaaggtgtgcctggagtgaactcatagatttagactgagtgttctcggaaccctggcaacgcacgacaccttggatccggtaaacacagacctcaagatctaaaccagatgtccaagtcatggacccaagaagcgcgactcaacttttcccccttgttactacactttgcaggggtgccggcatccgaggttccccgcttgacaagattgacaaatccgggataagaaggaaccctgacgacctctgttgcactaatacacggtggtcaaagggttcccgtacacagggaacatgacctcacctttgctgtggtatccccgttaaaagaaacaaagatcttgaagatgtaagtgaggaatccacttcggcaggttatactgctcaaagctcgcacgaggggttctcttaacgtgatgataaatggaaacacacctcgtttgaagcgtgtcagtgtgtggctgcgatctgcttcaaatgcatagactggagtcatgcttttccaacgaaaatttggcacagcagttcgttcgacgctcaagaaccattccaaggaaatcgataacatgttggaaatcaataacattttggagtttccgacgcagtgccgtgatgactcctgggtgccacggtacatgctgtcgctgaaatctcgatagttttctgggtcggatgtagtgacgtctctgtttcgttttatatgcggttagacgtctgccgattccttttttccaagccttcactcctttgcttcgtgtctgctttcagttcttttctctgacattccttcgagcgcacacgtcagagtccactagaccttcgggcacccaccaagcggtacttgatcacttcgctgttcgtatctttcgcggcttgtctccacagaaatgaaattaaccttctgctcttgagattccaacgtcatcccaacacgagttaaccataaaaagaattaaagcttgttcgggtacagtcaagaagctgcaaacagccagcgtctcctggagggtttctccggggcccggcagcccgaaacaggcgagcacagagactgctgctttggacagagaagtagttatctgcaagtttctcgtttcctcattccgctagtctttctttgttcttctctcattcttttcaaaccctcagacctgcgttgatgttctactgcggcttcttgcagagcggcgagagcgctcggaccgcctctacagccgctcgtcaccccggtggacgagagaaacctacgggaaggtgacttagagaaaaagaaaactcgtaaatcggggctcaagtccgattgttggtgagttcaaggctcgctttccatggtgtaacttgctgcctgtggccagagttacaggagccaccggaggctgtcgcgggccgaaggaggcgtcggtggatgtgaatggcgtgcgcaggaaatgaagagaagacccgttcatcgttcttggtaattctcctttagtgtaaacgactcgatgaaggaaaagcagaaggttaccacgcgaagaaagagaggaaccctctgatatccttgcctcggcaatgctccaagtaagcaacgcaggaccgtctctcagcgcctccgcgccggtagagagtccatctccaagtaacatggggcattgagccagatgtacgtcctcgctctcaagaggttctactacaccatattcagctaaaaacagaatatatacctctggatgtccaaaaagctagaatagatgttgatataagaccctattgctacaaagaagttaccatatcctcagcgcaaagccggcattaagaacataaagatcatagcgacaccatgtacctcattcgactttcttagcgaggataagaaaaagagaaagtgaagggagaagacaaagatggactcctcgctgtctcggtggagcagtcacagtctgtgttgactattcagagtctatgtggactcctcagagggctaggcattcagcagcttggtgcctgttcactttcgtttcgctgtggtcttctttttccctatgcaggtccatggctttgctgcgcccgaaactcatgcatgtgtaacgagggagcttcttgtctgaattgtctgagagtgcgcggagtcgcctcgagtctacgcgcgcctagcatatctgttcacactggatttctacaggcgtttgaatagaggcgtagaggctggattcatttatactctcgggagaaactatcttgttcacaacttccttggcgcatgtgcctgtacgggaccttgtacatgttttcatcacctttacggctttcgtgcaactctccacttatgaacgcgttgctcccgtctttctgctcggattttctttctaaagtgtttcgccatggctgcttgactgtgtgcgcatcttcgaggcggccagttatggagagaaatcgtcgctgtttcttctacatggtggcctacactctttcgctgttattctcctgatcttctctgtgcaactcaaaggatgcgttgctctgctccaccgagttgggcgctccttagcgcagagtcttagggtcttgcagctgcttctctgtctgctagttgcgagaa

SEQ ID NO: 1957 - DNA, 1748 bp, Toxoplasma gondii
  source 1..1748: mol_type = genomic DNA
tttttgagtctagtgacccgacaccgacgtgcacagtatataacacctttcataatgagcagtagaaatcacttccgagaggaatatactgtggcgcatgaatcgtccgcccgcgctatcagataccgtctcgagcgcagcagcaaagagaatcggctcgacagtgtccaagcttcgtcgaaacataaaactggtgcacaagttacatcggtgcagcatatttctcttattgatatttgaaatcataacggtatttgtctaacacctgccgcgtacgaatcctcgtacagtgatctaaaactccggctgaccacatcagcttatccacgaaccgctggcctttttcatgtttggtctgtacggaagtaaagtctcggtatctcgtttgtacaggccactgttaagtgacagaatgtcaatgcgatgtagatatcaactgccacacggataggccgacgagccacccatcactgtgctatccacgaacttcagaaaacggaatgtcgaccgcgtaccaacgacagagttccttgttacggccaaaacaaaacacgaccaactgttggttgcaagagaaaaacaataaatgtcctttcgtgccgcgttccgacagattatgcaagatcagccggttaaacagccgtgatatacatccccagttctgttatcgtgagttgatgcagaactgccttgtccgctaaggaaaggggagccattccaatccattgaagtcaaactgctgagcagaaggcaacagaaacgtatgtattctcaagcacgtatgagctctgaccggggtcgatttgccgccgcgtgctacgctaggttctcggtgaagtggtggcttttgccgcggattttttttggcagctcacagcatgctctatgttctccagtgaaaaatatgagctttcactaccatgtttacggaaaaaaattaccttacatcccttgcatgcttgctcctttttttcgacgcactgggaaaaatctgcaggacagcttcttagagacagccgctcactagtcgcttcttggccctcacccgcctatggaatccaatattcttgctaaaccgatgaagctgcacatgttttttactgaacggctgaagcagatatcttctaccaacaaaactgcggcaacaaaaatcgaaaactggaaaccagtttgccgggttgcacggggtctgcttagcccggggcgaccggactcttcagagcagcggcctcacgtgtgaataagtcattagacggatttgtttctcaaaacagaggtaacaaaggattgcctttccccttcagatgaatagatattgtcaaagagccacgcgagcgaacagatgcgtcatcttcccacccagcggcacggtgcatgcgacgcagtcgggtgagcgcgctggcgacggcgtttccatcaaacttcaaccgtcgcttctttccaagaagagaaccggcagactgccactacatataacgccgacctttttaacggtttttacattcgcagtcattgtcgcttttcccctgtttctttgagccttccgtgacttccgggctgatccaagttttgaacgggacagtcaagcgccatccgtctctggtcatttcgttcccgttccaagtcccgttttaaaattcgatgcctaccaccattttcttggccatgttttgaaagtggctcgttctccgtggagagcaattaggtatgttttgcgcatttattccgcttgcctaacccaggaagaa

SEQ ID NO: 1958 - DNA, 3767 bp, Toxoplasma gondii
  source 1..3767: mol_type = genomic DNA
aacgctggcttccgtcggacatactaggatatttagccaacaaagaagaatgcagtgaagaagaaagacctgcaaggtttgaatccgtagcttttccgaatccctcacactgcccactctcgtcgacaccggacaacggaggcattgtccatgttcttgagcgacggcatcagccactgccatgtttgaaggttctccctcccctgttcctgtcgacaggccgcagaagaaaggtgctctcttggtagtataaaggacacgttgtcttttcttgtcccccgatttgcccacgatagtcggcgtcgggaaaaaccctgtctgaatgtacacctatttccaccgtgggtctagaaactttgtagagggcaaatggcgacatatacaggaaagtccgtccagctcggttgtctccctccggacggggccagaaacacgtagacatggagaccaatggatcttccagaaaatgaataaagagttttcctggatgcacggaggagcgacgctaacgcttgaaacgtatctcatccaccaggtctctacaggcaaggttagtcccttgtacctggcgcactttactgggaggcgtcagcatccggctcaaatcgttcattcagctcgacttctaccctcacatgaccgagtttctgggctgtaggagtgttcttcgacagagtgcctggctgtatccataactggaaaacccagtatcgtcgccatgcctagcgggtgtagcggttgtgttggtgtctccttcaaaattcgcccttctactcccgtctatggagagggaaatccagagggactgttgcgagtctctcagtgcgagacgggttgcacagttgcggtttatttgccatagcacgttaccacgaagtgacaccgagttcgacacgggacggcaacttccaatgcgactttgacagagttagcttatggacacactgcagcactacggattctcagactacgcttcatgggtcactagctgctgacctcgagtaatgatggaaatgcgaaggcggaaagcaaacggaatgtgagtcgctcgccctgaaacggcggcagctgtacagctttagggggacactacaggacaacgaacgaagttaggaaaggagaaactgtcggaaacgtccttccgtggaagacggtggacaagcaggcactcaattgaatggttttgagcggacacggatgcagaaaaacggaacaggagatgaagcttcggaaaaacggtcgccatggcttgaatgacctcgtggcgggcatgtctggcttgcagcgcttcgctctgttggtcctgtgatgagcatctaaacccttttgctcggaatgctgggcatccagctatatttcttcgctgttttcaggggagctgtgactattctttgtttttcaatgtcaagtcacactaagcgttcaagcctcaacgcggatagcccgactgttctcctgccccgccataatttcaagacatgttattcttcttcattcgccgaggggtcacaaatgcctggctagtcgccacagtttacaccgcaggagacgaaaagaggaaacatgcgtggcaattttgtaggaaaacgcgtcgaacatccgttttttattctttagatgtcactgggaaaaaggaaaaacgcgacagtgtcgaaggcacatccatgagagacgccactctcactctagccgagtataaggatcgagttgtacttgttgcgcaccactgctgagactacgacgcatttgcttcagtgtgtgaaatgccctccacaactgtctgagtggctgtacaataaatatcaggtggcaacgaggccttggcgtgctttgaggaaagccctgcagtagattcccttactaattattgcactttatccgggttcgtcacagtcgaaatacattcgacacgagcgtaggatccaacgaatcgctgtggtgctcgttaccgtagctatagatttggattctagagtttattttccaacaccgcatagcctagagtagcctcttccttcactcatgggctgctgccgctcacaaatatacgatacttgcggacacgtccattgacaacgcaggtgcatgtcatgttcgatccgctgtcctgttttcgccagtttctttgtcttgcttcgctgctggacttgccaatcgtcgtcaagcctttcctcgccgaagaaaacgattgaggatacggcctgtgcggcgatgtgttcgatgcaatcgctacctcacaaaagttaaacctcaacccgcagaaaaggcggacgccagaataacccactccgttcctcggtttgcagaaaaacactatatggtggacgcatctgaggttgtgaagtgacaaggaacatctgtcgtttcacagcgctggccacagaacagtgccagaggtgtggtgcatggtactatgctgcagtttccgtgtagctcaacccggtcgttttgcgtcctttcacttccttgggacatggggtgaatatattatacatggattcccgcgttcctcgaaatccgagttcttcgctgttcctgtgcctttctttcagtactgcgtccagagccggcgcgaaaccggaaagctccggacttctcggttgtccggcgacctcagctgtcaccctctaacaacgacccgcttttttctttttcaggctgagttctgtcagcgtaggaaatctgccttgcacaaacctatctgtaaaggcgagcgctgatggcgatttcgtaagacggcacgaattcttgtggtcggcaacttaggaaaaggggttccggaaagaacgagtctcgttgtcgcgttttgaaaacaacggaacacaagctgcgacaagacctctaacttgtcgtgggagtccggcaacgaggacagtgctgatcagttgttccccctatcggagaagaagtgactaaccagtgcgcatgtggcagcgagtctgcggactaaacacggaggccgcgtggcaaagaagacaaacgaataaacggtaactcgggttggcaaaagagagtggcagcacaccgttgtctgcacatgactcgagctgtggtctggtgccaaggtttgtgtcgcggcaaaaatcacttttccctgttcgttcccttcgcctttattttagccacatatttgccgcattatatctccatccctttttctttgtggtttcgccttcttgaaaagctgtaatggtcgccaggaaagcgttgacatgcggcttgtaagatcgatcgctggctcggatgaagcgggacaaaagacgtttccttgctgttttcgcagacgtacgccacttgttgctacttgtgtagtgcgggtataaagcgccacgcgagaaagcgtttcagcgtctgtttcttgtttcccgttgacgtgactttttcacaacgcaaaaagaagacgaacgtctgaagataccgaacaggggttcccgattcgccaagatgtttactcctgcttcattcaccccgtttattcacagaagtactcgtacgtacgatatgcagtgtgcacacatatttgtataaatgtcacccgtacctaaagtgactgtgaatggacatattgtttcgttaggagacaacgagcggaccagcgtgctcgtaccacagcacgaggaagcgaccgcgtatgaacctacttttggttctgtgactcttaaccgtctttctgcaaccaggaccatcatcctggggtaaatcgacgcgggaaaaggcactgagcccgcgtgtgcgccacctctgtgtgtcttttgtcacttcatgca

SEQ ID NO: 1959 - DNA, 2137 bp, Toxoplasma gondii
  source 1..2137: mol_type = genomic DNA
tcatgcaaaaatcattgctggctgctctcgtaccaacgacggaaccactgcaataaagtctccacagggtgtatgtggtcacattctagtacatgcgacggtgcgttggctgcggaaagtgaatgacgtgctactgccgccgtttcttgtgtgtagaagacgtgtagcagtcacaaagaaaactagctttcctgagtgtgctggtcgtgtaaaatcatgcgatggtaaatatcaggtgctgggtctttgcacttcttttgcatgcaccaacgacttttgaggtgggccatcattggccacacgcatcgtgggagctgccactttcaacttcctcttccaaaatgggaatgaagtgtcgtattttcagtaactatcaattcacagacgtttcgcttcggcagcccaagagcacgccccaccttttttcctgtcaatccaagaaaccgtacctaaccaacgggtgtcatttaactaaacttctccgattcaccatcgaatcgcacgccggattccagatgggcatgcaccgatataaagtggtattgcggttacctagtatcccacaacttcaggttgccggtttcctaactcatgccggagctcaacagctccgatgggccgacttcgggcagcatgtattcacctcagacatcattttaatccagagaaggtgctgatggtgtgtccagcatgttctctcgcatgtcccaatgatcgaagagaaacacttcctgatagagtgattcaaatccttaggtagaggcctggcgcctatttcgactgtgcgcctccgtcaccaggatgcttagtttctcatgcagaattcctccttttgaaaagacatttaccagtggtggcaattctgagtgcacaacagacagcttacccagatctgtcaggcatactggcgctaacagcatctgggcggtagcgtgcattgacaagctctttacctgttggtattcagctgtacgccggctccgtgcatgcgtagttcatcttgggcagcagtggcatgcagcatcctaataaaggcatatcttttaccgagtgaatgactgcagtcttacaacctagttagctgctatagaagccgtggacgattcatgtttggtagttgcgacgaacaagacaggttgggagttcctgtcgaacacattgggtatagtgtcgcttcgtgtgtgccggagtcgaacgcctcacttatccagaggcacgaatgacgcttggtgtgcacgtttcatgtttcctggtggatattcatcctgcaggtttgactgctggcctgctaatagctcaacgggagcccagggcccgcctcgtccatgcgcatgcaaccgaaaatgaacatagcgggtgtctctaatatagttaggcaactccgtatgatgtacggggtttcgcaaggaagagctgacgccatgtcactccaacgtcgctccgcttctcaaatgtattttcattcttcgtgtgcgagagttaagcgatgactcaagatgctggcccagtctgcatgcaaacagcggtaaaatcgtcggtacaccgggctgcctgatgtcaatttaccgacagctggatgaccgcgaagaactccttatgacttaaaaggcctctattccctctccagtgtattttgttctttttctgtccttccagcgagtcttccgtcttccacgccgctgtcgtcacgtacttgcctcaagcagaccttgccgtccggtttcctgaagatgcgcggcgaggactgactgatcgcaaggttattcctgcatcagtgcagcgtgcgttatgaccttaatgcactttcacaggcaactggcgacgtctgaactccttgtttgccgtgtttctccaaattcttccactgctatctctcttggggcatcctctgtgtgactgcctcattcttttcactggtcagcgaaggtagtctgcgcttgtgccggccaccggttctcgttcatttttcagcgtgtacaagtggcaggtactcatcgtgcatcccactctttctgggcttctgttttccgccacgtatcttgttgccatcggcactgcgaatcagctacgggcttgccactttctttgtagtctacaaaagacatctcaccgagtgttatcccagtcaagaaccaga

SEQ ID NO: 1960 - DNA, 1948 bp, Toxoplasma gondii
  source 1..1948: mol_type = genomic DNA
gttctggcagtcttggcgtcgacgcctccgtgcagttttctcttctcgccgacctctgccggaacgcctcgcctcttcttccctccctccagggagacgccgacagacgcgcatgcagccgcggccagcgcgcgagccaccggcgtctctgcggaggaaggcaaagccttgtggagagacagcagtgagtctccgcccaacgcattcgccagacaaggtgtcgagcagaaccagcacaagacgccgtccaccgtcaactcacacccttcctcaagagaagaagcgactggagaagaagacgaagcgccagaagaaagagaaggggacagctgagtgtctatctgggaggcggtgtgggatccagagggggaagtgtctccgggaaggacacaggtggtgtggggcgaggcaaggccggcgtcgacgggggcagggccaagttcaggtctgtgaggcgaaggagaaggcgaggagacgccgggagccgacggagactgaaaaggcttcagcttcagacagttctcgcagaacacagcctcggagagcggaaccgacgcgccaatgggccagcagatcagaggcacctcgacgaggatcgtctcctcggactcgagcgcccgcctcgcctgaaggaatttccctttgcatgcgtcgaaggagacagagaagtcatacgcctccgtcatcaacgcgtagtcctggaggtcctccatttggacaagcaaacggctccacgaaagatagtgagaaagcgagacggagaaggagaagacggagaaggagaaggagaagaagaaggactgcaagacaggaggggcactggaaacgagtgaagaaacttcaaagcaagaaggcgaaaagagatagaaggaaaggagaagaagagagaggacagagacaagagggtcgcgcgcggaggcctgaaagtcggagaccgcatgcaaagggccaagccgacgcaggaagcagacagggaaagtgcgagagagaagacgagagcagttgagagaggcgagacgaataaactatgacgaagcaacagaaaggaagagacaaagaagaagcgagcgggcagaggtctttggggaaacgatctccgtgtcggtttctgcggggccccctccttctccaaagagaaaaacgcggagcaccttcctcgtactttcctctttcttctgtgaattttgttccttcagacatcttttttcaagaaacataaacacaaacgcgtcctcctcgtggctggcttcctcccgcgtcgctcgttcagaagttctccttccagatgcgaaaaaaactgcatgcgcatgcaacggcagaaaaggccaacctcagtgtgcatttataagatctacggcgcaatgcaggaagcggcgtctcttttgtttcctgcagaagcttctttggacgctacaagtatcttttggcggatgtaccttcttcttgtatcccgttcactggaggctccgcgcctcgatgggcactctcctctccgccgcgtaaaagggcattctccggcggtgtgtctccgttttgcaagaactttctcccgttttgcaagaactttctctctctctctgtctctctcagcgttcttcagaagtcgaagttcttcctccttcatgacacacctgcgttgcagatctttccccgtccattcagttccactgcgtctccgttatcccgccctgtctctccttttcgtctcgttcttctttatcggtcgtcctcgtctctgctttgctattccgtgtcttcatcatcttccttcgctttcctctctctcctcgcttcttccctgtggcgttcctgcctcgctctctctttattcctcccttcttttctccctccgtcttccctcttcctttcaatttttcgattcggcctccttctgcgcaactttccttcttgtctctcttgtcggtgacctccccaccgccagacacga

SEQ ID NO: 1961 - DNA, 5003 bp, Toxoplasma gondii
  source 1..5003: mol_type = genomic DNA
atcggaaggtaaagacgtaatctctctaacggcggtgagatgcataacggcctccagtggaaaaaaaaagtcttgtcctgtgagaaagtgtaccgccagtccttaaagttggcgggggaaatggtcgacgctaatgcatgtgttaggcatagcgatatatatatatatttatatgtatatatttatatgtatatatttatatatatatatatatatatttatatgtatatatttatatctgtggtaaaaagcacgtgtgtacgcgtctccacatttacagggatctgcatgcatatagaacagcggtgctgggacggaagaagccaaaaatggcgcaaaggtgaagcgcagattccagtggagagagccagtgagacagcaggggtgttgtcgctccgacaggattcagatgcacacagatgatgcaacaacaaggcgtcgctgcaggaaaagagtcacggtggaaaaaaaagtagagggaaggaccttctcacagtgtggactgcaacactgcaagagatacgcctgccccgtggaaaggaaacgcaggtctacacacccacactgacagacctctgcgttgaaagctacatctgataggcatgcacccccggttgccggttctgcatcaactgttgctcgaagtggaaggcagcagttcttcggccaagtgaccggaacagaagcaaagtcaagaaacagagagtctccaccgtccccttcactggatgcaaagcctacctcaccgctggtggcacgcttatgaaatacacacacaggctgttctcggaggcagcatgctgccgacgaacaacgcagtaacttcgcacgtcataaacggcatcgatgaacgcaggcaccggttatttctcacgagccagtgcattccaacgagagattcacgaaaaattgggaacgaccgcgactttcttcgtggatcctcccccgagagggtcggaggtgcacaccatgcacggcaggcgtcggttcgaaaaggaagatgttcaggtcccaaagcgggcacctgagtcgtcttccctgaaaactgcgctgaaaacagacgcctttctctctgcgagaatccccgtttccccccgtttctttgcctacttgacagttttaaggtccgaacagaagacggcacgcgcgcccgtcctccacgacgtctgtgtccaccttgcggcgcctcgagaaaaagtgcaaattggaagccagggcgcaagttcgcggacgcgccgctggtgacgcagagaaacggaaaaggcgtccgttcctgtagattctggcaactcaggaaaagaggatatccgccacggcgtagcgcagccggaaaggacccagaccggaggaggcggcaggaggcgacgacgcccgcctctcactcttggctgtcggcgtaaagaagactggcagtcgaggagaaacgccgcgagcggtcacagtttgccaggcgcgtcaaaaagtgcacaagttggttttgtctgcgcattttacccgcttcttttctctcggtggattacgggaaatgcacgagacagagcgggaaaggaaggcgggagaaagtgcgaaacagcgaaagacaaacggtggagacagcgccggatcgcagcagaacgaagcagctctgggatgcggagaagggggaaggaaaaaagcagagggagaactgagaaaagagtccgtctttagcggagctttttgactagacgtcgtaaagaaagcgcagttgaaaaggcagtgcgtctctttctccggagggcacttccgcgcctccgcagccgcaagacacaaactcccacgggaaaagtgcagaaaaccagtacaaggtaaatcagcgaaagcagtggcgcgaggcctgtaatcctgcctgaccgtagtatatgcaaagcaggaatgttcagaagacgataaaacagacgaaagtacgctgcagagtacacagggtttgtgtaccctgttgcggttgatttctttctgaaaaccccgcgaaggcacagttgctctgtggtgtgacagagattgcagtatttcggtatcgaaggtgcgacaaatcgagtgtacacgggtccaaagtcgagaaatcggaaaggcatcactcctgtgtttcaccatctctgcagacactattttgccaatcccgagccccgctcttttctgttgagtgcagtgtcttctcctgttcggggatctgcaagctaaagcgagaaaccgccacagaacaccatccgcaacaatcttcttcacgaaccgagtgggaagcagcagtcctggtgagaagtgccaagccttcacacctgaacaagcaatgggccaggaagttcgcgtctaaaaaaatatggctgagtcctctgaatctttccgtgtgaagagagcttcttcaccttgtgagagtattacgattccgttttctggaagctgcatggtgtgtcacatctttagatcttagactcggaagcgcggattcaactgcagaaacaaagccgacggtgagcaaatccgttgaccgatctgatcgacacgggcatgtgcagttgaagtgtcgacatttctgtgcctgtgaaggcttcttggttctgcctcagaaattctcatttgtagggaagatgcgttctcggtagactcctctcccacatgtaacatatgtcctcactctcgagatggtgcattccatggggggaaaagcctcctaggctgcaccgagaaagcgagaagcacaaatttctcagagatttcccttcgcaccctcgctctccggttatattggaagagagaaatctacagagaggcacagggtgtttccggagtcccccggtacttcgttgttcaatctaaatgatcagaataccggttccgtcacgtgttatgcgagttttgtaaactgggatgcatcctaagcaaatacgcgaccttttcctttttcccatcaggattctccttcttcttccacagctaagttgtgaaagactcctctccggcaaccacgggtatgtgcagcttcaacgatttagatgatatccattcagcaaggggggcaccgcttaaagtgagactcgcttaccgttgtgagtgctcctgaaacgatagactggtaaacatttgaaaatgtccctgagaaagtaaatatgcccggctacacttttcgtcctagaagtgaaggaaagacgacacatgatttatcctagatctgacgtgtctcccaatttcgctagcaggtttacactcacctagaaaggctttgtcctttgttccagcgctcatccacaaccgccagccttgtacgtgaacataatgtcagaaaacttggagacgtgacacgcagtttcctgggataaccgctgatgtttcttcacctttctgttcaactcggtcagctgactagcatttacaattatcataaatccagaactgtatacctcaaatcgaataaacgcatgagctccttacaccccgttcctcacacggaatccttcggtccaattcttttatcgcagcaaaaatagaactttagcgtgagtctggactccaaaaagtagcgctacagcagaggttagcgcgcggcggcggcatggatttccaccacttcgacctgtgtttttgtctgctgctcaaagcttgcaccgccgtatttctctcttctccccttctcgtgttcacagctctacaaaccgtgcgcggaagtcaccgactccacaatcggaaactttgacctgttcaaaggcttcacgttgagaaaccgcctaccgttttccccttctaaaacataccgtttggtgcagtccatcagttccctcacgaaaaacgaagtgttttcgtcctcacaggatcggaatgcgtagaggtgcagcggctaaccgcaccgtccaaacctcggaagaacattctttgtaaagtgaaaaagaaaagcagacaccagcacactgtgatgcagcctgtcccgccctgcaaaacggcaagcccccgaaaaagaatcctcagggcagcgtgtggagttgcctgatcagtgtgaaggctttcagcgatcgagaggttgcgaaactgcgagagacttcgctgccacgagcagattttatctcttccttttttttggaattgcgtgcatgcaaccattgctgtctcttggtttttgcccaccgggttggggcttgctggatgccgtcactgtgcctgggcaggaagggagaaaaaactctctgaacatttcatcgcttcttgtcgctcttgtcgcgtctctgcgctggcattttctgtgggattttcggcctttctttcgggagaaggatgaacagcttttatcttggttagctgtttcctacagaagcgcgaaccagctcgtctcccctgggatcaagccagtgctatcgagtccctcccgaaatagtcttttctcccgtctgcgttaagttggcaaacccccgcttttgtgcgatgaattgtctcgaacacgtggaagcatgaattgactgaatatctagcggagaaaggagcaaagttctctttctcgggcgccgtgcaatcgttccatcgtctctccaacaactcagctgagtgtgtgaatggctgagtctttaccgttctttttgctcgttccgttggcttcaggcgctttgaggaagcaggcaatgcacgcgcggccttcgttttttcgatttcacgcttctgccaagagctaggtttcgccatccgaaactgccgtacacctcccctcgtgaacgcaagctttgtacaccagcatgcttcatctcttgtcctgtctccaaaagagaggtttgcatggttaacagtccgtgcgtaggcaagagtaaggatcaacgcgtggattgctgtgtatttctgtagcactgatattgaggtcgatctccagagttccgagagcacgctgcgttggggcctttgcacgctgcttgcgctttgcgttgttgtttgataacatttctttttttgaaaggtctctgtcgactcattcggcagcagtccctgaaggacttctttctttctcatttcca

SEQ ID NO: 1962 - DNA, 2446 bp, Toxoplasma gondii
  source 1..2446: mol_type = genomic DNA
cttgtcgggtgcgctcacctccactttccgttgtcgcctttacatggagctctgggcaggaagacatgcatttaaatcagtctgtaagctgtcaagaaataaccgacttgtgtgggagtggcgcaaatactgcgtcgatggcatgcctcgcctgtcgattgggttgtctttgcatgcatcctctggaacgaagaacgtggaagtgccgcagtctacgcatattccgccgccagtcacttaagcgtttgttattagaggtgtgcttaacggtggtccgataaagatgcgcaacagaaaaattagagtgcgatatacacagtcgtttcacaatttgccactctatcgacgatcgtcgtgatccaacataaagatgtcttaatattttaagagtcgcttgtccagacaggacacagaagtggtgtttcctgacagtagtgcgtcgattctttttcgtgaatggactttagcttaccagtttcgtttagtaattatggcaggacaacgtttcaaggtggaaacttgtgagagacactgaaacacttcacgaaagaactcggagcagacgtttcatgaagacttgaattagaacgacgaggcagcctatttgcccacccagatttttcggatcgtcgcaagaagttagcgaatcatagtgaaactcacaatttcaatatgccgaaggcattttgctgctaatctagcgtagaggcggcttttcgaatatccaaaaaaggtagagggctatgtgcataggtaactactttatacagctagacaagctagctgctcagtgaccgataaaaaaaatcatgttcttcattgtgtggatagtgttaggagtgttaacatctcatattgatatcattggcgaatacgccagcaacaggaattctctttcagtagtgaccttgttgccggtatctactcagggaggttggatctgaaagtaactgctttctgatatacatgaaaaggcatggttgccactgtgccgtttcaaggtgaccgcacattccgcagttgcaacaaacgctcggaccaccacgagtcaggggtgaatcgagcacatgttctagccttctatcccaagcccgaaggcgagcgctaaatggaaaaccgaagacgtccgatttgaaagagtgcgctagactacggaactggagcagcttccatggcggccgtcacaaataaatgtgcaaccgtggggtacgcgcgctgttgccggaagcagtggaagtgtacccttttagagaccgaaaccaattcaaggtgtcgactgcagcctcgtcatcgaaggaaagaggaacacaccagattggggcaatcggttgtgcaggaagacttgtgctgggaaggttgctgacacacacatccaacaagccaacgtatttaagtgcactcccgggacgacaggtgttgccgcctagttttggagttcgtcgggatctacactattcgcatacgtgtgaaacaccactacttatgctcctggtcagagtaactacgataaatggcctaatgttcgactctcgagtgcctatctttaggatcttggatatctgtcctttttacagtccaggaagctgtcccgccacccgcgcacacccccctgtgttgtcgccgtctagccagcgaagtgctgtccctcgtccgcagctgctgtctacagagttgtgtcggcggtcttcccctttccagcgccagggttcatttcatagattgccaaaaacccaatatactgcatttttttacacgcggcacacagtgaaagctctttcgccttcagctcatcgcgcttgcacccttcgattgtcagggtcggggcgagcgtctagggcgcaaaacccggaacatcgacgcccgggtgtgtttcgggttcgattcgggatcggattcgggtagttagctggtgggccctgttgacgctagatgccgggaggcatacggttttgttacacagcttgaaaggaacaagcacacgagcatcccccttctcgctgtagggacctggagtgtcttgcaccgtggtggcattgggcgtgtcgctccctgtatcgtttttccccatcttgctggatgaccctgctccagaagggcggtcgattccaggttcagttcaatcaaggcactcgacgactgcttggcccttttgggtcgccaatccacggctgcgaagtgtgttggtgccaaatctctctttaattccctcttctttcgcattgagcgcagcttcagggaagcactgtctaccgggcaacgagaaataaatagtgagacagagtggagggtttgcgttggatgtctagctcgccgtaggccgagggagtgacatgtttcgcttttcctctccatgactgtctcggaagaaggtttttctgatgccgtcgcagcttgccaactagccaaccattaaagtctcgagttcttgtccccggcatccaggaaa

SEQ ID NO: 1963 - DNA, 2143 bp, Toxoplasma gondii
  source 1..2143: mol_type = genomic DNA
aagagaaggatgaagggcttgcctactacagaactctagctatgttacactcgtcgagcaaacgcgacgtgccgccttgcgagtttgaaatagtgaaacctttggctagcagctaccgcagaaagcgaggcttcagttttcccactgttatatcgcaaatgatattttgtagcaatcgtactctgtctaaatttccccctcaaagtgtaatcgatgctttgcttaacggttttttcggcgtctttagccatcatggccagcagagcattcgcagctggtgaagcagcagtacctcttgcacagaccggaaatttcagtgccattgcagatggcggagcagtgccaccaccgctctatcatatgccgatgtactcaatgccattgcaattctctgacctagagtctagggcaccgttacccactacatcaacaaatatcccggacgtaggccgtgcttctcaacctggcggtgcatcacttgagatgttgcgacagtcgtcttctgactatttacacgctgccccaactaatgaccagcagcccaggaactccatatctccggtaataattgacatgccagatgattttcccgtttatgacattcggaggccggagataaagcaaaaccaagcgcctatccaacgtaccaaacgcttcgagttaggggaaaatattccgattactttctccttagaacaggccaaactgcccccatcagctgacggcacgtcagcgcagaccaagcagcggttgcaagaagggagagatcagacgggatcacctcctggattccattcggcctccctgggggggccgcattcttcccaaatgcacggccgagcagaagcagcaaattcatcacagtctgctggactgtctttacgacattcatggctattctcttccactcgagaaaaactgtttgatgcagttgaatttatgaaaagcacagggggcgatctccaatacccagcacccgtggttgtgaacccgccaggctacttcgttgacaaacccttgcttcagcctgctcacagcattgggactcccgaaattcttcatcggaaacccgagcaagcttacccccccttcgttcctgcccgagaaacgcagttgtcaattcatggagaggggacccatctagtaccagatatccatgagcagctttccggatcagaaccagcagtgtctggcagcatggcggctcctcagcacaacgtatacgtacacggcaacagtctggccccatcgccacccatctgggacattcctctacccaacgcagatgcaccctccacctatacggctaacgtgccacaaggttacattgtggaaaaacctctcctgtctatccgaggagcgaatctagcgtttccgttggcggcaagggcgtaccagtttatggtcccacgtgcagagctatttattgcatcatcacgatacgcagaggagtatctggaccttgtcgcagctctgtactgcctattccaaaaatggccctgcaacaatgtggaggagtttgccgtgcagacacgactgcatcagcgcaatgcggcgacaagcagttcaccacaccctgaggaagcactccctagttagcgacaatatagtttttgcacccctctgtggtttgtcatgttgttttgaaagagactatctttctgcaagggatgcactgaacttgaagcaactatggtagtttgtacggaactttgaacttcccttatcagaagacagtacaatgcaaacgggtgcatgcggtctctacgccacaggtggcggcttaaaatggggtcaggtcagatttctattggccgacgtgcacccggttcaacatcagtatcggacaacccttgtgctactgtggatccgatggcgactggttgtttctgcctgcatgtttatctgtgcaaatgacactgtattttgtggacaaaacgaacagttgtatggtttctctagggcttgaaaaggtgtcaatcctttttcgccttcgcatgcacacgggtgctcccaatcccaggggcgtcggggtctgtgcgtccctcgcgtgactcgtctggtttccgcagcgaatatctctattgttaagaaagcatcagttttttgccggcgggcacagcagtaatcatttcggcttgta

SEQ ID NO: 1964 - DNA, 1369 bp, Toxoplasma gondii
  source 1..1369: mol_type = genomic DNA
aaaaggagagaaaaggagtgtcggtgaggcagagcgaagacggtgagacgaggcagacgtcgaagaagagcgcgagaaagatgggggtatttgaatttctcttttccgagttcgacgtacagtcttgcctgctccgttgtggccgacgatgacggtgagcggcttctcaaaagcaatcacctccaagtgatctggcgcaaagcagcgaatgccctgaacgccaaggcgttcgagggtcgccatgacttctggaaaagatgtttttttagcaaaagaggagaacccagttctggatggggcttggaaacgggagaaaacgtccagagtcaggacagacagcagaagagagaagacacagaggaaaaagagagaaggagaagaagagttggaagaagcgtcagaagcagaggaagaaggtgaggaagagagatgaagttcgcgtcacgctgtgagacggactcttcctctgaatagaagagagtctgtgaggagcgttgtcggtctgagcgttatttcttgaggaagcaagaagctgcatgcgccagaaaaacgaggatgctatcaaatgaatagaaagccaggaccactgattgatgtctatgctccgtctctctgcggtgtgtcacccttctggtcactcctcctctacaaagaaagcacagacgggagatggcccgcagaacgcctagaaatctctgtagagaaaagaagaggcgtcaaaagacatgtctctgatggaaagtaagacgtctctccgccgtcggcaggcgtcgccgacaagacacccaaaaaggggggcatgttggcgtggtggcggaagagcgacagaggcgagtcgacaacgacgctggccgctcgagctctttgtcgacgaaagaagagacccccttccccagagaactcgaggagaatcaaaaagtgaatgcgtcgaaagcgcccgagcaacgtgaaaagaaacgcaggaaggcgcttggcgtcactctccgacttcgcccttgagagtcggcgccagtcaggtgtacatacacctcacggagagtcggtctctcgcagcgccggagcaatggggccatacaacgcagcgcgatgggtgtttgcgggtcattgtgcaggagttcgcgttggcttttctagcttcttctcgaaagcctttcgtggaaattcattccatcttgcgcatgcagcagagacgcaggcgcatgcacacacacgcgcgcgacttgactcgtttcgcgggcctcagttgaggaacggagacacgcaggcgcaccgctgtctcgacagctgaacttttccccgagtgctgctctgacggtgagtcgaacttcctcttgtttctctcttctctggagcggattttccggggcaa

SEQ ID NO: 1965 - DNA, 1783 bp, Toxoplasma gondii
  source 1..1783: mol_type = genomic DNA
tatccacactctgcctgtcgcacgtgttggacattcggcgagaccacttcaggttctcggctggagccagttccacacgaaaatccatctttttcgtctccatcgtctctcagatcatatcgtttttacagctcattcaatgactttctggttgcgatcccagtgttttcaggggcaacactttacgtccgccaaagaagtaaacagggcgggctagagaagtgaccagctagcctggataggcaggtgacacttgtgtttgcatttgacaatcacgagtacttggcacagcggcaaccttgaaaagtttgattaacagcggttcaaggatgactctctcgttcatgattgcttcgtgccagaagaaagtgttaggagtggctgttctatgggttgcaaaaagtagtcaacggttgcgtaaacatgcctggccggtccggcaacggatacatgaacgggaaacgcatcatcagaattgaagaattttcttttggagagttggtatacgtcgccccactcagtttacaggaaacttcagcacgttcttttgcgggtttaaggctggctcagcaaaatacgaagcaaagtggacctacgtctctcggaggttcatctaaagcctgatttatgcggtgtccaggggttcccccagtagcacccccgaaactcgctagtccctatttgctagtacacagccgagaaagctagtggctgtagtcagcaaatataaaacggaaccatgcttccacgatgtctaaaaacaggtaactccacttatataaacatcaaatcgtgagaatagaagcacacaagaatacgaaagaggtggcgcagctttgtcaatccaagtccccaggcgagctagtgctcgcccaattgcgacgtgtgtacggaagcgccgaaacatggccctagacaaatgagtttggagagaagaaaaaactcagaatggcgttttttcgtcattgtcgattttcgagttgtaggggagtctttcgaacgaaaaactacccactgaaataggtaatttctgccaagccactgggtcatctacataacgacatgcatccggagaccttgacgctggtcaccgtggacacaccactgcttgcaaaagtctgtgatgtcggctgtacccatggacggagtcccggagcaaaaatgcctcgtgttcgctagtcgtaactgttttgccaggctcgacttctgtgcagtgtattttacttcgccaatagctggctggcggagcatgcacagccagcatgcacgcgtagtcctggatttttggggggttgcggcttctttgagttgcggtgttttctgaatctgcttttctgcgtgaaaaattcccaagcaacaacatttcatgccctctggaccccgaaaagttgcctgctgcatgacagatggacgggcccttggtgaagcgggcgcgctatcacgggacgcatgctcatccagtgaggcaatcttttcagaaaatcgaggtagtgaacagtattgttcgcttgaactagtagtgttgagtgaggcgtcagactcaacgttttagtgtgtttcgctgttgtgcatcagcaactgctattttgtgagctgtatgctacgggtaatctagcgtggtttctgctgttctactaaaatcagagttgtaatccttttcactatactggagtcaatacgtgtagatttatcacattgttaccctcctaccgtccctagtcctgtgcggacccggcgcctctccctgtagcaaacatatttttccgatgttttttggcaggaa

SEQ ID NO: 1966 - DNA, 2069 bp, Toxoplasma gondii
  source 1..2069: mol_type = genomic DNA
tgctgtgtcactgctcgttcagcgtcctactgtctgctgtttcttgttcgcctttttccaccacatggttttgcttagtccagtcgggtggtggaggagtctagcaatccaacgaactcggctgtctgtatcttgtagctgctgtcatatccagacttctctcagagtgtctcgctcttctcgctgtctctctgactgctgtcaccgcgttcgaatgtagaatgctcacatgttaccatgaagcagcaccacttttccagagcagtcgctggttgacaagtcgcgtctaccccataagctacacacacactccctaatatatatatatatatatatatatatatatatacatatgaagtaacgaaagtacttctgtgtatgtggacctctcctggagttgctggttgaccaggctcagcgacagtcgtcagcactctcttttcggggatagcacgtggatactgccacgaggttctctatcttgagtctttcgacgcaagctgtgaaactctgggtaaacgcagaggtacactatggaagatcttctagtacaatagtgaggtctttagaggtaccaccttagatggatctacgccagcgagctttcgggtgcatactgaaagtggaaagccgtgctgcagatgttcattaagtgaaaggcgccacgggaggaagtttggaagtgcagttttctttcgaattgcccctgaggcagtagactacgctcagacaaattggctcagatgtgattaacaccgggaatgttttgactgaatgctccgtctatatggactgcattcggacagaagcaatctgacgtgtaaagtagaactcttgaacgccggcaagcatctgggatgtagctgttgaagctacggcccttcgccatcccagacggttcgtatctctctgtgtcgacagaaaacataagcagaaattaccttttacatcgtgcatccggtagacaaacagagtgcagatcacttcaattttgcccagtgggtaaagacgaatttgggttgccacgcggacgcgaaaaaatccacggctcgcagtggtcaatcggtgatgcctgctgcacttccccttctcgacttcacgtttttgagtcaggctcttcgaacagtgaacacctaccagtgaccaacatgctttctcaactcgaaaaaggacagtgtgtgcatcacgtgcgtttcgcttcggagcgttctgcagtatcgaagccgcggatctacagtatggtccataccgctgcccgacgcatctttgttcgcagattttttcccgcacaggtagtttagagtttgcgacagtttcaaaggtacctggatttcctgcgcagttctctccgctaagtattgcggtggtggggcattcgctcgagctttcccctcgcagctcctccaaaatcggcctacaaagaaaaaccccagattgccctagttctctttgttatcataatacatggtgtgcagttggttataattccccaactgtcgtcttaactatgctgtgcggacgcagtagaacttggatccggtaaacgaaaacctcggtaagacacacggacggggacgccaatcacccctcgctgtcgcaccagcttggtacggctgttcctcagctgccaccgatcgctcttctcgacacctacttgcgggtgattgtcattcctttgtgtggtttgtttgtctcctgtgttgacgcgaacagcgtttccagtgatttgagagctttgccgggggacgaggacttccagtcgccgtacccttcattttcaggtactgaactccgttctgcgaattgcaagcttgcgcgaaacgtacctcgcaatccagcggcatccccgatgaaacagatacctgtttcaaccctctccgcttaaaacgaagaaaaagcgctccagagagttttgaaaccgcgctctgacgcagcgtttgtgtccgttgaacgtacatagctttccgtatctcccgcttgtgtgtccggtgaggacccccctgcagaccatttaccaggaacagctggatttagtcgcgttttagcatttgtaccccagcatacagcca

SEQ ID NO: 1967 - DNA, 2164 bp, Toxoplasma gondii
  source 1..2164: mol_type = genomic DNA
accaacgtctgaggtttctacacgagtttcaagtctgcgtcgatcggcgcaagcgcccttcgcacccaggcacaagatgcagccggctgctgcattcgcagtgtctgaacagtcactggaaaaccaatgttgcctgtcccgggccggtcggagcaacatcccagcgtggttgcggcgactagaaacacagaaaaagcacactggtggaagtcaggagttccctttgaaggcagaggaagagtcaactcgacttacaggcgaaagcgggggtgcagatgaacccgcttgtgcgtgagacggacaatccgagggatccatctttccagacctcatgtaggcgcgcacaacagctgcgaccaatccctcttcgatggaggcgtggagactctgagagcagaaaaagggggaacaagagcgagacgcttggaacgcgtggatcgcgtccgccagtgcgcttctccaccctctactgcctcaccgctccacaagagtcccctataaacacacgcgaactgcgctgacacaaggcagaacatggcatgcccgggaaccccgccggtgtctctgcctttgcaggtttccttccccttcccttactttgatcgttgagcgaagcgccgctgtttcttcttctggagcgtctgagccttcgccagtgtcggcagagagcacgacctttcgttccgttcgtcgcgagtcgagctccagaatcggctccgcagcctcaagaggaaactctgccgtcaggactccctcttgagttccgtcagaaacggttacttccagactgtggccaacgacggtgcacttcacctgcacaagagcgtccggcttcttccctgtctgcgtttccagcgtcgtgtgcgggcgggcgtacaggatagtgactgtgaagaaagagcggttcgtttcttccggaggaaagtctgccgggtcataaacgacgcgggcgacgcggccgtccggcagacggacaaactctcccgacggcgtgctaagttcagaacagcgtttttgggaagacctgcagctctgctcggcgcgggcggcgctcttcaccggaaggaaaccgcgatcaaggaacgcagagtggacggcgagggtcagcgcctctgcagcgtctcggaaaggagtagacttcagcagcagcaaagactggaaagtgttcgtttcgctgtctacccgggaaaggtcactctgcgagactggcgaaaccggctggtgatccggaccattcatctcagcgcaaaccaccgagacgccttgctcgaaaaagctagcacggaagctgcgtgtgcacagaaacaggagaaacgcgacaaagaacttgacgtgaagtgaaaagtgactcgaggtgctaacggccatgacatcctcaaaccaaaaccacgaactctcaacggctttttcgccgctgcatcgacgagcgctgccggaatgcgaaaagccggctcaactcgagaaaaggtggactttcgtgtgactcggagaacagcggtggagtccagttgaaagcgagtgcagcgatggaagataaaacattgcggagatccttcgagctcaagtttcgagaaaaagtcgccttcttctccatcaacattgtgtctagcatgtcaagaaggcggcgaaactcggaattgcagggtcgagaaaccagctgtgtatcgaccagtgccgactggacatgcacgctgtcaaagcacagagaagcgtcaagccattaacaaattccagttgcgaaaacaatgtctgtttcctacagacagcggtctcttgagcagcggcgctgcccatttgccaccacttgcgggagttctgtcacccagagacgactggagggaacaaatgtttggtgtgcttggttgagactgcatgttgccggttctggtccaaagatacttctcaaaatttggaggctccaaaacttcttggcaaaaggttttatttccgcggtctgagcagttgtccaaaaagtgcgttttttgcagtaaccatcttctcgttagtttcccttgaattgcgccagcaactcagcggtgtctgcctcaaagattgtccactggcgctcgtctgcgtcgtgtggatctcttcagcatccgtccgtgtttctcttctgccgtggagaccaaatagtggattctaaggttcggataataaaaggcca

SEQ ID NO: 1968 - DNA, 1911 bp, Toxoplasma gondii
  source 1..1911: mol_type = genomic DNA
ccatgaaaacgcgtagtggtcgacaagtgaagctcaatcatgcacgtttccctggtctccggacttccggggagctggtgcccgcatgaaaactcgttctttttggtggaagtaaggggaaacagcagtacttgcaccgactttttccgacgcatacatcttcagtaccgcttccacggactagtcctgcagctccgagaagtgttgtcgatccctggaaccctctgtgtgcatgttggcatctgtgttgttggaaaacgataaagtatgactttttcggatctggccacttgctgttcggcccgtgcacgcccagacttcgttgatattggtggctgtcgggcatcttcagtcaagttctttgagaatgagagcgcatcgcgatgctcgctataccgacaaagaatgtctactttgcacccctcgactgttacgtggtggcgtgggacacggaatcacgcgtcgcgaactccatttgggagttcgctggggtggttgcccagaaaagagctgcgctgggattgataaaaaagcgtgggttccctaaaacggcgtggcaggattaatcgctttgacaccgggtcttccctcacaccgatatcgctctgtcaacctacgctaatcaatggttttctctgtaagccgccgtgccaacgcaccataaagaaacgaaaacttacaccagacaaaccactttgctctgtctcccctcgaagggaaactttttcgcaagaatctctgctacagttccactgaaactgcagccttgactgctttgcctcaatcccacataaaccgccagctgcttcccgaggcacccactgtagccagatacgtatagtgaactcttctggtttgaccctaagtacggactgagtcaaatagatacaaggaacttgacacgccttagcagatctacataaacgacacaagggtatcgcgcttttagatcaatcgtacagaatatcaaacctagtggtgcgaattccttgcagcgcctgttgctgcaagctcgaattacaacgatgcattttcagattcctgtgtttctgagcggaaagaatgtgcatggcagcagttgtgaatttctattacactgtatagcgcatcgactgtatataccaatcccccgtaagacgaggaatctacaacgcataccagcagagacccaggcaccgcatgcagcatttgtgttcacgtattgcaaagaggaagaaacaacacggaatcaagacgatgtttggaaaatgagtgaccctctgtgtcccttcactgtcaacctggcatacgaaagttgtcaagtgctgctcatgtgagctcgaaatttccttgcctttggggagaaaacccccttccgaaactatcttctgtcaaaaaccccaaacaactgaggcgtcaagtcttctttcctttattgctgcgcgctccgtgtctcctgctttcgagggtctgtctccggtcccgtcttctcttttatccttgcaaagtaccaacgcttgcatgcacacaccgtgtacgcgaacgtcaaacacagagaaaagcatgtgtcgcttgtccctgctggaagactacgaactcgattctctgacactttcgcatcgtttcaccatcaatccttctcgaacttgagctggcgtcgtttgcttgccattcccacgctgcgtgcggcctttttcacggcagaggggacgacgaacctggttagtggtgcttgtggcaattcgcgccttctgttccggaggaatcttcgtcgaggaagagcctaacacgagaagagagactttctccccatttgctttctctcgtgggtgaaaggaattccgtttcgttcgtctgcaggcctcgtattttaggagcgacaaggcgttcccctccggctctgtcccctcgcgaacagtgaagaaccaacaa

SEQ ID NO: 1969 - DNA, 1943 bp, Toxoplasma gondii
  source 1..1943: mol_type = genomic DNA
gacaaagcgggatattgccaggaaacgatgggtacgtgcacggtgtgacggccgccagttcagagcccacttttctctgcatgttcagggcaaaaatgcgtttttttgttccggacgagacatgcgtggaatcaactgtcgaggcgatgccttcatgtccaccgtctctagatttcaaatccagatgtcgtaatccggtcgctctcgcgcttaccgaggtatcgtcacgtccattccggggtcacatcgccgaaaagagccggacaggccggtcccgcttgtctatgttcctgctccgacttcgacaaacttgaattcgtcttcggaacgagaccggggggacttttctcactaaactcaccgagccaaaaagtcgtcttcgaaccccaacacgagtgttcgagtggacgagagcttgacgagctatttttgaaatggccacacgttaaaacctatgtcgagtgtttcttggaactgtggatggaaaagcagcgcatatggaacggacgtgacacgtgattggcttgaacaaggtcctaatggggaaaaactttgaaaaaaaaacatggagtgccttcccaccgtacacataaaaaggccaccgaaacgcgagacgcgcctgtgtattctgacaagcggaacgaacacagcttcgacgggctagactcgactggtgaggcagcgcaaacgaatgtgctacggaaagaactttgacagacgtttcgaagcgaaaaggcgaatctggaagacgggaaaggaatgcagcgtccctgctgcacacgccgagagtagtttagtgggctgcagggttccttctgacacgacttgagagagtgcgaaacagtagcactccgagtgatgctctctgagtccaaacggagagtggagaacaaatcgattggcgaactccaggtgaaacacacctgttgtcctccgcacgattgccgattgaatgatgcagcgctttgccgaatgctgccggaaccgtttgcaccacagacataccgagaagcagcatgccgttttgaatggtcaagatcttttcctctgcggagggaaccgctgcttagggaccattgacgcgtacgttggcgggtctcctttttctgcggcagactcaagtgaccatgcacgctttgaaaacgcatgcagcagcgtatacttgcagcacgaaaagcctgtcgctgggttcggggtgcccattctccgaagcaaacacatcttttccgtcgcttcgttttccctcttgaaagaacattcgcaaaaatcggtaaaatggtggctacttcaagggtgcttcttgcctgaattcggtctgcgtgcgagtcaaccaccctcagcctcgcatatatggggctggggtgaactgtctgaaccgggatgtagcgcaaaacggactcttcgccatctggaattgggagagtgcggcacggcgtctgttttctgggacgtgccgttgctattcgcttctctcaagtgtatcagccgcttttatttaccttcgacaacgacctggcagaaacagccaggagtgtgcatactgaatgtcgcccgtcggcgcccgtgactccccctgtgtttcccggctccaatctgtgtgagtttttaattcaagaacatccgcagaagttctgccttgggcattgaagcttactgacagttcaacccagcatcattcaagttagtcaactaggattaagaacgtttgagtatttcccatacatcccaggcgtaaagacttcgatgttctgtgccaactcgtgtaaagttgttttcgttctttctgaccagctgagtagaagagcggcgccaagttttttgccggaagacctgttgcatgccgcatagttggaggtaaagggcatgcgcgaggctccgacgcgcgttcgagcaccttgtttcactgacactcagccaaggcgagacacaggcgacagctacca

SEQ ID NO: 1970 - DNA, 4153 bp, Toxoplasma gondii
  source 1..4153: mol_type = genomic DNA
cctgtgtgtttgcctttttatgcggtgttactttgtgcagacaatggggcattccgaccttccagccgtcgtcctggactctcgtggactggaatggcctcgtcggcactgactacccctgcggggtcggggcgctgcggaacgttgtcatcggtaagttggagcttctgtttgaggattacggaaggctcctttcacagaatgtttacaattgatgtatggcggcgggctctctcgtctcgttctgcgaaggcggggggcgttcacgcgtcgagtcgcgtagccgtttgcgcgtgagggcgagggtacgtacaccaggagataaagacgcgagcgcaaatccagctgtcgcgacggacatggacagcgagtcggttttgtgttaacagatgcgtccaaatgttgaagaatggtgtctgtctgtgtgatcagtatgggtgaatttggatagcgacacaccacacacgttctgcgtccgtgtttctgcctgcttcttgctgcagtcgagaaagatgaggacatgcctaagggacagaaagcagtctacgaataacttgcgccgatggagggaggagcacgctagggagaagactggagacaagcgatttggcggatgccagaaatggtagaacagagaacggtgaaagggaacctacagcaagaacttctccggaaccggagagacgctgggcatgtctactgcgagcgcgtgtcgccgttcggagctggacgtccaccgttctttctggttccacgtcttattttgcttgacaactgccgtggaaatacagtacatgtttcattttgttgctgttcgcctttgatgacgacgaaaaaagaacccaaattcgccggcagagtccgtatttcgaatggcgagaatggtgaagcaggcaaggtggggaacgtgtcttacggcggaaatgcctgtgcacgagcgaatggggtgtgttaaggctttctgactggaccattcggtagagtcctcacatggctgaaacagacagaaaagaagaccggattcttaacaactgggaaagactgctatttctgtactcacaccgttagtgaattgcagaccacccgggcaaagcgcatgcgtgtcacgtcgcatcccggcgtctgcggcagttgtttttcagccgaaaacaactccatgacggaggtttccctgctacccaaatctacatacttcggggagacgcagactccataaaaagaatacagatatgcgttaactcgggcacatctgaataattcatctgccaaaaagttgcagaattatttgccgacgaaatcgtgtactgcactcactataggtacacatgtaaagatagctgagtatcgttctatctacacaattcgaggatcagttggagctaactgttttccagatcttgccaatgcacatcgatgacggtgaatggtatgcgacactctcgggggggctgtcggttgcccgaccgaactggatttctaaacatcgaaagatttccttaactggatataacgtgcaaatgcggtggggacagaacacgcttggcatcgtgtggtacgtccccagatatcctttgcgcgggaggcgacaccaggactcgggtgactcaagaactttcgtaccacgttgcgtgaacccaggattctagacttcttcctctgttatgcagcatatcgagattctggaatgtggaatgtgtagctcaggaaagcgtagcgttttgaggtgggctgtgttgcgatcatcaagcgagaaacgtactgatgctgaactttgtcggttcaacgtcactcctttgtagctcagacaatgccggtaggaaacaatgaaggtgacgctcatcggcatcttcaaacgacagcacgaatagccgccgacaactcacagagcaggcgagcactggtataccttaaaaggatcgaataaagtgcttatcaaccctagtgctaaatgctacaagtcgtttctttcacgctggagccctccaaatcaacctctcgtttgcctcgttcaacgacacgccagttgagcgcgatcgctggtcgtagaagtaatgcaggagaaagaggagtttggggatataccacccgtgttggtcgagtgatgcttgagaagcttgagttgtgggatattctacgatatacagtcggccagggtcttccactcagcctgcactgtagctgagcaacaccggtacgcacctagaacacccgagagaaagcaactgatcctgaagagccacgcgttcgtacgaaaaggacttattttgacaggctgagtaagcccgcggtaaagcctcagtttggaagcagcggaattcaagaaacaggactcgcctcacacgagaagcggtgcctgtctgcaccctttctccagacttgacagcattttttcgtattaaatgaacagaggcgtgacgtattcgatctggaatattcgtctgagggaaattacgcatcgcagacgccatgaaacaactatcgcgcagcctttcatcagatggtttcactgagcatgctgtgagaccgggctgacaggtcctatagctcagttggttagagcatccggctaataaccggaaggtcgccggttcgaccccggttgggaccactcttttgtttccgaaccatctctttctaggcattgagccatgtagtacctgtctgtgtctttttgtttttcctctatttctgcatatacaaatgcctctcgcttttgcatctccgtgacggactagtggcatcagtcctatgcagtcctcccatgcatccgcctgttcgcgtgactgaaattccttccggtgcgctgttgcatcgcagtgattctcgtatttcagacgaacttcaaggtgctcgctatacaactcgcgcatccgcgattttagtgtgatgagcagctccctgacggccatctccaaaagtacacttccgacaagttggtagccgggtcctagatattaatttactcaatttaccgtgcttcgaggcactagttagttattcctgtcttgtgtgagacatggttccgatcggtgcgcgtcgtccacgagacgagacacggaggtctggctttgtggctgtcaaccaggcctacccacagcgtcagcgcgaatcttccggtcatctgccccttgacaactatgtcaacgagtgacaaatctctagatgtaggtcctcgcgtgctactgtgaccggaaaacacatagcccacagcggcaagtttgtaagaaagaattgctgttcgccaagtctgcctttcttgacggcagacagccaagttctgaggaacggcgcagcacttggcgatccgtgtggcttaacagattcagctgtgagaaacagcgtccggcgttttcctcattttgaccgataaatgactgtggttctgcggtcttgaaggcgccgttttctgtcgactccctccgttttttcaatcgggaacgatgcggtaccccacaggaggtcactcgtttcttgccgtcagcgcgaccgccaggcctgttgcccatgaagaaattagtgccgatcgtgtgagacctggatacagataagaatgggacacgcaaggcagagcgtctgtttgcgtagtgacatgctacttgcgtagcacgctaataaacataacgagtggcgctaccccttgacaggatagtgcggtgtgaccattggttcgctgggcgaatttccggcaaacaaccacatcgcctgacgcgccagttgacgtcgacgtttgagctgtgggttcaactgttgcctttataagttatgcagttactgcgttggacagaccaagccaccgcgcctgttatttgagtccatggcactggcagcctcgtggacgtggcgtgctacatatccacgagttccgttcgctgacgcgaaagacaagacatgcgctacttatcttgccagtcaactgctatatttgttggcggcgtatgtgccagctcacgcactatctccgctgtcgcttcaggcggactggctttgctgcttcaagagaaagcacgtctgctggatcctctcacgtctttgcagagcggcggggagtggtgcgtgcttgcgccggcagtgtaatgccactcgcctttcggttattctcctgtctcggcgtgttgactatcctttacgatacgaatagccggtccacgacgta

SEQ ID NO: 1971 - DNA, 1295 bp, Toxoplasma gondii
  source 1..1295: mol_type = genomic DNA
gatccagcagacgaagatggcgtcggtctcaacaacagaggaccgcgcagtggaccgtcggagaacgacgaagcagaggggagcagaggggagaagaggggagaagaggagagaagaggggagaagaggagagaagaggggagaagaggagagaagaggggagaagaggagagaagagggcgaggcgactttgaagagcctcgagtagcaagaaaaacggccgcgtcgcacgcatcactcgccgctcccgagcgccagagggaggctgctgcgcagcgcaaagagcgaaccattcgcttcaaaagaaaaaacagtctctcgctgtttggaaagacagaactcacaggacgaagtgccaagtcagtgtgtcgttcatatccggctgtaactgcgcatgcggcacgccgccctgcctctgcaaaagcgaaaactcgcgcgcaaggcggccgggaccgaggaaggcgcctcggcctcctcccttgtcgcgggacatcgaacagacgcttggagaaacgcagcaaccgagaggagcggagaagaatgcgcgaacaggtcgacagagagcgaagcgggggaacagagaggagaacgcacgaaggaaagaagaagacgtggagacgaagcgaagcggagacaagggagacaacgagagagcagagcacaggggttgcctctgaaagacttgaagcgactgagaggtagctgggcgagcagccactgtcgacaaggagagcagaggcgacgggagctacgaggaagaacaagacgaagacgcggtcagaagagactggtgtctcgcggcaatgctcgatggaggagaagcagcgtgacggaactgctgtgagttacggaaatcgagttctttccgctgcgtcaagcagtccatcgggatggccttttgaacagcagttgccctttctttccttcgcgcgctcgggacatgcagaaggttcgacagtgagtggggggcgggagagaggatccgcagagtgacacccgaagaagtcacgcgagacgccgcaggtccggaagtcgccgagacgagtgcgaaaccagcgggccgtgcagctcgcgcgacggaagcgacggagggaagggggaaaagaggagcagaaaaggaggagtggaacgggaggcgtcttcgccgctactgtgttctctgcggggcctcgcgctgtggtgttccgctcgaaaggacaacagagagtgaacatcccgcgagagagggctggagagagtgtgcggcacagacagtgtctgtttttcgcggaaagccgacagaagagacgcgagga

SEQ ID NO: 1972 - DNA, 891 bp, Toxoplasma gondii
  source 1..891: mol_type = genomic DNA
gtcgaccaccttgttgttgccaagatggacggcactgccaatgaaacgcctctggaggaattcagctggtccagcttccccagcatcttcttcgtgaaggctggcgagaagacccccatgaagttcgagggctccagaaccgtcgaaggcttgactgagttcgtcaacaagcacggttccaagccgctcaagaaggacgacaagggtgaagaactgtaaattgttgatcgtatcagtctgttccgtttcatgtgttcgtaacaatgttcgtacatgagcggttgaaacacggaagccctgtttggctcatgtttccgtcaatataacccgacagtaaattgttctggcaaactttcgatacatgcatgtcatcggttacgccggtgccgccaaggcaaacgcgaagttgtaaatacggacaccgaagcttaccgttcgtcacttcactgtaccgctcaatcttatcacaagtaaccggtattgctctcggcacgctggtgagaagaccgcggcgccatgaagttgcaggttgtgtggcgtcgtgtttctgctgcgtcagtagatccgatcagtacaaaacagccgaaaattggattaattcttcaggatatcgacgaggatgttggggctgcacggttctcagaacttcagtgtatatacaggtcgtcgccctgtagcaacacatcaatgggacctgcaggcatgcaggtgtttggtttctgtggtatcatggaagtcaatcagccgggctagtaaaggttgaggaacggcaaaaattaaaggctgtcatggaacaacaccgggaaacagttgagcgagtcataggtgtgatgttggagaaatgtctcgagtggcggctactgaagcttcgtcgcgggacgacacaggata

SEQ ID NO: 1973 - DNA, 3273 bp, Toxoplasma gondii
  source 1..3273: mol_type = genomic DNA
ctttcggatcggaaagcgccacaagcaatctttttgaaactggagacaccgtgacgctccgcagggttgaagcggttcggcagagctcttcagaaatgcgggggagagaatctatacggccctttgcaacagagaaaaacgtcagggcgttttcgggcagaagcgaacctgcaggctgttcgtccagccaccagacgccgagagcaaagagagcgaggcgcgccgggggggcaaggagagagagggagaggcgccagtgaaggctcggaaagagcgagaagacgaggagaagctgctggagaagaatcgcccagagcgcagcgacaagcagcagcagcagtcgcagggtcaccaacagactcgagaaggcgagagaacagacagacgcgccggcggagagaagacgagagacgaccgaggctggcggcggcgacagctgagccttcatatacgcgacagggacgaagggatgaactccagtgctttcgtcgccgaagacgcggtacttttccatgttggaagtcggcgaggacgcgagggacgacaggaacgcttgtgcgagaagactgcagaacagttcgcttctccacggcgagagaagacgactctcacaaagatgcagagagaacgaaggatcacgagaggagagaggaaggtgcaagactaatgacagagatagacgagaaaggatggaaatccgacgtttcagggatcgaggagaacaggaacaaccgacgtttcagggatcgaggagaacaggaacaaccgacgtttcagggatcgaggagaacaggaacaaccgacgtttcagggatcgaggagaacaggaacaacgagatgatgcgcggttctggaggagagagccgcgaaaagctgcacccgaggatcttgagaagcagaaagactgaaggaggaagagaaaccagggcaagtgaggagaaaaaaaggaaagaaactcgaaaagaggcggacgcctgaaactctctcgaggcgacagaccggcgcaggaacgcccaagacgacgagacacagcgcggcgctgtgcgatcccgatagaacgaggaaccttgattagttttgagtcctcttactttctgcaatacatggacgaaacgaacatgaaacggctcgttttctgtcagcaaaaaaaagaatttgcggaggggaccgccactccgagcctgacggtgctgcagcgccggtggacctacacctcgccggttctgcagttgcacagctgggtgagactgatttctgcggcggttctcggacattgagagagacggttttcgatctaaggcggaagcagaaagcatggactgacaggctgaggcgagaatggggcggccgtttctccttcctgcatgcgtatagatacatacacacaggccggagctggttgagggcgccggtttttgggatcggtgtgtgtcgaacgcgacgcgtccttcacattttcttcgccggagatctgtcgacgtggaggctttggactttgcggaagtcctctgcccgcgagagaaaaaacgtcgagtttcaagcgagacacacacacacatatatgtacagctgcgctccgccgctctccgcagcgcagtcaaccggcagttggctggcggttcagattcgctgcgtttttgtcccttttccatgaaaacggacgcctcgacgggaaaatgcgttttctacgacacagttcagctcgcctgtgcgcgcctctcccgcctggctcgcttcactgcgaacgtccgagcctggctgcaccggaggaaccggaagcaaaagtgactgcgagaccctcgggaggcggtgtgcgtccagacagcgcggccgcctgcggtttttgcgctcgtccggtttctcgcgttttcgtatgtcgactacagcgctttttcgcagcaatcttggagcgggttctctgttctcgtcggccaacgcgtagtcaggcggtcagataaagcaccgaaactgcactttggggggtacttctcgcgcgagcagcagagtttccagctccgctccgcgggtgtcgtcgcttgagccgccgcctctctctcatccctcccccgcggcgttttctgcgtcttctttcgagcctttccgcaggagggaaccagagaggacgttctccgcgtttcctgctgcagggcaggttccgacgcttctcggaattgcttgctgcgcgcttcgaacgttcgaggtggaaggttcgcctcttcgttttccagagtttccgacctgctgagaacggactgttcgccggcctccagcagcgagcagcacctgggagagaagggaggcttttctctgcggcgcgatgggtcttgccgttcccctccctcgctttcctcgcttttcgaaggattgagaactgacctcactctccgactatttcttgtttttctcctgtcgctcggcagccacagcaccccgtttgaatcgaagaaacatgtccaaagtctcctcccgcggcttcgcttctcgtgtgtctgccgacttgtcgctggagaggacctcaggggcgcgcatgcttcgctctttctcctcggctgtctctgcgtttctttctatttctctgcgtttctttccgtttctctgctttttctcccgttcatgtcctcccattcgcgttctgctccgtttttccgccttccattccttcttgcgtccagttgctttcctccactccttcccactctctctcggctcggtgcggctggccggggcgtttccggaaagtcgacaaagcagtctttttgtctggggaagttccagacggatcggttgacacgagaagaagcgttggggaatggtcagcgccgacgcgctgttctgcgagagaaaagtcccgcgcttctcccgagaaaagcggccttccttcctgttccaagccttcaaaaagcaccctctcctccgtcgtctgtacaccccagccgctggagacgatcacgacctcgcagctgcatcgtcctggagaagcgacagacttgtcctttgtaaggaagaacgaacgcgcgaattcttgtcagaagctgcactgtttccggctcttcgtctctccgattcgcgctcctctcaagtttttctcggcttctctccagttctcatgttcaacatcttcccgcagtcttgctcgcttgctctcgctttctcacgctcctccgtaggtctggtcgccggcagttctctgtgtccgccgttcgtttgggtcttccctcgctgcttcgctgctcttcctctcccgacgagctgcagaaacgacgacgccgacaa

SEQ ID NO: 1974 - DNA, 3776 bp, Toxoplasma gondii
  source 1..3776: mol_type = genomic DNA
tgtaacacttcggccttcaagtgttgtcaggcacttatctcagtacacccaggctggatgctgttgtgtgagtacatcgtgttcgccggagttgaacgggttttgtcaccaactgtaaagaaacgcagtagctcgagacccatttgaacggaagcaagaaaatgcatctgatttagaagaacgctctatcctcatgctaaggggacctttggtatcggtcaagacgcacagatgcaactgtagatccctatggagtgcaggagatctgcaagtgcttcagtttcagtcctaccggtgctgaaacgctagtactttaccttgggtcggattgactgccagtcacccacagatttgtcataacaagactcagaaagctgagaaaatgccacaatagaatcacatagagaatccgtatgttttggaatggcttcctcggaagcggagatgcactggctgctccgtttgaagcctgaacgttgaagggacaaattgacgccaaatacctatcttcttggtctgcatcgttacagtcctgtcttggtagaggggtgaatttgcctttttcactggtgtcagttcaatgtcatttcgttgtccgctcagacacgaacgactaccaggtacatccattctcacggaagtgcagcgctcttagtacacaaatctgactgtaaagtgtgttctgtgtacaagcattcgctttactagagatgccagctggttccaagcgtggcgttcgtagtattgattacaggaagcaaacgttcggggccttgctttggacgattttttgcttgacacttgaaagccgtcgaagttggctcccagttcctcaagaaaaattgcacctttccttgttattacagatgactccatctggaacaagctccgcttgtggcaaggtcgagccggttaccggggttcgcctggacagacacctgagctgccatcagattttgccaaaggatttccgaatgacgcagctgactcactacagaatacgcaccaaagaactttgcgggagattcgcgaagaaaaaaccaacaggtctgacgtgaaaaccttcgtgtgacgtacgaaaggaaaaaatgggacggaccaaagcaacaagggaacgagcaaaatgtgcaagtgactccgacagctctgagtgttctgctcccgcagcggaattcgtcaaagggaaagcggtcacaacgcggaaaaaaggacgactctctgagggagcagtatacacagtggaggaggtgttccttccgtcagtgtcacgcgagtcgctgttaacgtaagcgtcacctgtgcgctttacgaatagtctctgaggaactgtgttgtcaaatgatcaggttgaatccgtacagcgaaattgatattctctaccgacaaatggcgagcaacttggaaaaggttggactgaaccttgcgttcgattccctgggaacgtcatgactgggtgacaggcgatagacagagcacacagggcaggaataccgaagaaagcagctgtagacttcgctgaggtggaacatgtggcgacggtgggcactgacgattgttggtcatcgactagacataccgaaaacgactttcgttcaggcagccagggagcggctgaggtcgaaacgggacaacgtcgcaatgcagttcactgaggctggtaagagattgaccaggaaaattagatggcgtactgtttcaccgacggatcatccaacaggccagcaaatgcgtgtcctcaagtccaagctcaacaaactggctcaacgtatcgctgaagcagtgagtgcggaagtcagaaggcgtttgtgtctactctggttccacttgttcgcatcaggaggaggagaacccgaaagccattgctcgtgtctcagccgatattgaaacagaagtcgaagcaaccttccaacaaatgagacacaaaaaggaaaagaagtgtcctccaggcgcaagagctgctaatacggttcgtatggagaagcggcccaacgaagtgccgaaaggcaagcgctaccgttccgtgccagttgaccacatcggggacatccgtgggtccgtggctttcaagtgaccgttttgctgccaccggtgaattaccgtaatctaaggctttgctgcgcttgtccctatttggacatgatttagctgcgaaccgacgttttcgtgttgtcttgcagatcatcccaatcggttttggcagtgaagatgagatctctggtcattcgccgtttgcggcgactggacaaatcgaggctgttggttgttggcagctattcctttggctaagaaaagtcatggcagactctggaggcataccaacatgagttccactcgatgtgtgctacactagcctcctccgtactctcgtgcacttcatttcacagggctccaacatacgctaaattcaaagctaaacatcccctttctcagaaacacaattcccttctcgctgttagtgtagtcctgagtaccagaaaccgtgtaatcttgcggctgatgtgcggaggcattcgcgtatacgatgacgcttggtatttcatgagcttgcgtgaccgaacatgtgaaggtccaacgcataactggaccaaactcaggggctctctcaaataaacgtagggaaacgaaatttgaactttctataaaacctggagggccggacacacttgtccggtcatcgtgtaaggaactactcgcgcgctacttgcgacaattggacttgcattcatccttatccctacatgggagacacatttgctgcgacatgaacgagtctccatgacacttattccatcagaaaaatccaccctccttcactgagtggaatcccataatatggatcaagtcagacacggacacgtcagcacgtgattgagcaccggattttgcgcggcgcattcctggaacgagtgcgctgcgatctagaagagaaccggttgcggaactttctcttcccttataatcttctcagaaattgaaggcaccttttgagctattccgcgcgttttttttcgatcgacctacggactgacgaaactgaactagtcatgccgcgtccagcgatgcttgagccgctgtaaccgttcgtttgactcatcaagacagagttttctggcgtagcttaccgatccccttttgtaaccggtattggtacgagatcattttgcagaaatacaggactaggcgtcatcttgcgagtcggccgcaactgatactccacaacaggtgcttgctagttgacgtcggctacccgcctggcgttttcgcagctctcgctccgttgacaagctaacgttcgctacagcccctcaacgacaactgcggtctgtcgtcgctgttactcgaaaaccagcgttttctgtatgtgcattgatgaaaacgactctttatcaaggaacctgaccccagtaacactgtagatttctgtggccgcttctgtttccaagaaaggaagcagccccagctggttccgcatgtcttgcacccggatccgggtgtgatgagaggaagccattgtcttggcggcgagataaacgcagtggaaaagctggcacatctcgccttaccggaccccttttctccttgttttctgactcagttccgtccttggttgtgagaaagcctcatgagacttgctgaattccctgtaccggtcgctcggacaaaacacagaggaaacctggtgcgatgcagatgagactcgacggtcgcacccaggacggccacgtcctgcctttttctactcgccttcacagatctacgaaaacctcccgcagaca

SEQ ID NO: 1975 - DNA, 456 bp, Toxoplasma gondii
  source 1..456: mol_type = genomic DNA
gttgctggacgactcgcaactgcctaggaactgatgcggaagaattccagtgtacacgcatactagacctgtcggctgcaattgggttcaaaaaaaaactgacgacgaattcgccgtgaatctccaatacattggcacaacactcgtcgaacaacaaaggggcttttttgcgcttgtggtttttctaagattgacagatgtaaagctgctgttactctcgcagatcccgcgaaaacgcttgcctttcggccgatgtgccttgtcttccagatcttggtcccgttatgccagcaaaccatctgtgtcagcagcacaggcgcacctccacaaatcctgttttttgagtaaagcaaggttcaggctttataggtcgcgctgcgcctttccattcacagcagtatcgatgtgattctatgtgtgttttcgtatccggatgagccttgttcgattcacaaa

SEQ ID NO: 1976 - DNA, 2250 bp, Toxoplasma gondii
  source 1..2250: mol_type = genomic DNA
gaagtttacttgcattgacttgtggcgtagtccttcgaaaccatatggacctttctaaatcaccggaacgcagagagctacggataagagaaacgcaggcatacacatttgcaaatgatagcgattaccgcttgcacgtagttttttggcaattttatcatccagctgcatattttctacttttgtctaaaaggggcaaaagcgcgctgagttgcaatatcgctacgtcctgttcggccagccggtagggtgccgagattggtagtttagcttccagaagtcagcaatgagccacccgagtcaatttttggttcattccacgtgcacgtgaattttaacgacacacgatcactactgggcgagaaacaggtgtttgctgccggtcttgttgccctgatgagctgttattgtaagctcctgttccgtagtgccaaacttaaaagtgcacttcttcttcagtgtaaaaatcctatgttcgagggagagcatcataaggattctgcaatcagactgtttcgaatgtcagttcattttccagtacaaattcaccgtaaaccgtcgcgtttaatctggattccaacggtccgcagctatttggttcccagtatacgacacctttcaagcgcacgctctcacatttgataaaacctatgcattgacctttgacacaaaacgtaatattggggcacataaactataagctgctgttcgcggatggaggtgttttttcgcgggatactattggttcagggaccgccctgctactttctggccggacgacctgatcaacgcagctaagttagaaagtgtcgtgctctggccactgaaaattgtcaacacacagtccgcaggctgcaaatactaacggtaacgccatcgaagtaaagttgcggtacatatgttcggtcttttctagcaactgcaaaaccctcagtggaaaggcactggcgcctgaaacgtagggagacgttccagtgcagcaggagatgctacgtcgatggagtagctgcgaccctgatgtatggttcatttaatatgtcgaataagacagtctgtccaagttccatatagggacaccgccgagcaacagccaacgtgtccgatgggcctcttctgcgcgagaccatgtagtgacgaaaccagaaattcggcgtatgccggagaacattgccgatatattcagcttcttgcatatcatcaacggtcatgtgttctccgtagctgagcattcacatctcgggaccagaactcattgtggtagtgtcaagactgcatgtgaccttcctgatcgacgagtgacttgcagacaaactctgcatgcgtgttgctacaaccaccaccagtccgggactcgtctgtgtcacttgcccaaaaaaactcaccaacattaccagttcttcactgagaacaaaaggatcttggccgcattcatggaattgatctgcgcgagtctataaatttaccctgtacagagggaaaaccatggtatgtcttgcatgttcacgggctaaagcggttagagggggcttcgaggcaagcggattgcatgtagcgggaaaaaaccactgacatgcctgactcagagccgtatagattctgttcaaccaaccactcgtttttttcggtttatactaactgtggcttgtgagatgtgtctccgtgaacagggttttcttcgcaccaccagtgccgggtcacccggtccctgcggtggcggtcacacccggggtcagctcatgtctttcatttctatttcttaccagcagcagctctcttgctgattgtctatactttcccctacattagtacagccgcagcttcgaatcggctttgaaagttttcttaagcttcatctttccgtttcgactagaaagcaatagtgttttcgaagacaggctgcatcaccggaacaatggaacattcaactgcccagtgacaccatttctatatttcgtttttactaggacaacttttcgcgccgtcagtttaccctccattcagcgttcctgaaccccgaatgcatgattcgttttcccgtggaggaccaatgagcccccggaactccttcgtagaatagtgtcaggtcggtcatacaagaggaatgacgtccgtcctcgtcacccattggggctgagggcatggcgtttcgacgagtacttctgtaaacatatctttgacatcatctgtcccgtctcgtttgatttgtggaccggcaggtccacgttcattttctatttctagtccacgaaa

SEQ ID NO: 1977 - DNA, 1642 bp, Toxoplasma gondii
  source 1..1642: mol_type = genomic DNA
ttctcgatgcagacaagttccactttcggattcgtttgctgcccatgcctgtctcaacaggcctggacgacagtggtggatctacacttgaactgatctccaagacaagtccggagtcgggcatcgcaggtgcatctaatttagcgctggcgtagctgtgccacaaccccgaaaaccagtcacgtcgttttctccctctcgcatcagaagtagggaggctaccatctggccaaatatctgcctcggtgtcatcccgcgtgcttcgcctgacggagcgacgtgaggcatcatcgtctgtctcagaatcagtcaccggtgcgggtgaaacgccagagggcgctgtctgtaccatcctctcagggggcgagtttccctcgtcgggatgcatcgatatcgaggggcccgactccgccccaccatctgcgactacgaatgggttcaccatggctatcttggcggcatctctcgatctctccctctgagtcattgtatgcgttttgttgaatacgaggaaaatgcgtaggcactgccagcgacctgtgaagcatggccttgtcgcggcgcgcaacagtggatgcaagaacctgtctagatgaaatcttgacggtctccctcaagcataagctagtggctcaccggtattgcacaaactgaaaaaataggttcaactgaactggcgacaatgggtgaagaaaaatggcagtcgcttgctaacgtgggaaaaatctttttcatcagcatacacgctgcacgcgctttgccaggcccgcaccccgcaaacggcgaaactaaccatctccgtggaaggcacgctcaaaacattgtgaagtggtaaataaaacacagcggaaagacaaaacgacagtaaatcttgctcatctagggtgcacaaagccacctggacgacggggaacatcgtcttgcgaacacaagtcacagtcgagtcttgaactggtcaaaatctgctgtccaaaaacgcttgtaacctgaaaagtgtgcgttaaccaattctagcaacagtcacaacacaactacatcgctggtttcaacacatatttttcactgccgccactacgagtgggaatcaagatacaagaaccaagctggcgaaacaggaacggctccctagcacggcagcaactcccatcttgccaagcagactgatcacctccagtattaccgccaaattcagaagacgttgacaaaggaggtcggagagttgcagtgctggagaacactatgttggcaaccgctggacgtagacaatgtcttcttccactgagaaaaatccatcgtcgcatgcgaggcatgcaattagcactgcaaatagtgaagcgagctcggcaactgaggaccgcatcgttaaggggtcggttacgagcaatccatggccggccattgtgactcacacagtgtgaggaggcaacaacatcggttagaacaacttgtgcggcgaaaccaattttgagagtgtcagtcgctcccgtatctcctgactcatccaacaaggaaaactcaaccgtcccccggtgtaatgacgccagcaacaaagggaggaacgtggccagctgggagcatggtctgctctcaagtttttgtcccccggataaaagtggaatcgctgctaaagtgactaccatta

SEQ ID NO: 1978 - DNA, 1922 bp, Toxoplasma gondii
  source 1..1922: mol_type = genomic DNA
gtttttgtgcaagcaaggacccttacttgtggccgattgcttggggggtgtggcttcactgcggtctaagaagggccgccttctttgcctccactgtacttagaccgggcacacggctttcttccacagccttgcctttcttgcagcagatattagggcaacgctacacccacacttagcctgttgataaagtgtaggcggctgtctgtagcattcatgcagtctttgttagcgcgctttagagtttccgtcgcgaatatgtcaaattcgctgttgacagcaaagatgaggtcccgaaagttgatgcacaaacttccacaacgcgaggcctgcatgtgatgggagttcaggtgcgccaaggagtttttagacaaaaagtgtccgtttgagggtagaagctcggatacacagacctcagctcgaaaagacaccactctcatacagcctctcaaccgacgacacttgcagaagggagttcgttgcctgaaccagcaaagaacctaaaattattaggtggcaacggagattttgttttcgaaatctagattcacaaaccgtagtgcgtacgatacgtgaatcactgtttttgttgaaacagagcgcgtcttttcgtctctgatgtgcagtggaagttgctgtgagggtcggggcatgcttcgtacggcgagctggtgggtgctggcttaccctgaagttcattagcggtcgaacagaatccatctcagtggcgtcaggacttctcatctatgttcttgtatattagcctttccccccgaccacagtttgcaagcctggtaatggtccggtttcgtatcggtaaaacgtgctacacgtgaggatctcagttctcaggtcgtcgccgcctcacgagttgctgatttgtagacccccgcgaaaatcacagtacctattcaaatgcacacatcaccaaaaataaagagttgcgccgcggcttcagcgcgttacgatgcatgtcgctgaagagggaaccgccgaggtcgccagatttttcgagaaataataatagcatctaggctgaagcggcacttccacttcatcgatgtggcctgctacatgctgacgtccaactcagactctacgttgtgatgcacatgattcttctgctaatcactgattcttagatgggtgagaacctctcgcttatgattcagcctcttgaggatatagtgacccatgacatcagtggatagcggctgctagagctagtaagagctacgttgcgctcagcagagaaggacggaaacgtgttcttttgtaaaaagaccaatgtgctcacgtcaacgaggaaaaaatcacgaacaatattgaggtagattcgacagaaacgccctaaataatcgcatacggcgttacgcggggatggtcggggaaaacttccagcaattaacggtttacgtggcaatggtagaaggtatacaccatcgagcaagggagatggtctcgagagttgaacacgtttatatggtagaaatgggctagtcgaggaagtctgtgatatctgagtggtacacaccaggtcgagatgcgctcgagacagcgacgcttgcggcaccgccatgcgtctgctgcgttctctgtcttgcaggggcgcgaattttgctcgttttgcatgcacgcgcggaggcaacaaaggagaggcacgaaaaaagagacttcgcgacagtagacctcgtcggttttcctcttgaaacaaggacttgtggacgtataacacacacggattgtctttgaaaactgtagcccgtgtttcgtacggcaaaaaagcactaggctctcacccgtgtgccttcccgtttcacaacgccgtggtctcttctccaacagggtgtttctcgctgcggttgtcggtctttcctccacgcttgatttcttcgtgtgttctccatcggactgtgtgtgca

SEQ ID NO: 1979 - DNA, 3187 bp, Toxoplasma gondii
  source 1..3187: mol_type = genomic DNA
gggaaggcccagccgaggagaagtagtgacggaatcttttctttccgccgcagcctccagggatgacgcagtgaaccgaagctgtcaattccgcagagctaaaaagacgagaattattagcagtgtattttctcactactcgcctgcactcttactgtcactctctattaaattggtgtcactggatgagctcaggtgcaagggagatcgtcgtagacactgaatccggttgcatgggcctgggtgttctatttgacgtattttttttatttcaaatgatagatagggcatgtaaggccggaggttcttaacccgactcaacgattttatctgacggcggactatcgttcctacctgagtctgtctcaagaacagaactgcactgacccgtcgctgccacgacgactgacgagaaacagcaaggcactgctgttcccaccttgtgtccttacatcataaacatcggagggtttctcttacacaaatccagttcgctttgccgctgcatgcgaatcttgaatccgttgtcaactaccaagctggctgctgcccacacgaggcacgtccccggcaactttttctggtcctaaaaaacccgatgtttcgccgaagaaagcgcgtgcgcactcgcgcctttcgctgacacgcatactgctcgctgtcttccatggatacgcagctaagcgtacgtggcttaaaagggaacacatgcgccagtttccgtacatgagaaaccacactaacgcacgggcgttttcctccctagtgcactatagaccgacccttgttgccgccgactgacccgcaatcacaccgagtattcgtggaataacacccacgggtaaacccctcttacccccttctagggagacctttgcaaatggttataaggagtggaagagctcctttggtgtgatatgagcgctctaggacgtgtactgtcgaccttccgccgccccgtgttttccccctgggaggtgtgagggcagagtctctcttccgatcctgaaatgcctgggcagtagtgtggtgtttccattttcccaggttgcgccgtttgcgcctgctgttgaaagagtctctgacagagcaacgcgtctgagaaagaggcagaaagcgtggtgacgtcgaaggagtggaaccaggcactggtaaggaggagaggcgacgaatttagaatatagcaaattctgcgactcagccgagcattttcttctgcgtccatgtctagacgggattcgcaccaagacaacttgcgagtccccagccccccacaaaaacgctcaaggaaattctcgctcgttgtcccgaaggaactctggcagaactggctacgagcgaacgcgagatccttaaccggcggcggccgagtttgctctttggatgtcgcctgcaacccggcgagcggaggcaacgctgtttcgtttcagattcaaggttctccgcctctgcttgtctcagtgacgaagcgttagtaaaaaaggggagactattgaacacgtacgagcgacttcgtagaagtttcagaaagggaagaaaactcttgtctccggcctctgtccctgacccagaaggctccaaagctgacagctgctggcgagacgggctgaacgggagaaggtcatgtttggtccccacgaggaggagaggacagacaccttgcagaagacggatggcgagatgatgttgctcacgctctttgttcgaggcacaggaaaccgaaaacgagtcgatgctcctgtcgtcttctgtggattctgcgcttccttctctatccgacctctcacaagtttcttccttattcctgtttgaaatcgccggcgtctcggtcttagaatccgcctgctcccatgcatctagactgccctcctcagaccgttctgcacacgcaccttcgtccctttcttctctgccttgttcatctccgtcactgttgccattgctgtcggcactgctccgacttgctctcatgcccactgaagaacaggaaaagaacgaggaaacgaggcggcctggccctctagctcccaatttcctcaaggcgaatcctgctctgctgttgccattctttccgaagtcccgttccgtctttttgagtcccgaagtctcgtcttcgtccctgtcatcggggtcaacactttcgcgctccctctcgcccgcgagcagggagttaactggagaggcgattagagatccaaggcttaccacagtgctcgcggtggtgcggattgcgttccccacagacaacggaggcgactgaatcacagaagacactgcagatcgactttcggtagacgactctgtgcgcagtttgtcaacggtgacttgcgtatacccttcggactcttcctcccgcggccccgtcccgcgtctaccccgccggctaagctggaactgctgcgacagagaaagttgagggccaatacgagagggacgagggcggcgagaggaaggcactgccgttgctcgaggcggaagcaggaggcttgctggaaggaaaaagaaaagacgaaggcaagtggagacttacgcagagttcccgtgtccagagagcagcatggtggaaggaggcggaagacgtcgcttcgaagcaaacgcaaacgccgtcaaagtgctgcccatacacgagactccggacgctctcgagtgcttcagtgcctccaacctcccaaaattctactggacaacttgaccggtagacagaccccgaaggtgaggaagcaaatgctgttggagacgggcactgagaggaacacggtaacgagggacaggatgaagatgaagtgggatccgcaacgaatgaggggtcttgcggtgagctcctgctggacgcattgacacacggactggaaggcgctgcagagaacgtagccaagcggatgtttccttccctcgcagagtagtctgccgaggagaaatcccagaaaagatgaaaatttcggactccacacttccactcgtaggcccctgggtggcgacatgcgggacggtcttgttcctctgcggagtacaaagactcaatacctggcgaggttgtctccgacgcggactgcctgctctccactcgggatgtagaggaaggaaagcgagaatgactcgaagaagataacgggtgacgacggaaggacgaagcgaaagaaaacgaggaagacggggagaggccacaagcaacagtgggggaacacga

SEQ ID NO: 1980 - DNA, 2204 bp, Toxoplasma gondii
  source 1..2204: mol_type = genomic DNA
aagcaacttacagccgccttgaaaagttcgtcttgcccagcaaatcgccccatgatggttagcgtcagcagggaaggatcccggtgtgttcagtttgtttccttgtattaaacagctcttggttggggcaatcgatgcacgagacaaattcgatcacactgctaaggtgtatagttcctcgacagagatcccggaaacgacagtgaagggcgaagaatatggcttttgcgcgttctatcgccggttcatgagttcggcttcaaccgtgccctgcgctcttgttgtaatcaataagccttctggtcacaccggagattttggatttctattctgtccaaattccccgttgaacaccggcaacgaacggcggaaggattatgcgcgtctatgtccatgtcaaaagagaaactgttatgttagatgccgtaggaagctgaaaacagagaccagtgccgggcacatcaacgcccctatgtatcgggcatacagagaatgcacaaagatacgaagagtcggagaagccacggaaagttatgccagacaaacgggggcggttgctaaaaggaagcaacctgtgatgtgttagacaggtgtgcctcgtcccaactgcaacatctaagactgagactgaagccgggacgtgctgaaaaatttctggagcggagtttgcgggagaaatccgcattcgagcacgccacaacgaaagccacagatgaggtcagactcaagaagggaagtggaatgaggcacatcccagatgaaaaagagtgcaccggttccggaaaccaacaaaggtgtacacacggaaacccgtagccgaaaaacgttttccaggatttcccaaatttgcgcgaacacttcgtccggagaagcagagatgccgctctggactggatagacctgagagtttccgagggtcagagattcgctgacacggcaaaaggaaaccaagacacgaccgcaaggaaatagttgtttgttagtcacttggtgtggcgtgtcgagtgcctccggtgccactatggcacttgttagaggcggtctttttataggtacgaatgaacacaccacaaaggcatgaaacaacgaactaaaacaagtgtgcagccgttgagaactggagagccaaggaagagctagggggaaaagcactggatgcaaacgtttggggataccgtcacatgcagttgaacgtgcttcagaaaagaaacgctgttcttgcgtgcgcagcatcgaggactcctcaaggctgtttgctatggtgtgagactcgcaacccgcagtcgattgtctgtcttcaaccaaacgatccagatgtgttccacttccgcttgtctcttccttgcctttctctctcattctgccttgtcccttttgaagaagggcgtgctcttcagaaacgcgatacctccaaaaccgtcagcgatcctctcaaaactggctcgacccggtctctgggcagcgcatgcacgcgcacattgtccacatgctgtggctttttcaactcggcgttttgcgcgaggttttgagattgcccgcaatgctgtaagggcctcttccagctttttactgattcgacgtcaggtcgcggaggaagaaggaggactttcgatctggcggtgaacttccaactgacttttttagtcagtcgtcgagtcccctctctgtggggccaagggcggcgaagttggcattttgttttccatttacgcgtacgtaaacgtctgcctatgcttctctgattctaggcactcttacgcgtaagcaaaaatcctgaatgctctccataagccgaggtgaggtagaaaagcggttgtcttggccctgagccttccgcgttcccgttgccagacgtcttgattctgcggcaaggcgccattttttgttcgccttctctctgtggttgaacttattcgttttcatcgatcattgcttcttccttctctgtcatgacggctactcattctttggtctagaactgcagtcctagaacgcagccgtcgcggctctcatcatctccttaaccgctgtttttcggctcacgccccctcggtatttttagctcttcttcatacctctacatatattactaggtttttctctcctgtttcgatattcaatctgcgacacaaagccatcgaccggcgcttctcgtctgagaacacacgctttcctgtttacatcgacttctcccgacagcacta

SEQ ID NO: 1981 - DNA, 2824 bp, Toxoplasma gondii
  source 1..2824: mol_type = genomic DNA
gacgaatgcggtgctccaggctcggcttcatgacattggttgtctgctcaaactgaagagcccctcgctactgctccaccttcaaaaagccgcgcagcagcaggctcacagacgccagcagcaagtcgctgccgcagccccgatcccaggaaaattgcgagctccaggaaccacggagggcgcatccactcggttcctctgatctatgctccatccagacttttctatttctcactaagagactgcgcgcgtatgcacctggacacacttatgtacgagtgcacggtggtgtatgtgtaggcatgcatcccgaaatctttgaatgaaactgagattctgaatatgtgcaaagcatgctcacaacgccagagaaacggggacaaacacacggtgggaggtctcaagcgaagacagagcaggaagcccgtctgcactacgaacagtcactctggtatttcttaacgcgacggaagaatctgggagtaaaacaatccccataatacaatggtgaataccgtaaggttccttcttcttaggtcgctagaaacggcgggaaagtcacggtcgtttatgggaggacgcgtttgtgttgaaagtaactggaggagcgatagcgcgcgcggcacctgccagcctctttaccaatcccgttgggatctggcacagggtctcccacagatggcaatgagtggaaaaggttccactttgacggcttattttgcttagggccaatgattcattccttcggttttgatgtaactctgattcgcgagaaacgaaaacagatcctcttcgaggctctgggcttcaacgccactcgtcacaagaaaaagagatccaagcagcaaacgaactctgatagaggttgagggagaaaatgggcagatccagcgagacatgcggattcgctccgatgctaccgaagctcttcctgtttcaccacccacaaataccacaaagccgaacagtaaccatatgatggaggccgaaatagcctcacccaagtctgacagaacagctgaaacgctgtcacttctaagcagaacagaaaccaaaactttctgcagatagtgaacatggatgttgtgcagttacgagcacaccgggtcttcccgcattctcggaagagtgaagaatcttgtgtgaaggcggtcgtaaacgtcgcactctagtacgattctgttggggctaacgaaatcagaaaaaacacctagacgttcgttttgcttgagcaacgagccgctgagggttttggaatttgtgaacctgcttgagaacccgccgttatgctctgctggacctagagtaagcgtaagaaccatgcatgcgtgccacactacacaaagcgccatgccccccatcttgtacgaaacatggtgattctgtaggctgttcaaaccttcttttcatacgtctcgactccaagaacacacggagctcgaggagactcgtaaatagatttgagagagtagaattataccgttgcgggaaagtgtacgcacgctgtgacctgctgagttgcttcagaggcgcagttttgcacacggcgcacgttcttgtttttcttttcttgaactcatacatttttctcgtggcgggcaattaccgctgttggctaggaacagggaagtgctattggcttccacaagattgaggcggcgcccgtcgaatgcggttgttttgttgatgcggcgcttcgcaaagtttcacactcgccgtcagccgcacagccgctctgggccaatgcagtagcgccggccgattcgttcttcctggcgtatccttccgcattcagcttcggaattgcaacaggggtccattttccagtatttctcttgaatgatgttcgtctataactccgtcacgtatctgagttacctgccatgctgtaaatccgcgcccttcgacgagcggcggacaaaggtcactgcttctcggttacggcaaccagtctcgacctaggaaccaccatctgtaaaggtaaactttcacgttctctcatccgcaacctcagctagaagacggaccgctatagtggtgctgtgtcttgccagatgcgtgtacgtctctcccaaatccgatgagactgcctttctagccgcaagagcctcctgtttctaccagatccaaagtacacttttctgtggagcagcagagagactgtatgcatgcagttacctgtgtatctgggcttccgccacccccgtttcaccgcagccgtgtaccggggaccctggcgataagtttgaaaggggattctgctggacacaggtcatgtcacttttctttcctgagaggctattctggtgttgtcactttcactttcgcgtttaaaacgacttcatcttccatgatttttttgagtccatgcgtgtttacttcttttgtcgtgctgtctcgagttgaggtgccagccgacttcctaagatttgtgtttcttactgaagaaagctgaagcttcgctcttctgggcgtctactccttcctggttataccgtcgctgaggacgagcaagtgtggtaagaggcctatttctggaagcaggtggggtgtacacggatctctaaattgggctgccgctcttctgtgtttgcagtctgaagaatctgcggtgtgttctgtctctggtgtgccgttcactggcaacgctaccgccgtatgccacggggagtccagcgacgaagtggcggttacttcagtttctcgaacaaaaccgactttcacaaacgccttccgtgaacgaagtcacattccgtggccagctgtgcgagaaggagatttcgtggtagaaaaaacgacgcgcttccggtctccccccttgcca

SEQ ID NO: 1982 - DNA, 1469 bp, Toxoplasma gondii
  source 1..1469: mol_type = genomic DNA
ttgtcgttgagttcagcacagaagacagaagagtcgagagaagaagagaagaagttgatgggtggggagagaggaacatggacggcagcggggataggcgagtccatggcgaaacagcgaggaagagagacagtcggggggggacgtcagaaaagaggagagacaccgtccccgcgttgacaacgtttccaacgcggaggcagaggctacatggcatcgggggagaaatctaggaaaaacagagcgaagagaacgaaaagaaaaggagaagcttgaacgcggggacagagaacacgcaccaaggcgagaacagaaaaacaaacgacaaaagagacgaagacacggcacaagggaaggacaggagagagaaggaggaacaacagaagagaacgacaagagagaagcgcagaagaaacaaagggagaggaggacggcagacagtggataagtcgaagagagacgaaaggacgatgtctgtgctccttcagagcaagaaaggatgcgctgcgaaggcgcatgtaccgagtagagggtgtgagtgcaaaggaagaagaagagccgcagggagaaaaaagtctttgggaccttccacctgaaaacgatgtcgagaaaatcgtcggttcaagcgaaacccaagcaacgcgttgtacgttttggtggactgcacgagtctgccgaggcgacgttcgtgccgacagaaaccgaaggaaaaaatcggctttcggacgtctccctcagccgtgtcttctcctcttatcacgaaatgacggagtgtgaacgctggaagaagcggccgagagagaacgcagaagcatcggagaagaacggataaaggagagaagaaaggagagaagaaaggggagaagaaatgagagaagaaaggagagaagaaaggagagaagaaaggagagaagagagaagagaaggagaggagaaagcagagaagattgaacgggagagaaaaaagaatgagaggagaaaagagaggagaaggaaaggaggaagaggagttcaggctacatgagagatcaagacagagagacaactccgccccccatctcttcgtttcgttggagaagttggaagagctggaagagaagaaggtgttttctctctttttttaagtgccgattttcgcttttaaagttctttttttcgcgttcgagggtcagagctccttcttttctccacagcgtccgagagagcaagacactgcagatgcggctgtctttgctcctcgctgtcacacgagcacaaagttaggcgcgtttcttctccggaaaaggtggagttcttcagagttgaagttactgaaacgcagtcctttccagttcaggaacgcccgagtgtctgtgcttgctctcaaggtgtctcgacacctggggaagagtcagagaggagctctcgcgagacgcaggaatgctcgacttcttgcagaaaggctgcaactctccttcgttgggtttcga

SEQ ID NO: 1983 - DNA, 3637 bp, Toxoplasma gondii
  source 1..3637: mol_type = genomic DNA
agagaaggcaaacgaggaagaaaactgcgagacaggatacagactagaagagcggaggaaacgagggcaaagaataacaagaggaagggatcaaggaaaagggcaggggacggcaatccagacgccgaattgtggcaagtctgattcgcgtctcccgccttgacttttgttccacgcgccttccgaggtggccgataagcacatccaatgcacgctcacaacctcaaatgcgcgtgcttagacgagtcacgttacttcacacaggccggcctgtcggagtcgaaaaattttagggactgacggcgcatgcttgctcgggggcacccatgatattttttttgccccaagtttgaatcaggaaacgtgtacaagaaagaggcatgcccatggagaaaagaagaatggaaatcgcaggtcatggaataacgcccagtgaagcatcctcctgagaaaatgaggggatcaactgcgttcaccagtgtgaagaattgaagcggggactaagaaccatttctcatcgtgaaagaacaaatgattcgaccttgggacacgacaggaaagctccccgttcaagtgaaaatggcctcaccagccgaacagaagagagctttccacaaccaaagtgtctagactttagccacagcgcatgctgtctcgaacgatcagccctcgggttcgcgtttcacgaggtaaacattcagagatagtcgctacgtttcacagattcctttgcatctgaaaatctgaaattgggaaagtggaaatccacttgacgaacagacggtgagacaggaggtcaaaactaatgtcacacttcagcgttttcgtcggcacggcaagttcgcttctctccggtggagcaagaaacggaaactacgggcacgcatcacttttcaaagcttgtgcacatctcttggatggcctggaagggggaaaatggcgactcaaagctgtgttgagacgccagtttatgagtttgatatgagctcaaactgcgggttctcaaacgcgttacagcagattggcatgcggtgcggtgcatgcgaccaagaattccgttacggattctgcgtggaaggctaagaacgccatccctctctgcaaccaacgcgataacgaggtcaagcatttccctgattgcgtcaatggcaaacaggccaaccttcctgagcccgctcgtagtcaaacgatttatgtgtcacatcatgtcgtcatatttccatcgcagtcatttgtgtgtgcaatcaactacaaaacacttcctctggcaatttcacaggcactagctttttgggtgcttgcgacatgcgaagcaacatacgaaactgcagaagtaagcggatttcgtccgatacttcagccagcacagatctgcaagagaatggcttaaagtcatgagaaaccacaatggtgtggagaacgggattcgccgtggacaaaagttgagagtggatgcatgcacacatcagaagtatgttaccgaaacccaaggtttctctgtgtaaatttctggaattaggctcaacagaaatcacaggcagaggatagtggtggtgtgcttgcggcgaatggtcaccatacagtgttgagcacttcgtaatggtgctttagtctaagaagcgtcaacgtactattatatcggcgactgtgaaaacccatgcgaagcttggtgatgcaaaatttagcaagaaggtggtgtattttcacctcgcagccgccatcgtgctcacgccggtgcctgtcagtattggttatgtccacggacctgatacactttgacgtacacggaactcggaactggggataacattggtccaacaagccattttgtatcgcatacttcacacgaactcaatttgaaacgagatgggtcaagtgacgcttctccttgtagcggccacctgttgggtaaacgtcgaggacggtgagtgctgttttcacaagcaatcgaaggtgacgaatgctccaactgcaacataatcttccgtgaacaagaaaaagaacacacaaggaatcacatagagtactatatacagcgcatctagtggaatcctttcccctctacgtcgtcattatttgcaaaagaagggaagtggtgcgccacgttttgggtatcgcaaggaatccctatgggcactaatcgctctccaaacctacacgaaaagttgaagtgaccattttggaccatgtagtcattccgtcagatagtttcaggtctcaagaacacagtagatccgcgacatgttctagagaacacggaaaagttcgtggctccgcaaaagcaaatcactaacttctccagcgccttcgacattgttcaacgttgttaccgcttgacagtcagagttgctacgtcgctgttttgtacatacgggaccaggaccgggtttggaccactgaagctgctaggagaatacggagtctcccccgtgtaccaccgtggatgacgaatcatgctacctcggccttttgtgcggacatccagcgtctcgtcaagccattctgctacagttcacaaaaagacacagattattgagaagggagtcggttttggaaaaaacggggtcagttttgaccgcggcttcagatctggttcatcgattgtgagctgctgcctctcattttgtactggaaatttgacccacacgcggcaacattacggtcggagcacctagcttccaagtcttctttgtggttggcttcagcagttccatgcgacggtggtccgagaccgttctctatgcagaggacacggctggaacgcgcctcaattgcgttgttgcgttaattgcagatatccaagtgctttttgtatgaacatctcacggaggcaaattttggcgatgtttgatgacttcaggccagttttgtactcacgacctcgagagttttgcccactgttgttaaagggagtccatttctctgttatgttatctagtcttcaatgtattttcggtgtgggacctgttgacctattccgatgtagatactgtcaacttgttctcctgggagatcgtttagctagaagaggcatgtgacctcgtcgttaccacaggagttcggctgagctcgtcctgtttcagttttttcagacatgccgtgtttaatcttgtctgtaaaggcgactcttgtaaacaaaccgctcagggagtcccgcagatggtgttgtccgcctagcagcggcctgcgacattgggcccgataagcatacgtgccggttcacagtttgctcgtttctctttctcgccttttgcgaatttggtgcatgtttgttttaaccgctgcggaagagttgcttttctggatgaaccatatttgttttgtttcgtgggtcttcactttttgcggtgttgcttggcaaagaaaccactaaacatgatccagcgtgcaagtagttcctccttcgcagttatgtgggaacgtgataaatattcattgtcaagaactgtcagacagaagttagttttttgtcttggcccgcctactgtttctcgacaatgtagcatcaacagaacgcgtgcggagccccctgttggggccacaaccctctcgaaccgttgctgaaatggaaacgagagacacctgcatttgcgacacgcatccatgaaagaagggtacccatttcatcgcccctcca

SEQ ID NO: 1984 - DNA, 4970 bp, Toxoplasma gondii
  source 1..4970: mol_type = genomic DNA
ccacaacttcgcccttctcaaggtcgagaaagtgaactcgcgttcctgcagccatgaggcacatccgcgccacgccggtcgcctccacctcctcgggtgtacgtccacccggttcctgtccagaggctatgagcatcgcggctttgactgtggcggcggcctcggcggcgcgtttcccctcgccttttctcttttggactccgcctttcttcttcagctccccctcctcagaactccgggctgccggtctcgttacaaaggcacaggccacgacaccgctgttctccttcccggcagcgacggcgcggaagaggtgctgcgttctcgcgcccggaagtccaaacggagcagagaagcgagagggatggagcgcagagaagctgcttgcctcggacagaggcaggcggcggtaggaggtggaagaggaggcgcaagacgcggaagcagccatcttggacaaactggagacgaagagagaagcggagacaatagagacaggcacaagagcccccagctcccgaggggcgtggggaagtgaggaaaacgaggaaagacgacgtggattgctaaggggaaaagcaaagtgcaatcatgaagtaaggatgctgacacctgcccagtgtctgatattgaattaatggattaagaatttaaaaaggagcgtggaacgtctgaggaaatgtaggcgcaggtagacaagaaaagaacttcaagtcgagagaacgtggaaacttcgatggtgctgttgcagagagaaggagaaacgagacagagagcaatgtggggaaacacagagagtgtggaaggggcgagaagaagggcaagaggacatacagaagagaaacgagaaaaaacctttgttcaaggctattgtctctcacgcgagggaacaggagccaatgttcatcgaacaaagcaacctgttcttgactcttgaacgtctctgcaaagcatcctattcggcaagtcaaagatcgagctcagggagtcactgttgactgagaaacaatgactttatgactacggaatgaagtgctaaagagttgacatgtgggtattcagggctcgagtactcgcagagaggagttttacgtcaataagagacgacatcaatacaaaaacagcaccgacttggatcccgccatcaggcggccccgctgtaactcccgtcagactaaaattccatgttttcccctgtcagaagtcgaggagagtggtggcgaccttccccacagagtttgtgtcgagagggaatcgagcaaagcagacttcctcggattccacacttctttcgtctttgtcctttggcttgcgtgtcgaccgccaaacttcgagtcgctcccgcgccgcgttttcgaactccactgcactggcgcggcaggaaaacgccctcaacagtttcggtagcggaatttcgagacgaggcagaaaactctgattgctgtggaattgctgaggaagacttaaatcgcgggcgcggagaaaaagcgacgaagtcgagactctcacgccgcgccgaacggcagctgtgcttgtggggctctcgtagttgtttgtctcggcagaaaaatgcggcagaaccgaatttgtaaagtctcgtggagaagcgaaggactcagaagagatgagattggcaactgaagaaaagaggaatcacggcgaacgcagagagactcaactttgagatgcatctttacgaaaacatgcaaggcgctttttctcgcggtgtgaaaaacggctgtcgggagaacaaactcgccgcaacctgcatgccggcacagcagacagaatctggaaacggatgccaacgggacacatggctttttaactttgattggtgcactcagtttctgcagagaaccgaaatgagtctcttcgcaactcaacaatttctcttcttaatgtcctggtgccggttttcctctattggtttcgtaccagtgtctgcagtatgggtgagaaactcgacaaaagagagcgtgggctagagttgatctttagactttacagtgtggcatgtttggttttctcttcttttcgaacggggacaaactaccttggagtgagctgcagattaggagaccttccgtagcttgtcatttccggttccggcaccaacagtcgatgctgctccgtggttcttccgtttttgactctcacgcgtgagctgacatctctaggtgatatctccaacctacaacaactcgacagtagtagaagatcagtctttccagtagaagaaagcatgtttaagaactttctagaagccagttggttggtgctctcagtaaccacaaagaactggttctctttatgtcgtcactgctgtcgtgaattcaggatcctgactactctaatgtcagcgaacataaagaacttgactgtctgtatctcaaaataactggagtcacagtcaggatcctatctatcttctgaagttccttgtccttgttgagctcactttgtacttgggaccagaccaaaacagttcacctatgctactaggacgacggagctcgcggtagatcttggggaaacgacttccgggttaagctgactcattttcaattgtttgctggtttttaggctaagttgcttctttcacgacaacgctcattttcagacaaggtcatttcgtgagaagtgcgacgccggcataagcgtagactagctgtcgcctgtagtttttcttgttttcgtccattcacgtgcactccatcctggcagcaggacacaaggaaactttgtggtgaatacgagaaaacatagtggcgccggctcggaagattttacgatctcgaaactagaagggaatttccagggactttagtgggaaaagtttgtcgccagttccacggcagactcaaggtgcccgttgttgtaaagtgtggacgatgcgcgcagttctgaacggttggacaaactccccaccccaagcctaaattcagctttgctagggcacagttctttaaaggggatgtagtgggtccgagttttacgtctcccagaaaggcacacatcggtgcgctgaaagagctacagcaactctgacgcgttggcccttggagtatggtctatacgtaatagttgattatcaaacgcggctgaagaacggacgccaccagtcaccgtatcagtaggcagagttgccgtatccgtttccgctacaagaacagtggaatatgattttttacgaactttccaatagaaatggtttgctcacgaagatcgactcgaactggtttctggtgacggtagatagaggtcgactgagcctggggactgcacttggacaccgaagagccggatacacagtcgctatgcttggccgccacaaactgaaagactctgtggatatggaaaaaagaaagcaatgttgtcgaaggccagacacattcctgttgtggatcgccaactgagaacggaagccgggaaacgattctccacatcgtcgccactgggaagtaaacagctttgttcgcgaaatgagaacgaagaacgggaaagtctgagatacaacccgccaagatcttctgaattggtgtgcaccaccaccccactgagtttaaaaccactgagctgcctacgacagctaaaagagcccctgaagctcgaatagtttaatatcatttaagcacgaacatagaagcatccaagaagtaagcatctatactgcggggttcgctctacagctccgtggtgctgaaaaggtctcttgctctccgaaaatacgtacgccgcaaaatttctcagcaatttactcctcatactcgtgtgattggcaaatgtccaaaactcgagaggcttcacagtcggagctggcctcgtttgcatctttccaggatgttcacccgcaacagaagttcagacattgcagcgttggaaagagcgcggccacctgttctcggaaatcttaccacctctcacatcaggggcatcgctatttcgtttaacaacgcttcactgccgccaccggtgtatccgcgttgaataccgcaagcgttgtggctgagccggaacattgatcaaacgacagcaactattctatgttgactgccaacaaaacacaacatgcgaatctcacaaccactgcggagttgcggacgccttcgtgattcgcaaaagatagctgctaggtaagttgagatattgggaaccacaacacactattgcccggagaagttcctgtggtggtgtttagcttcgcgtactccacagccagcagacaagtctgcactgtgtcgcgtcgtccgagaaaagaagcacttctgcattttccttttgcataacgcgtccgtttcaggggtgtgtgaggctgccgccatcccaggctgctaaaaaacaagcgtatgcaccactgaaaaagtaaaactacgtgattagtgcagaacgcgcgcctcgcctaccacgggagttgatttcgtttgtcccactggggccgcctaaagacttgcaacgtacgacggtatctcaggaggggatccttgacagtgtctcgctcctgggaatgcagcagggaagcaaactcatacgttacgcttacaagaacagtcacactgaggctgacactcgcgtgagtcgttgcctgacggaagaagagaccgttaggcgtctcgtcgtgtcgctagcaccaggagacaggccaacgctgcctagagtcggccaacgcggctgcactcgagaggcctgatggagaaaaggcaacttttgtaaagggtcatacagtaataaataaccattttcgaagcttatgaatgagccacataaggaaggaagccagcagcaaagcgttgacccgcacaccatgcgagcgcgcgagtagtcaacgagctgctgcggcggaatagtccgaatttgtctagcttttggccgctggcatgatgttttctacgaggtgatctaaccaatctgtgtttcttcgcggagaaagaatgtgtggtgtacgagcgtggagcggcttccatcaagca

SEQ ID NO: 1985 - DNA, 2507 bp, Toxoplasma gondii
  source 1..2507: mol_type = genomic DNA
tttccctctgcaaacgaaagtgtttacctttatctacacatgccagcagacagatacatacaaatatatatatatatataaataggtacaagtatatttacaaatatgtatacgcatccgtgtgtatgtttatcctgttgtcagacgaaaagacctgacgagctgcttgttctcgtctccacgtacagaagtgacatatttgaatgtcggttccgcggtcgggcctgcctcggtgtcttgagcagagacggaggagagggagagaaggcagaggaggaacagagaagaaaatcgaaggagactcttgcgcgtcgcgggaacggcagagactcgccgctgtctctggggaccggccgccgaggagagaaacgacatgttttggacacgcagaaagagaaaagggaggatggaagacgagacaaacgaggagaaagacgactgagagaggacgagaggagctctgaagggtgccacgaagcacaggaagaggacagtggagctcaggcgggggccgacttccccggcagaggagactgaaagacagagaagaagcgaacagacttgaagagggaagacaggtgaagaaagaaaagaaacaagagagtctcgccgttctgttggtgaagaggaaatctgtctaccagcaacagagcgcagtggtgaggaaaaccgggaaggagccccagagacgaaaaagctgaaaagcaggcgagacgctcttctccacgttcggtcagggctaagaaaaccacaagctgagaagaacagaacgaggctgcagtccacggagacagtgcggggacggaattggaaagagaggaacagcaactaggccgaggaaaacttctgcagcagaggagcggggtggagcgcgagcccagcagacacgccagggcgtttgcggacagaacggaagccacaggatggtgcgtgctacgaaaaaaagtacgcggactgtttggggatcgctttcgcgactctctcctagagaactccctcctcgtgaccagaaaatgcagcggcgcgcaaggccgttcaaacacgcggccgacactgagacagaacgagagccgttcgaacgcttgcgttgcttctctcaccaaaacaaagctggcgagtctgcctcactcgcaaacactgcaaacagaagagaagattcttcctctcctctccctttcttcccctgggaggacgcgctagcgagcgggtagctgcggagagaagatcacaccagcgtttcgtggaacgcacgctgcaactttgtctgttgcatgtcggagttccgcagaaggccttttctcgcattctacacaccgggtctccccttctgcgatgtgtggagaagacgttcatcgcgctcagcggaaaagaaagaacgcgtcgtccctcctggaagaacgcgagctggctcctcggccgggttcggcttatgttcggagaatcgaaccggctgctgtagtgtgtgcgtggttcgtcgatgctgtttcccgcgccagctcgcggaaaggcggaaagaggcggagaagaggacaaccgggagaagagcagcgtcagacgactatagagaggagattgtgagagaaaagagagaggaagagaaggggacaatcgagacagtcgaggcgacctcgttgcttggaggaacctctcgtacagccagcgcagttcatcgccagctgcgactccgcagcctgcaagacgcgagaggagaaaagcggaaaaagatatcggggcaatcgcgagggaaaagcattcatcgaggacgaagaagcgagggcagggaaatgttgcgtgtctctgccccgtgaagtcagtgtgctgtagcccgtgaaacaaactgagggtatccagtgaggttttcgtactcacgagtgctggatctccgtcttatcgattgcgagaagtcgaaagacacccgagtgttgtgcacatgcgtttcactgggcgtgtccgctctatgcgacttaaaacctcatttgatttgtcaccgattcgtcttcctcctccctctcggttcgagggctcgctctgcttcagcgtgaggcctgagggaactccttggttccgcactcacttgagaagagcactcgaagagcagtctgccgttctgtcgttttcaaaagaagagctgtggcgcttcgccgcccttcctctgcagtcctgcgctctgcaggcagcgacaacacaaacggtgttctcgtctccacgacggagcatcccgtggctgcctcctcacccgtaaaaattcagttagactgctcacacactcaagaagaagggagttcactcgcctagagcggctgtccatcatcggctgcgagtcgactaggtagaccccgtggaagtctaggcattgtctgtacggatctctgtatgtcggcggctttgggtggcttgtgtgtacgtcgacgatgaacctagtgagggcgaacgcgcaagcgacgaaagtttcgtggatcgttcagagcctgcctttcagtgactgggtttgagttcgcgaaccatca

SEQ ID NO: 1986 - DNA, 4434 bp, Toxoplasma gondii
  source 1..4434: mol_type = genomic DNA
aaaacggaagtggcccttgtggtgtgtatgcttcttacactggacatggcttctctcgtcctcgttttaactggctttgctattctttctgacactcataagacggaataactagcagcttgcaatcgacaagcaggttctgcgaatccactgagtccgctacttgcacgttacaccccccgtcgatttgaggtcgatgaccaccggttttgatcgagtcgatgactcgatggttgaactcttttccagcattccaaacaaggttcgagctaaccctgggtatcacataatgtttcatgcacgtgtccgtgactgtgaaattccaccctgtcgttgcttatttgtgctgacatacacaactttctttgaggagtctgtatttagccacgaatatcctcgttttcctggggcagcgaggggagtggagtgcagtatttcgtgtgaatgcatgcgaatacaacgacggatgtaagtaaatctgatatatatacatatatgtatatacgtgtatacccgagtgtggactcacttttcatcttttatgaagtggctatattcttcctgtttcctgttgcctacacggtggaaatggatgacgttccacttccccgaagatttgatagtcacgaagcaggagacgtagaacagacagacatgtcttcgttgattgatatctggtgtgtattgagacgggaaactgcggattcctctagagatggaacagcaacttaagataccacccgcacatacggagagggctacttcaatttcctagctgcgaaagtcagcaaactgcaagacgggcgtacgtttcaaagcagtgacagcacagttgccacattgtgcgatagactcacttgcgaattttatcgtgaactttttgggattggagcagagaagtgtttccattaacgcccttggagaattgtgatatttcctagtcggcacctcaagtactcttgcaggtctccatggcctgacatacgctgcctcttgtaacagatgtgtcacacattttttcggcatcggatccatagacaacgatgcccccggtccatctgcggtttcttccgcaaaggcaatccggaatgaaatgggggcaggattcaccctctatcgaacggatgcattttggcgattagatgttcttgaggaaagggtagtcccgacagcagacgaggaaataaataaccgggggcggccctgtctagccagcgacatgcacgggtgaaaaccccaacgtttgcaagatgcgagtgacctaccttgacccattaacaaaactgttacctgtctctgtgttgacacattttgttgcacttgctattggtgtgtcctggttgtgggaaatgaacagtctgatagtccatcatcgtatgaaacgtcgactggtacgtggtcttgcgagcagcgattcaaaccttcctctcgcaatcgaattttaaattggacagtagaaccacttgtgtcacacatcgcaaatccactagccttcatttgtgggcaattatgctgtgttatattactgccttaaccgttgtccgccacttcactttccaacgcgtgcatcgatttgagagttatctcaaataggtcgctcgagaaagatgcccctgttgtatcttggtccgtgaatggtgaaggaacctgcttctggtttttgagaaaacacgagattcagaagtgattctaggtgttctgcagctttgtggccatgtgttttccctggagagaccacgagaaccttctacaacatagttgctgagatgcgactctccaggtttgtatacaatataagcatgacagcgttgttgctagcgtcgataatcaatggtatacagatccaagcagcgaacaaccagaattccaaacctgccagggcaatgtcacccaccaaagataccctgccagatgatatccggccatatcatgagtccttggcacacagcgagcaagaatccgaacgtgaacaatggcaacagcaaggacggcgttggcctatcaatcatcttttttcctcactagagaggctcatggcagcggtcactgagtccatcagttttcatcaccagactgaaatcccctggaatcgcggatcgggaaacgcaagactgtcggtacatcgaggtcgaggcctgtcgcaggcgtcgcagcatagtctgtcacatatacgtcaccagagtggacggccgggtgcgctgctgcacaatatgtggactcctgcggacaggggcaccctattcttaggtggaaaaacgtatccgcgtagaagtcgagtgatatccgagacgaatagatctactggaggtcatccagtacatggatcaggccactccattccggcgccgcagatgaccagagcccctaaagaaaattccaagataacccaagacgctcaaacgagagtcacgagcttggaaaacagcgaagatgatcaatactggggggctcgtactcgcactccattctcggcctctccgacccccgatcacccgactgctggtggtatgctgccacacggacaaagcaatataaacagggatgttcctcttggtaaaaattttcggcaagatcctgaaggctcaacgcaccaggttggtatggataacggcgcctattctacagcggcaacaatgttgggcacggttacgtcgaagagcatgagtgtgcttgaccttggaatcgacgatatgcgggttttggccgacaccctatggaaaacgcgcacttcagcttacagtgagcggttggaggcagctgcgaaggctcgtgacgtacaggacaaaaatttctacagagggttgaaacacatcagcatgcaatcgtctgaatgccgcaggagaaacgagataagagacctagaaaggttgcaacggctggagaacggtttgaggttgacgcgaccttcagaacaggatagtgcaggcaatgaacgaaccagcaggtcgaaaagaagagcgcgaggtcagcaagggtctttaaccagagttcgcgaacatactccgcactctgcaatggatgaagaagaaacagagaggaatcatctgaagaaattgtcaactacaggcgctgcgaggaagccggtcatcgggagccatcagccatcgcgtagttcttttgaacggaacggtgaaagatcaagaccctccccaataatacacagcaaaagaaaacacgagcttctgacacagtcccttttaggagagtatcagaagaagaaggggtccagaaataaaggagaaacaccccgggttgaacaatctcataataaaagccccaatgcggctttagaaatggccgtctcaaaggatacgctacgcatgcggcatagcaaaagtaaggcgtcgactacaacaccagggacgaaagtagcgacacaccgccagcagctgcagcttcagacatccaagagaatcgacaaaacccgaccgttggtcccgtcacctggagtcgccaccgcgctgatgcagagcgtagctgaaacgctcttgtctgatgcgtcaacttcggctgcttctgattcaccagaaaaacaaaaagttcttaatctggatgaagaggtggaaacagcatatcaacagcctgtatggagtgctacaggtgcagaagtggatgggaatcatccgggatccacccagcagcctagcgggcgacgaatcgtcgaggctcagggtggccgtgtatctgaattcctgcctaataggagcacagaaaagaaagttgagcaggacagacattctggctttgaccaggctgcgtcacagtttccgaacgtggaacaatctaacggtaccatattagggcacgatatctttgacgcccctcaaaaacatccactaaatgaggatcctgctcccccgtctaagattcagagtaatacaacttctggtgaatctgcgtttggacgtgagaatccaacagctagtgctcgtcccgagcaaacaggttctcccgggtttggtacaatcatagatgcagagggcggcacagagactgatgtcggtcaggacgcggggatggattttgccacagaactgtccactggcttacggagtatcgcccctgaatcggttggaagatggttattgtctttacgtggaccaggcagcgcatcgctgcgtggaacttctggaagcacaacatatctagaaggataccagaaaaaagagcagaacgcgagctatgcaactggacgggctgttaccttgatggtggcgatggaaaatgccagatcttctgcacaacacatgggagacagtaagaaagcccctgtcaaagtatatggtgacaagcgtgagacgtttcgtcgccggcttcagttcaccagcaagaagacgctggtagatcaagccactccggcacggttcgaattcgttgacaatgaccacggcatgcaattcgtcaactggcgtagtttcagtggagagcgcgtaa

SEQ ID NO: 1987 - DNA, 2602 bp, Toxoplasma gondii
  source 1..2602: mol_type = genomic DNA
agagtgtggaaaacaaaatccggcacacaaactgagttgctccctaggcagggttcgagcgtcgcatccttgcaattctgtttggtacgcggacattgtgggaacgcgccgtatctcacaatcccggctttgaaaaaacatcatcaaagcatgcatacagttttgtatatgcgcggactggtttcttcaacctttcgttatgcgcgagtcgtactgcatgaaacattcttgttatcaaacgcaacctgtcactgaacaaggatttccagcacatggccaaaaacggcgtcgagtcgttgggctgcgcattcggagtcacagggcgtcgacgattactggcgtagagaaaggcggcgctgctcacgcacaaaaatagagactcatggagcttcggtacacagcgcggtgcaggccggagtcttgaaagggaaacgtgtgcgggcattaggctgtgtccgttctcaagaccgagaagctgtctgcatccctaaagcatattgcctgctcatctaaatctaggctgaagcatgctgtgttgggacctcgaaggcgtttgcttagtcgtcaacgacaaactgatgcactctgttggagtagtgaggtagtacacaccgaaagttcatcagtgactgccaccaaacgttctagttcggcaacatcatgaagacgacgcgcaactcaaattccacacgaatgcctgtgacgtctcgaacatccccgcagttcatggtatcagattgcccgtgattatcagttaccaaaacactcaacagtgtctaactaatgctcatcagccgcagcgactcggtggtgaagcgctggccggctagcgtactctcccaactgtcgattgcttgtagggaactaccgtgctagatgtgtgtgattttggtagcgcacagcaaacacttggaattttgatggggcagaagcatacgacttgcccaccattttagactgtttagtcgatacagcataggaaaacccatcgttgctctttggcaatctggacgttacgtggctgttcgtcccgggtggaagcaagcgtcccgcccgcagcgacgcttcctgctgcaaaatatcacattcctggttgcttcgtgaaccacaggaacattacggtctacgctatcgttttgagtctgaggaaatttcgccgggcttagatagcacacggcaccatctgcgttgccagggtctcctttgtcggaggaaaaaatgaaaacaaggggacatgactgattcaagcgtctgcgcctcctgccccacgcatcgtgtgctgtcgatgccgatggcatcattttgctgtgatggcttgcggcgggatggtacgtagtgtgttcgcggcgttaacaacgtcacacgcggatcctcttaagatctgctgttcttgagatggtggggcattccattctttgacggtgtaccgttttctgcgcttttgattctcagcattttgatgcaagagaaagttgatgtgtgcgagttggcatgtaacggcgtttggtcagctcctgaacggactgtgaccgttgtatttcatgatatcttcaaccccgataagcgggaggggcttgtgccactgctgcagagttcacttccatcaacggctgtatgcatgcagtcggttttaagaggaattggttgctccttagtggtggctgccaacacagaactctatcaagagaaacccaaaacgccactgtcagtccatgcacgaccactgtaacgtcagcgaatacgcccaaattcttggtgcgacataggcgccagacttcgaatcctagagcatgcctgggtcattcatgagtcgtacgtgcaagcaaggattgaaccgcaactaaagcacatacaggtcgctctgcttagaccaaaagcttggattacgaagtgcaacacggaagcacggacaacgcggagcatatcgtcagtttgtggcgactgtcgccgtgacgtcgcataagcagaaatgcagttcttggttcttggccatcgtctgactcacttgtatatcacatcccattagccctgcgacagaagaattgcttccttcctaccttttttgtcagtgtaaaacgcggagtcgtgtgtgcctccgctgaagaaaagctgaattcaggcgtacaggtgttgctcaccagcagtggacagtcgtccatcatcagaatgacgatcgagacgcgcggacggaaatgacagaaggcattccggctaaggccagtgtgacccaccagaatatgtcgcagcctccggtagtatttctttcatttagtcgatgtttttgcaatttcagcgttttgtaaggacgagaatttttctttttattgatagaatcaattgcgaggtcattgctttgtcgtgccttgatggcgtcacacggtctgccgaaccgccttccgtgcccccgcgcagagcgttttcattttaatgcggtttgggatatttttgccgcaaagtgaatgagcagacttattctagcgcctgaaatcgaggccctgcatcagggttgttccggacttatgtgggtagagtgggcaggaaagtcaattgcattctaagcgatctacagcagctgaaacgctataaatctgaatctgaaaga

SEQ ID NO: 1988 - DNA, 4520 bp, Toxoplasma gondii
  source 1..4520: mol_type = genomic DNA
catccacgtggatggtagcgcgttctctgtcgctgaaaagaactcggcgtgtaggtcaacaacttcctgagcactttccgaccacgaaagcgattgagtcacagccagcagcgagggaatcgccccgggaaagacaccttacggaagtgcgtcatcgactttttctttggcattctgagttcgagggagagactcgataacatgaagtgcactggaattgcgtgtgttgccaagtggcgagcaaggagtgcgagcacacacccgcacacacacacacacacagatccggtgcaatggcgccgtttcacattgtgactgccttggggaagtaccgccctatccacatgcaggttggacctttttcctttgtcgcctttcctttctcagtcttttgccacccctcttcacgttcctgtctcccgtgcatccgtttccggcctcccgcacccccgtcaacatgcctccctcaggatcctcctcttccccccgcatccgtgtgtcgctcttcggtcatcctttcgtctctttcgctgtcttagcgttattccgtccctctcttgcgcaggggatggttcacgaaggccttgtctcccaataccgccatgcagagagaagagcatctgactgaagacgtgccccgaaggaaaaccttacttgaatgtttgccagctgtgctttcctgccttgttctcttttggtgttctgtttgagaacaaggacgggaccctgtggacgaatcatggtggcgaggagtacggatcgaaacggcgctcaacgagcttgtagagtcggtgacggttttccacacttctttcgtggactctgactctggataaccccgcctttacagcaccccaaacatatgaaagtaataccgtcaggatgtctctttcagggcattacgaaccgactgcctctggcttcggggattcacggccggccgagtgtgtacaagagggaagactgtcgaaaaaaaacctcatgcaagaaaggagacggatatacgcagtgccattcactttccagtcaggagacagtatgacagagagtctaacagaattagggtgagtgctacggcgtgcacgtcgccgaatgaacaacaggaccagggaacacgagaagagaagtcgaagacagcactcgagatcgtgacacaaagggtggtgcctgtgtgtgggcagaggtgggaacgacagtggcgggcacgtcgttaacgacactctgaatcaaagtcgctagcaagtagtccagttagggagtctttcttcacagttttgcacatttagtgcccaaacactttgactggcggagatcaaggcttactaattttgccctccaattcgccggctaccagcgttggtaaggtcgagtgtggcgtgaaacacagcgttaatggtggttgcatgtgcgctgaagtttacggtctggctacgcaattttcgccgagaagttgcagagaaaggcggaagacggacgtactttgcagctactcgaaattacgttcaccgcaacacttttagcaacaatgttttctcgtttcctattattgtcggtgccagtgcacaacgggcgacacgtccgctcttaatcccggacagggagcatcttgttccggaactgacggaagtcaacacgtcttcaacgcaagtttccaactttgtcttgacagcattgagactgtagcatggttttttttgagattagagctcacgttcgcagcctgggaactgagtcgaaagattagtggtggcagaaccgagaaaaatctggtttactgtgtgtgccgccggacaacgaaattggtctttgtcctgttcagttgctcccgtacgatgcgtagacggaattgcaggagtgcgaacgctttcgggcaaagtatcaggatgattcgtattttggaaactcctaggcagcatatagacatgcaagttccagtgcaaaacggagggaacttggtctcttttctgcaaacacctgcgttttgctgtgaccggagcgtcatagcgactctgtctgacgctcgtgccgactccctgtacaatgcgcgaaatactgtattgaggtgctgactttagtgagatagttgatgaaatatagttaacaggtcactgtccacccgccgattcagagtagaggggaggtgtagatggacttgtacaacgtatgtgaaggtgtaaaagcattcaaaaattactttgctggagttatgctagacaaagccacacatatgttgacacgacatgcgtgtaggagtgatgttcgcgggggagcacgctgaatcgatagtcatctactattcaaaacttagtgatacagaacttctggatacttagtactccgctctccgcacgtcttccctaaacaacacatgacagtctgttccactttctctctaatttatgtaggtgctgcatacctgaaagactgccacaatgtacatacctgcaaggtcaaggtgtttttctgtagagaagagaggccccaaacatgcttgcacggctcaccttcgtttgtgattggagtgatagaaaacgagccaaaacgccgtttttctggatgaaacacttccaacagctctccgttacacagtgtaggtgggtgcagcaacgacaagacctctatccagacatctgattcggtagacatgctattcctcggagcctatcgaacggttcaaagtgctaaccttcttctgccggcagcccctggaagtaaaatgtaggcctctgggtcggcaaaaactggctacaaggcaaactagttatttatgtgttacgcaaacagcaaggaatcgctggtttacttataacacggcttgacgcatgagtttcctgggccgcatccctgggggaaattcatatgagtctcgagaaaatcctcacaactgttctttcgcttactgcttcaaagtcttctggtgaaggaatatgacaagcaggcgtgtgagaaaacgaaaattccagctccgctgctccggcgcagaagagtcccacaaacacagttatgatcgcaaaatagtaacccatggcttcgcccactcaacatgaagaaaacacttaaggaaccatgttttatcccagcatacgccttcggctagagaggcagatcacgatggaaactgacagaatgcatgctgtggatggtgttacactgacagttgtactgtacgtacagtagggctgggaggcaagtcagatcccgagcacatttactgttttcattccccctcactcaacgtgaaaaaacattcagaatacggacggtaccgtggggttgacgccctttcagcaataaacccgcaagaaaaggggaagcgtaccccaatctcgccccagggctacacaccttcttagatatgttcgaatagaattgccgatatcggcaaatggaggagtaatgcgctccaatattcccacaggaggcacacgcaaacagagatagtggaacgcttggcgacagatacggaatgaagaacatgagatcgtagtgtactacatttgagattgtcccgatgacggcgaggccgagcccggggcttgcgcatattgagcacgttgatagctgactacagaaacactaattcaaggacactcattccttgctgaatttccataaggaacatgctgtgcgttcttacgtatgtatcgtcggtcaagcggaggtcagacttgtagccccctggcagcttgctggcctgtggtgaccagctcatcgtggtcctgccttgccgcatgcagttgtaaccggctggccgaaaagtcgtagactgctcgcatccgctgatctgcccattttacactctttcaaagcacagtttacatccagatacaacgtacacaaataacgggcagccttcttttggtgagtaagccttacgttgagcactgctgatttgtgatcgtcgttcgtatgatccacctctacggcgatttgcctgcttccacccatggcgtctgtcaactcgaatttgccgttaagaaatgcgttgtcggcctgactgcaattcattaggcgtgtatcgttaactggactgtcaccaactgtgcatgcatcaagtgccctggagtgtggatgcgtcctttgatctttggtcctgagccacccgcgccccagcaactgtcacatggctcatccagctgtggtcgtgctgcaatttgcctctgcttcttgttgcggaatccgccagtggaaggtggaaagtttaacctttgtatacaagtgttgctctccgactggattcaggagctgcgagaaaccaccactccgtttgttacaggccgttgaacgagacgttggacaacccgcggcttggtggaaggcaccctgtgtcttatatccttacagcagctgagccttctatatcagcatgctccgcaagcgctctacactcgtgacgtagtcagggatcagatgacacctgattaatgtcgcgttttggcgtggtgcaagacccggtccaagaaacagacctcattcgtgtgtagaaggttttgtatgttcggcatcccctttttccataa

SEQ ID NO: 1989 - DNA, 1609 bp, Toxoplasma gondii
  source 1..1609: mol_type = genomic DNA
ctcctcgtccacaatgatggccactctgtcgtcaagatgtgaatagcctgacatatccaattctcgacctgcttgccctccatttgattccgatgtgacgggccaagcggtgacacggaaacacagccgcgaaattttctatccacctcttcatcagcgtgtgatgcagaggtgacactccagtgagcatcttctgatggcgcttgcgcagaataccactcggcatcattctgacagcttgctctctcgctgggaggcaccacaagagaagccacatggactcccatacagcaatcccgaccggaccgctccgagggggaatagcttgagtttccatcatcgatttctggttgagaggttctgcattgctgcatgcattggtcacggccaagtcgcacgccaatgacacggaatgtgttactactggcagtgtcagcgggtttggccatggtccactgtggtttacaaactcagttatttagatgctccagccagccgcgctccattgaaaacactcctcagggaaagctgcctacgtgcccgtccgcggccaagcaactggatctggcaatgaatcgggccgaaagtacgcattcctgggaggaaccaccactgcgtgcatttcacgacgcgcgggcggtgggtatgtttgccccttgcgcaatctgagcaaacacagcgtagagcgttgtcgagttttttgtggtcggtacgggattcaggaaggaaagaatgcggtgatatcaccatggtctcaataagcctctgtcccgactccaggtcggcttgtgcagaccgttatcacagacgcacgcagtcgtatgctaacgaagatctctgtttctggaaaaatgagttacagccttcggtgcacggtcgggcacaacagggctacacagagggaaggatgacaaggtgccggcaagaaacaagtctttgtggagtagtgcacgaatgcagctcaaaacagtgatcccagactcataaccagagcaaagatatagggcagttgagtcctctgcctcaacaaattcagatgaaggtggttggcggcgtgcccgagattgccttgcacaaatgtctaaccgcaagtagaagatctgtacatgcacgcagatgctctacgcactagagcgtcgacacaagaacggcgcatggagagtgcactccgttcttaacaggaacctgaaatagaagggaaatacagtggtaagtagcgcgccatagctgtgagtaagtttcaaaagtttttatttcagttgttttctgggcatctctacgtctgcaacgcgattgtctctgcgagcggtgaacaagcgcatgcgagagactggggcattgaatgtgaatcgatgcacctgcacagcttttcgccagcgctatttctagcgactggacatggtcatgtgacaacacggcatcgactcagatgggagtgagaaagatgcaaacaggtgctgaaaaaacaccacttaatagaggagacaaaccccggtggagaaagcgaaacgagactggaacggcaacgaaatagagaagacacagccccaaactcccgacagcgtgttgctctgtcgggcaggcaggccaagctggcaagccgctagca

SEQ ID NO: 1990 - DNA, 1887 bp, Toxoplasma gondii
  source 1..1887: mol_type = genomic DNA
cgacacgaaagtacaaaggttttccacgaaagccgtctgaggaatcaactgcaggaacacaagctcctctctgacaacagaacaactcgacgccacacacgaaacagtggacggcggatctacacctggctgcttccccaatctcttcctggctctctacatgaggcgtgcttgaaaggggaggcaggcacctctagcgatgtcaagaagcaaagacaacatcaactggagagccctgaggtacttgttctgcggcgaatctaacgagacggtttgcgcagaagagttgctgtgcaaaaaaaactcttcatgctgtagacacaaagtccttcactcccgtgaagttctgttactgcagtacatccgacactaccatcatactagagtactttttaaaaacgactccggctctttcgtccttcgacgctgagacgtcgtgactccgccacttttgttcgcgtcttgtatcctattcactcccttcagagtgccgagaacggacttgaagaacgcgcggcacactgccatgaaccttttgggaggactaagaggttcaatcgccgccttccgctcatctacagttccatttgttctaaaaaactgcgaacgaggggacggaaggacacttttttgagtacttaacactttttcagctgtctttagtggtctcctggggtggtggcgtacaacagtcataaagaactccgttatcggtatctcagcaatcacaacaagcatcgctgtctgtgttccgtagaaactggagacgtatgtcgtactccaggtacttcgaagtctctgtttattcgattgaagttgagttctaaaccaggagtccagttcgcagcttacactccccagaagaaatacgtctccggaaacctgagaagcccacttgataatgtgtaattacaaggaaggtgtagctgtctctatagagttctggaggggggaacccgtagtgttctgcatttagtgggggcctcgacatcggtgtggttgtttcttctgttctacaaacgatgaggtttctgccattaactcctcgaacgtgtggtgtccagcagtttcacgcaccagaacgatgttacccaagattcttcgttgaatttgagttgagtagccgactgtgaacttgaaagggcgcaaggtcctgtcgcgactcacttgaacatccggaagcctctacttttgaccagcatgcacgcgcattgtgtcgcgaactgttctctgtgactgacggggcaaatttcacctcccgtgagttgcgcagacatgctagatggggtccgcggcagtgcaacagacaaaatcggaaagttcctcgaaaacagcacttgccccccaggaaaagcgatccagaccgagatttttgcggcggttgtaccaccaccacctgtggctgtcccagctcaggctgttgcatgtctgcagggaaaaagcaggcgccgtttccgcgttgctcctgcctccttctgtttgcgaaatctgcgcctctttgacagctcttttctgtcggtttgtgaggatgccgcgagtcgggagttagttcccgtggtgccggatccacatttttctcaggtccgttttccgggcgggcgccactttcgagtttcagcttgcgtctcactagcttttttttcgtcgtcttctctcgcgcctctacgcttttttctccacttcctgcatgactcgaggaaaactctcccgtcgaatgtatgtctcctctttcgtaggtctcctcagctgtctgacgaacccccaaatgggttctgccttcccgtttcgcgcgcgttcagtgtgcactccttttcgcacttgattctggagcgagtgtctttttctccagctgtttccttctctcttcgtcttaattgtccgtcacaa

SEQ ID NO: 1991 - DNA, 2495 bp, Toxoplasma gondii
  source 1..2495: mol_type = genomic DNA
cctcaaatgttcaagacagaatggcacgaacattttgttcagtaccagatggggtcgggtaggcacaggtgcgaccgagagtaaacaaagtacaagaaacgggggtggcacattaagactgcagcaaaaagtggcaggaaaaacatgaaccaaaatgtaactctctgggatccgaaagcaggcatggaacgccatgaaactgagaagcggcaacgctccaagatcagagatctcggtggtaaaggactgtcattggcgccgctagggcaaccgtccaaagtagcaagtattgtatagcatcatgtcttgttgcgaggccgcatgtacataaatacgtatataatatcaggggcaaatcatcgaaaggaaacaaaacggcaaccaactcacccacaattgcctcaacgcgcacaaaacgcattcacacatatattcacagttgacaatcatattcagttgtaccatctatagcagattctggccctgctgaggtagtggaaaggatgcgatgaatgctcagtcacgtggtgttaccaccaatcggaacagcacagtactctctgtcgaatcgagcgcccactcgccccgagactgcatgccacatgcttttcctacagctcttccgaatcataaattgcctaccgtcatttctctggtgccgctacatacctgcggatgcactggttatgacgcctcccttctttgccactcgtttcgcgacctcttcatcgctgctgtcgtcctcgctgctggatgacgaatcagccttggatggtacaggcttctttggggcaccctttgcactggcaggcgcgccagcggcacccttctttcctttctgaaccttcatctgttgttcttcttcactggaatcggagtcgtcgctgtcgctggcaggacgagccacagctacgggggcagcctttctctgtgaacgtcaaagcgcacattgtccccaaaaaggctcaagggaaaaagaaacggaaagtttagtcatccatggtcactatataggtgtttactgcaccaggatgtcgctaaactgcggagacacggtgacttttgtcggtggcatgctacacttatgtggggttgtttcccaagtcgcggggagcgcagctgcgaaaacccagtcgccaaacccgtgagatacctatgtctcagaagttgcacgcacataccgtttgtcaagacagccaccttttgacattcctactcctccatattatttatcaactaaaaactaactgtcgcatgacgtcgttcggtggctcccgttggcagctgcgaaaatttcttcgttcccaagagtcgcacagcggcattggtggtctgactaaaggagccgtccaaattacgcccagtcttaccttcattcttcgtctatgaatgggtgactgtcaaaatattgcgtaggtccgagcgggggaaagatatgacgaaccccacaccgctttagtcgacacctatcacgcggcagaaacgcgtgaaacaaccaactcaagagtgggaaggcagcgaaacgacggtacggactctcgtgcgaaccaaaaggttccagactgaggaagtgggcaagtgtgacaacaagtttgccgaataataatcctccaccactgtggcgatggcaggagcgacgataagaactagtgtccacgccctcgcaactccttccgagaacgcgcatctggggacgccatcgcgcttagtggcaatgtcggtctcttgcagaaccgctgctgcctcgggtttctcctattataagccgggttgattgggctcgatttaatttatgtccggcggtaccctttcaggcaccaatcgtcgtgcggtggtggttcgccacgagcgccttaaaggaggcgatgtcaagagtacaccgggttcgagccacgtgttttgaccgagaactcgttgggggtcttggagtacctggaatacgaagttccaatcaacagtggtgcgatggcgcagaatggcttttttctgaaggtattctgtatttattcgggagggatgaattgtcgaggggcattcccggatgccagcccgcttctgaaagctgctgctcagatgaggcccaagagtcgagaccgttgagtagctgccggtgccgcattcagcggagaggttattagtgtggtgatctggcaaattggagggcagggacaaattcactgtcatggttaattcgcagtcgggagactgataacatgttgtccgtattgggttggagtggtggatcttggacaaataacagtttggagtcaaggtcttgtgcatgagagctagcacttccggcgggcagggacgcctcgatatttcgggcaaaagaaaactgtggctccactcgcgcccgcctgcatgtctgcctctagtttttaagaatcagtgcacacccaactgcggaatatgatctccacacagctggacaggactccatcatcgccactacctctatacatcctcattttccggttcagcccttgccgcca

SEQ ID NO: 1992 - DNA, 1469 bp, Toxoplasma gondii
  source 1..1469: mol_type = genomic DNA
ctctgtactctgcggttgatgaactatttaaacagctagagttactgtttcctcaaacttttggttcccccgagtggagaatgtagctcgtccccaactttaacgtttgaagtcctcttgagtttattgatctgcttccactcctgccagcctgtgtgcgtacactatgtgcctctctttattattggcttttctgtttcctatgtcagctgaatttgtgtaggcaggcttgtgtcacttcaaatgagccatggtcgattgttagcgatgacggcaaatgctcgagccatgaagagttgctgacaatccctccacatgacacagacgtagcgcgcatcttcagggaaggctgctgtggcatgttcaatacattggcacgggacgggacggatagaattatcctttcttgctagggacgcaggcgctgaaatcaattctgtgaacgaccgataaacaaaggctcccaagggttggtcctgtttacagcagctacatacgataccgcatcgaatcacaatgataatacatgagcaaggacacgtaatgggcttcagggaaccggaaaaatacgagacaccgacagcgaacaacaggtaccaacagtccccgtttttcatcgagtaccagttcctctacaacgacatactcctaaaacagctctcatgattcataatcactttcctcgcgaactagacagggggaatccagtgggattagtcggttacgacaaacggcgtaaaatcatagactgacgatggtttgtgttcttcgaacacggtaactcctgctgtgaatatggcatgcatgttgacggcacatttcaggaattggtcattagttagctctccagcaatggccatgattcttgagtaatctagtaccggagcttaaaataagaccgtggtttctcttgttgcgccatgaatcgggaagtctccagttgtcttgcaggggcaaaatgtaagcccgcagtcatgcatgacggtgaggcaatgcagactgaccacacatcagtttctctatcgagtaaaacacctgtagctttgatgtgctttctcatgctatggaagatacacttcaattcaaggagcaaagttacgcgagcaacgcatgcgcgatctttcatctaagctacccgtggctacacacgagctgaaggaaaaacgatgtccgaacttcttgatttgacggtgtattcactcatgcagatacacggctgacaagaacaggccaaatgaaggcgtctgcctatcggaaaaggcgcaaacaaattcgtgaattgactctgttgcatgccgctgttcatgtttgcatgcgtcagaaaacgtcggacaatggattcttcgtttgagatgtgccgctcatttctcactgccaccccgatgtgtttgtgtctcccacagcttggcagattctggcaacattcgggggggaaaatgtctttcgttttttcgtcaacgtcgctctaa

SEQ ID NO: 1993 - DNA, 1838 bp, Toxoplasma gondii
  source 1..1838: mol_type = genomic DNA
atttcccaggcatgtaggtacctaaggaatcaagaactcatgtttctcgtaggaccagcaagtataattgtcagagctcagaagtacgcctttgcgtatctccccctcgatcgagaggtatcatctgatatgctcaaatctgcattcatgcgttcagttgcatgtgtccatgcatgcgggacttctgtgttatctcgtctggcgcagccactcagtggtctcaggaggttttcgctttgctctcggtcctcagtttgatctcaaccatatcaaccgtcagcaggtaggcgattatctgcacgcagcgtccatagtttcaatgttcaaattcatatctgcccgttcattcacttggaaagttcctcctccgtctcgtgtcacgacttcagtcgttatggtgtccattcgctctctccatatatgtatctatgtatcgtgtcgttttggtccgtctcgcttttatccgttatctagctgtgttttcttttcttccttcctcgttgtcgttctcgctccttcgtttgctgtcccatcgcatgcactcatattgatggctgcctgcaactctctttgtgcagtacgaggagtacggaacgtcgtttctcgagcgattcagcgtcagaggtcgtctgagatgagtcgcgcggtgcgcccccaacgcagagaattcggaaaccatccgatgttcaaatatgtggaggtggaaatatgaaaacaaacatatgtcgaagtccttgaacgtcagcgcatacctacacaggcaaatatatatatatatatatgcatatatatatatatatatatgagtgtgtggatgtgcatgtctatgtcgggatagatccatgctggtgcgacagcctaaacagacgaaatcattcgatgtgcacacctatgtaggtcatcctgtcaggaaaatatgattcgaagtttgagggaaatgaagcgcctatggcgatgtagcatttttaggcgcatgcgagttttttgtgctacaactggcactgcctgcctcatctcatttgtcgatcactcgggcgaaaccatcgtccggctttcaaaacgctgaaatacaacgcactgatcgaagacccacagtcactacgtgatgtgcccatgcgggggacggagggtagagatacaacacctggctagtattatagatgggccaccaaaaatccctgttttcttcagtcacgaatttaatacagatgcccatgggttcccacggctgagagattgttaaaatggaagacaaacgaatttggctgatgttctctccagacgttgaccctccattgttcgcacccacaccgtgtcgctttcaccgcgtctgtcggagcaactgaaatcccaaacctggagagatgattggtctgaaccagctcggtatctcattttctaaacagcaacaccggatgaaagaagcagcaccaggtcgcccgtgactacccagccacatcgccgtgtatataggcgccgtgtataacgatatctgttttagtacgtgtagggatgtatatctacgcctactcatgcggtgtatatgcactagagcacgaggcgtggttttgccagttctgtactgtcctcgaaccggcttttacccacccgtaacgattaccgggtgtcccacagtcttacatgcatttgacggattcttgcaataagtttttaaaggttcgcgtcgatttcgacagctcgctaccaagaggtccaaggtcaattcgtgctcctctgatagcagtttcatcgaaacgtggaatggcgccacgaatcttccgtgtccaggcatcaatttgcgacggcttcggcgacgctccgctcgcgctgaggtgcca

SEQ ID NO: 1994 - DNA, 1896 bp, Toxoplasma gondii
  source 1..1896: mol_type = genomic DNA
ttgaatcggctaatgcgaggagtgacactgtggttactccactccacatcggtcgttttctagcggcgatgtcttttgactgctggcatcacttgagaatttctgcttcctacagcatcaaggtctttccacctcagtttcgttttgcggctgactcaatgtgtatcagggttgtcacccgtgtttatggcgagagacaattcaccattgtgtagcgcggtttctttccacgcaccatgttcaggcaccgatttcgactcttctctctggagttcctttcacatcttctggtctccgctctgtacctctcagcaacgggggccgttgcttcttgcgtgttttttctctgcgctaaaggcgacgatcatcgctgctactcttgcgcgacagcccttcgcctttgtccaaggtgccattcccatcctgttgctccttctctaactagatgttgagcgctaaccaatgcaccaggtgcttttgaggtacttcacatcttcactgtagcgtctatatatactgtagaagcatcctgcgcagtggctagccctcaacatgtagttagagaaggactctgtacggatgactttcgcctcaccaattcgacttgtaaactacgcaacggtcaggtgtaaacgcagcttcgtttcggtccctctaattctatctcatttcttctcttcctcgcccttcatctctgagctgtggaacagctggcgtttccgtcgaagtctaagtttctcccccgagcagccggataccaccgtactggatgcagtacacctgatggtcacgacagacacaggaggacgtaaactcggtgagcaaggaatttcattatctgatccattagtccaactcgtatgaaataatccaccgaagaagctttccacttcatgacagactcaaacccgctaggttaaatctttgcgaggaaaaacactcacggacgccggggttcacagacccgagacctggcggggaacgaggtccgttttcgtctttatgagaatgcgaaacgcgaagaaaatgagagattctgtgatgaacttggatttcccgagagttccgatggccgaggactcacggatccgtcctggtgatatacgcgcgttccttcgacatgtgcatgcagtctactatttcgccggttcacacagcgcgtcgtcaaagacacggcaaattcccggctaaatctgaccagaaatcgagtgagaatgcggatctttttaagcgaatcttaagcatctattggtgacttgtgtttggatgtacagggagtacgcatcgccagcagaactagactcggtgtcgccgtcgcgtaccgtttttgatgggattcggctgctggtgctgttgccttttggggtcttccgtatccccgtttatggatgcacccacgctgcatgcttcgtctttctttgaactccagtcgtccctctttctgtattctgcttcttcgtcttcggatccccgcgggttcctctgcatgcacactttgtgtttctttgtcattttctcctccccgtttctccgtctccccaggcccttgaggagtcgagtgactcttatcttaacgcatcatgcagtcctccgtttttcctaaggcgccacaaaattgttctccgcatccagttgccttacaaattgttcctgttccttgtcgctgctctctcggctctccgcgttgcatctagtcgccccgccttcctggagaaacgcagacccggtttcgcctccttttatctaccggcgcttccctctctggtgtccagctccatcgtttctcctcgtttcttgtctctccgtcgtcttggcattgctctctgctgttgcggaacttccactacgtgaaacgtccaggggacaaggcgcgaacagcgaaaaacgaggagagaa

SEQ ID NO: 1995 - DNA, 978 bp, Toxoplasma gondii
  source 1..978: mol_type = genomic DNA
tgcttgtccagcaacgatgtctccagaaacaacataaatgaagcgtgcatgcaaaaaatgcgttctttgtgtccgagactttcctggacaaagacatcctgtctgttcctttcagtcctcctctcctgaacagttctctctgattctctgggcttctgtcttcgcttcactcagtcactctctttctctctagcttctcctctctcactctacttatctgtcaccacaactctctttctctctctttctccctccctttttcccctctgtttgtcgcttcgcttcgactctgagccgcgtgtctgttccagcttcctccgcttaacttccttcttccgcgtttccagggtgcgtacactccagtttttcctccacattctgagcgagagagtccagctttccttggtcttctcagtgcaaaaatacattgacgctcgcaagacagctgacggggagattctcgcagagtggctctacgagtaaacaacacgcatacgtgaccgactttcctgtttgaagctgcttctgattcggtggataagcaagttcctttgtctttcgttacggcgcgaaaaaacggcaaccgcctctcctgcttcgtcgcgcctacagagagcgagtgcttccctcggtcagacgcgaccaaatccagttccgcgccgataaagaagaaccacagatccgttgtctctgaacggaaaagctggaagaatgaagaagatggttttcaggtctcctagcttgcttcctgatcctccaaatgggctctgggcaccgttggggacgcgacggacgttggacatggcactgaaaagaaaagggagactcgcaccttgtcgacaaacggcgctgcatctcagttctcttgtaaaacttctcttataaaaccagctgcatgcgtctgtacgttttctgacgtctgggtgttccaagaattatttcactgcggagctttttccgcggcgagacgcaccgaga

SEQ ID NO: 1996 - DNA, 4651 bp, Toxoplasma gondii
  source 1..4651: mol_type = genomic DNA
acagaaaggaggagtgactcgaatgggatggcttgaagaagaaaggacttgcttttttacagccttttcatgacctactcgagagccggggcctttcttcggaggcgcggcggcattgcctcctccatggattctggatgagaacgtatcggcttgtcgcagcagttccctcagtttcgcctcgagttctgcatttgcgaggccgtattctccggagtgtctttccgcctgcgtgaaggtgtgcgtctcgtcttcaccttcgcgcagaccttcttcttcttcgtcttccttctcctcttcttcgtcctcctcttcttcctcggcctcgggagtctcttgcccgtcccccgtcggcttgttcccgggagacaggtcgtccacgttgattcgcctgtctgaagaaagttcgctctcgacactgcctggcttgttcgccgccacactcacgtcgaccgacgccgcgctcttctccttctccccctcaggaggagaggaagactcagttgcggtattcatgaggagagctgcgaaaaaagacgaggtcgggggtgcaaaagtccagaaaacgtcgcggagacgaaaagacttgcggcggctagaatggcgcctgaagtgatgacggctgtcggaagagaaaacagcagagtgcgagacgagcagcgagtttcggaccgcaaggaaagggagatacacgagaaaggagccgctggagaatagcagcgttaaaaaagtccagaaaaaaagaacgctcccttcggctggacgacctccggaagagaagatcccaaccagcagggggacgcgacccctctgggagcgcggagacggacgggggcgcgagagtctctcaggcgaattttggttttcccctttgagaaaagaaagaaaaaacggcgctgaagaagagcggaaattcgaaaacagccaggacgcatctaaacctctcccagatcctcgagggaagccacgcttgcggccggagcgccgcggcaagaggcggactttttctccctctcagtatctcgccttcgaccttcctctcctagttctgctgcgctttcagcggtttctgcaagaaagagaaaaatcaacaggggaatgtctcacgacggacttgcacgagccgccgcccgagtccgggtcctctccgtgagacggaagcgatagagaatgcaaagcaggacagcagaagcgagagccgagcggcagtgtctccctcggatctgcgcagaaaaatagttcctttctctgcttctcctcacacgaaaaaagcgggagaaaaaggcagcgcgtctgggagcatgcaacaccgtgtgcggtgcgagtgtgttgttccccccctgcacagagcgagaggcagagtctcgcgactcgggagcctctgtgtttgaaggcgaggcgcgggaagaaatacgaactaataggcgagttcgtttttcactcttgtgctgaatctgctcggaaaaaccgaccggtacgcgctccggggtgtgattggatagcagcgcgagaacctctggggaacacacacagacagaccctccacagaagaaagacgcataggaccgtgtttcaagacaaaagtgtgaagaggagggagcttgtcgttaggctttcgctgaaaaccgcggccggaacgaaaacaagcagacagacgaaggcctgcagtgaaaggaaaagcgtgcgaagacgcgtctgtccgaaattgttcgcttacgccaggggggtccgtgtatggcgagacttctgtcagtgaaaaacagaggcttcgtcgcttctgaaacgaattccacctctcacgtctgcgtagaaatccttgactgggccgcgttgcttgtggcatacggggtcttcgttcgcttttccctccgtcaagtgttgttggtcagtcgacgtcggaactcaggtccaagcaagaaagcggctcggtacctctatgtgtgtctatatctttgaattctacacaagccgcatcgaatcctagccatgcattcaacaatcctggtggttaaatatggcgaagagcttgtacgcgcatgccaccgacggggctgtctgcactccagccagagacgaaccgagtcggtagtttctccgtcctgtgtttatctagctagaggccaacatgttggcggaatgtacagaggaaatggtgacattcttttaccaatttctctctgggtggttagaaagttgtttaagccgtaacgcgacctcctcgtttccccagtgccattagcttctcttggggtcgctcgcagtatctgttctacatccgataaggatcccggttggacatgtgccctccataaagaactggccagatgggtctaagtcattttggggctcctgatttggattcagtggagaacttgctgttcacagttttcctatagtagcctcacctccattaacctcttaggtgaatgtgtctctactatggggtcttgtgcaggaggtaaaagctgctgcttttagcgtgatcgtattttcttcacagctcttatgctcgtatctactttgaccacgctcttaacaggcgacttcgttaggagtccacgagatttacgactcaatcctctgtggacactggcggccgtgtatgctgtcagcatctcttctgtttctctgtacattcagaagtctaaacacgaagtttcctttgttatgtgggggctttctaactctgtctactcatttacggcgagtgccctccgttgtccagctgtggtagtagctgtggcttgtgatattctcctgtcggatctcgcgtgaggcctctcaaaaagaggatgatcttcactcctgaagtcgagacgcgaccgtacttcacaggagtgacaatgatatggtcggtcgctattccgacatatactaggaccttgacgcaagattccacgcaccaagacccccgcaaggcgtctaaagagagggtggagaaaaagcgagagcaagagagacagagaaaagatgatggcgaactggcgataggcaaaaagcaactacaccggcggacggagaaaccggaaaacttgatatttctgtgccagacagacgcatgcccttaggcctgggtttccttcagaagcttcgctgcactggctgccgcgcagcgcctttgaagtgtagtcaggcgcgcttggcaagcatagaagcttgtggacgtggaaacaggaaactgtgttaggactttgcagcaaagcgcaagcaatgcacaagtacgcgagacggtgctttccagaacagataccgctgctcggagtcgtgaatcttctacactccagtacactctacaccactcgacccgttcggaccgcaacaacacactgttccgccaaagttttcctagcgcagtggtgacaggtatccctcctaaaactgctatttcgttagcggttccgtcacccttgactgctcgaggccttttgcatgagaagttaacggcgcaatgtcgccaaggaacactctggatggctctccgatgtcgtgaaagaattgaggaagtcaaaaactggcgacgtacctgcaacgcaacagacagcttctcctccgccagtccccctcatgcaaacagttttctgtctaccgacgccttgcaggaacaaacggaaaaaacatttgtggtctgaccggagatcctttctcgtgtcgtttccttccgagacaggaagagacaggaagatgacaacagctttgtgtagacatgacagtcttcctttttctttgtttgggtggctcatctgtcctgtgttcctagctgcctcgcctagatgcccccgaaaagcagaggaagacgcgcttcgacggaaaggcctttgcgccttcagaacgaacgaaaacaggagtgaagtcactggaagatcacttctgcctctccgactcagacagttgccttctggctcgaacgcatgctcgccgttgcaaagctcagcgcggcgataaactggagacaccgcgcggcgctggatccgcctgtctcttcttctcttctttaccatgccgggagagcgcgtcttttccaactgcttcttcccccgtctcctccgccgcaaaaatctgcggcgcgacccaaaacgacgtggaaacgcgcatgcgacaattgctgcctcttcgttccccgcgggagttcgtcttttcctcgttttcgcagagcggatccccccaagagaagtggaatagccgcgactccccgcggtgacgcatctgctgtcttcacccgactgcgtctggcccatgcgaagagtcttcttgctccactccagaccttctcaacagagcgttatcttctaaacgaaggactggacaagaaagctcttcctccggcgcctttttcctggacggcggagtccatcccacggtgccgttgccgagcctctgcatctatattggcttcccctgtggttcttctgtgttgttccacgcaaaccgaggtccaggagcgactcttcctcaactctggacgcaccttgactcctccatgcgtccgtagagattctggagaggcaacggactgagtttccttctccaggaccgaggaaacgcagcgagtctgcgtagacgcttctctctctctctttctctctcgcggggacttgctccggaagtttaagaaacagactcgcgcaactcgagaactcacaggaaagaacga

SEQ ID NO: 1997 - DNA, 2246 bp, Toxoplasma gondii
  source 1..2246: mol_type = genomic DNA
cgtcttgcgcagcatctgcaacaaccgctgacgcgtacgctacggatagggtggttcatcatccacctgcatatccatttgccgaatgtgtttcttcacgcaggctcagccattggctcgagactccgtgctggtcgcaaccggttacacattgagcctctcaactgaatgcaagagtctgcttcttgcatactgtggctatcactgcagctcgaccaagcgaggactcactatcagttatctgttaagaattgccacaacccccagtgtggggctttcctgtccacgtggacaaaccggcaagtattttggaaaacgctttccacggcctatgcacatttattcgctcgtggaactccagttttcaagtttttgatttatcccgtgtaccccattagtaaaatcctacacggacagctctcgtggtcgtaatcgtttctcacatctcgagtgtgtgtggtgctatgcttgtggcaagaaggcaccggttcgctctgtacagcccgaagccagtcgtcaaaacgcagcaccaatgctgccaccgtggggatagcccatcaggcagatcttctggggcttacctaatggatttcagggaaaacgttctgtataatatggaagagttgtggaggagtgtaccgtagtgtaggcatgtgtgtaggaggcacacgtcttaagtcatttgttgcacatttacgccgctcctcagtgccacgagcacaccagtgttcacgcagcatttcctgctcccctgtccgtccagaggtaccactgtttttaaagctggcgtggcactttccgcttagtccatgatactttcggctcgctgcgtcgaaccggttgcgaagtatttccttgccagcagaaaagtactacctgctcactgggtcgaagaaggatccgcggcgagtctagtcggtttattgtattcgtattccagagacggtatcaagaacgaggtgggacaacggtcttctgtattgtttggtcctctcgaaaggaccattagatggtttctcgtactgcaccggtatttgcctgtccgagtggcgcgtcgttggcgcctcgagtcatttttttcctgctccagatatgcacctcttcgtcaaagaaacacaatcccgacacatgcatttgttgaagacctgaaagtattccttttcaaaactacctaccaagacccatgttcagagggctgcatctctagttagcttcatagatcccgtaagcgtctctcaaagcagttgaaaaccattggcgcgcaaggtacgtgccagcacttttttggcaaacggaatcttctctgtgaaggccgcgtacgccaaaagattagtcgagaaattgatatgtagaaacgtgtcgcagaagttgtattacgatgcagtggtcacccttcgtctgccgcgctcgctggactgcagccacatgctgtcaaggaacgtggtgggagcggaagtggtgcatctttgcgtttctcaacagcatatgagaatttagtcagaatggtgattcacgcgctttcgccatttgaactcacgttaactcacagccacaaccattttctggacatgtgcatcagtatgcactggcacacgagatatgaacacatttgtttggatgtcagcgcgttccctctatcgacatccgcggggtcgaccctgttccgggtttcgtcaaggggttcgccgtccctaacaccgttgtattgcaaacattttgagtgactgtcatgtattttcacgagaacttggcttcgcatgctatgccttgactattctgtattttgacaaaatatggtgacgacaaaaccggtttgttgcaggatggtacctcgatggcttgacagggaatctcattcattcgggagcgcttgaccccaaatcaaacaaagcttctcttccgctttgtcggtgccactccaaatattcgagcgacatggtatgcgtctccgtttcctctcctcaaagacgcgctttttttgctgagcattgagccgcctttgttggcggacgaagggcatgcactttccagggcttcgtctggttcttccctttacaacgcccactttaggcagctagcatatgcttgatgatctgcgaggacgtggaatcgcgtcgcttttacaaggacctccgaacagaatgcctttttcttggtttttataacttgcgactcacgaggtgaccgctgaccccgcgtcagcaacgaacccgctctcaatggtgctgtgtccgcttggtgcgcaa

SEQ ID NO: 1998 - DNA, 4333 bp, Toxoplasma gondii
  source 1..4333: mol_type = genomic DNA
gacttatttcctacaaaagacgtagaaggctattttcaagttattcccgattttatttcaatttgtgtccaatttttaaaactctcttgggggagaaccacgacttctctgttctcaacggccagaggagactgtgtccggagagtcctcgcctgccgactcgaggtttgtgttttttctctgtttgcttctcaggcatatgaaacatgcacgcggaaatccctcgccgacccgagagcacctttgccgactgtcttcgtcgactttcaaccgcccaagaaccgcgcgaactaacgcgaaaaaaggagagaaaaagagtccccaactctctccagagcgaagagttgccaaaggaaacagaaactcgaaaaaaagacacaaaacatatccccttcatcgaaggacagtcctctgctcatatacgtacgtatatagatgtacatgcatttattcagatatatgcatgcatatgtatgtgtgtatccagtatacagacagacgctgagctatagcgacttcaacgttacagcattcttgcacatctacatacatatctatatatcaatatacatatatatatatatatacatatgtattggtatatgtggagaaggatctggggaaatatggagaatgaaatgtgtgaatgcctctctgtatgtttgcgactacttgtccttttattcgtggtggactttcgtggaagttcaggcaggtggacgactgatgactgtttcttgtgaccatgcgcatctcgcgtttgtcgctatcgccacaccgtgttttttcgaggtcggttgacagcgcgggaacaagaaaggcgaaagaaagttttttagaccttaggaagttgattaaaaggtcgagacgttcgttgatagaagcgccttgtgcctttgctgaagcggcgcggggtgtctcccattccaggccttttctgtgtgtcggaacgttgttctgtggctgattgagacagagggaacgctgaaggcagaaagctatttatttctggagagagaacccagacgtaatctcaagaatttcagtatgcgtgtgcgtcgacttgctcgtcaagtgcactttttctttccacttgagtcgagtaggaagagttctgatgcgcgtcacttgaacagacagagacgcgccggcccagatgctgtctgatgggtcagcaggggaggactgtaaacctctggaacgtcgcgttcatcggatcaaagtcgctctgcaggcatgtcacctgaaccttcttttactttcaagtttcttcagtcccgccacgcttgagacactttggccggcgagaaacgaaggctgttcacttctgcgtgttcctgaaaaacatttaaggaaagcactgcaaagtgatgtcgctgtgacgtttgtttgggagatgtctccaaatgcgatagattgcaccgcgaggaagcggggaaaaagagcaggttctctgtctttcgagaaacgtttcgatgaaacttctaagcgacacagcttctctggaacaacttgcagcccagcgctgtgcacaaggtaccacagagaggcacatggaaggtcacagaagacggggaagagaacagtcggagaacaggagacacacatcagttcttttttatcagattcggcgggttcctcgaaacagacgacgaacgactgctgtcgagagagccgccacttaatgcacctaatgcgcagaacccttgaggtgatctctccgtgaacgatggagaggtgaggccttccttctgcattctgtttctcgaaactatcctcgtacttggaggaaccttgttcgagacaggattcctagtaaccgtttattgagaggacatactcgagttggacttctggtataggtcttggaacagtgttccagcagaagtccgtttgaaggggaagtatcttttgaggtctgcggctgaattctgtgggaattcttccgagcccaaaaagcagactaccacaaagtctctttccagaaaaaggattttacaaaccatgtctgcgtccgactcgagagacagacaaagtgccttgtgttctcgggtcccctttcctttctcttcttctctcttgtctcccctgctttccttcctcccttctcctttccaaggtctcctgcaataagtaaatcgacatctctaggagatccccgtttgcaaaattccagaatcccacctctctgtaagtacgtgctggacaacgcacaaatacatctccgtttttccttcgaagtgcaaagggatgtatctactagcctcatggagacacttatcagtgtggccttgaaataaattagttgcaacagagaaagatgcacaggtgtagtatgaggcaagtgtgacggagccaagtccgttgctttgctgctgacagttggtcggtctacattattccatgatgtcggcggattctggggtgctgccgagcgttttcccgctagggttccaagtagcttcgcttttgagctctgtcacttttcagcttttgtcttccctgtcttttcttctgcacacaaagaacgccagaaaacgctcgccgcaaaaaaacggggaaacggcgagtgacgccccggtgtacgggcatctccctgcgatggattggggaaaaaggaggtcgggtcccgaattttttttgacagggtttccttaaattcaaggttctcccctcaatccgccttttcgcggaagagtcgagttctctgcttgccacagaggcgtcggcctggcgagtctcaacttgcagcgacctagcgagcgcagaccgggggtcgcacctgcgatttctttccgtggaaagcgttcttttgcctcgtatgaaacggaacaccgtcaaaaaagtaaaatacgagtcgggtgcacgggagaaataattaatgaaacctaccccgtcgggccccgtccccttcccatctagcgctcgcggctatcggggctctgcgcgtttgagtttcgaatggtttcgcttgttcatctgaagcaacgtgttccttcagagaggctttgcgtttatttgcttcgacgactcccagaaggccgcgcgttcggaaaaagacgcgaaaaaagcaccagaggtcgctgtcgtcgtggtgaggcctcaacaccgggactttgttcggttggtgacatccgttcccaaagggaacagggaagaaagtggaaaatgcgtttatctcaaacccttgcagctccaatacgctctaacattttttccttggcttgtgtattgcgtttgaacgccactcccgtctaatctaactggccgaaacctcgacactggaatcgacgggtcgagggctgcgtctgacgcatcacatttcagagaggtttctttcatatttctgtagctttttgagtttgacgcgagtatcttcaccccattcgcctcctctcgcgggtgtacgtctacacttttgcctcgcgagggttttacggcactccaggtcacaaggatcggatttgactgttgctcctgcgctctggagtttctcgccatcaagcacctccccttttgcttcgcgtgtctgcctccgcgttcatgcacacactcgcatccggaattccagaagtaatcggtcgaactttgccgggtttctctcaagcgtctcaaactctacgtgtcgtactgaggagtccactgggtggtggtgtacagtcctggacaactcagttgtctgcatttcatgagtcagactcagtgccataaatggcacagaatcgtctcttgcattttgcgcgtccttcacatctctctttcccaaaggtctcggttgtatctcatacatatgagtcgtcgtcagtatccttcctacttgtctgttctgagatgattctccgaaatttcgctttcacctcctgtgagagcccttccgttcttttcaccgtctctggggtcttttttttctgtctgggttcttttttcctgtctgggttcttttttcctgtctggggtcttttttcctttttctcccactgtgctcatattcgagcagggggagctctccagctacgtattcacaaactgcgtaacgtctagcccatgccaagggctcctagggaaggtcttcttgtcgaagaattgcgtgttcttggagttccttttccttttttctcaaaccctgcgcttcccctccccgcctcttgcgttggtgttcaggaaagcagacctttttctttcaaggatttctgtgccctcttttacgcaaacgccttcgactctggagccccgcagccgagaaacaggacatctttcctgccgtttcctcgagcttcgctttctcagccccgagcgcagctgctgcagcctctggaacttttccttgtcacaa

SEQ ID NO: 1999 - DNA, 4004 bp, Toxoplasma gondii
  source 1..4004: mol_type = genomic DNA
ggagagaccgataaaaagggagagaaacaagaggcagataaagagaagaaggaagagaccgatgaggacgagaagagaaaagagagacgaaagtgtattttgacgcctactttgttttgcaaagtgaacaagttcttcggcgtactgttggagttcatgggctcgtggtagcgttaactcgagacgatcggatcgaacaagctggtccaactgagttctgaagagaatggaaacaagaggggaagcgccaagtgaagaaaaaagcaggaggaaaaataagtcgaggaagctccaagaaagtgccacgacgcagaaacgcttttctgcattgtgcgtctgaaccgcatgcgcacaagagacgacgaggacgccacagcgccgaagcagaggcggaaggcaatgagacagagagagagagagaagcgaaagaaggaacacactaaaaagcagaaatgaagacgtacttgagcatgttccactggtggtgaggctggcctggcaagcgccgatggggcctccgctggacgcctttgttgaggaagttgacaactttactccaccccatattgtcccgagccgagaacaagtgaaaaaaacgagacagtcgagcggagactcctgccccgttgcttatgtgcggtgtatgtacaccgcgcgactccgcgcgctttcacggttggtgaggcccgagtgtacatacacctcactttttctaggcgggctctttccgtcaaccccactctccccaatcgagcaagtgcacgatcgctgtttcagagctgaagaaagagaaaaaatccagtgcaccggacgtaagagatgcaggcgacagcagagcgaaggagaccggacagtcctccgctgccgcacaagtacggaagaagctgcggttgcagacacaaggaaactcagcaaaaaagaagccacacagacaaaaagcgagagaagaaacagaagaatgcagaagaaaaatgcctgcagatgcgacagtgcgtttcggagacacaacggacttgaaaacgagcggggcctgagcgctaggaagcggggcgtcaaacagagaaaatgagaaaaagggtgcctcaggaaaacaaaaacatgaactagtgaaaaagaagaaaggcgaagccaatttactttttttacgtcgtcttcagatgcaaagtctctccaccgcatgcaaaaaaattcgcggcgtgtgctcgttgcagagagcggctttcgagacaacaactctctcgcctctcctgtctctctggggagttccctgtttactatactcatttcccctctttctgaatatctctctttactttgagagttctgtgcatgcatctgttatttcccttttttcgaagatcttcttatttcgacagttttgtgcatacacatatctcggtatgtgcatattctggcatatgagccgaccggcacccagtagcattgactgtacttgtgttttttcgtggaaacctgtcggagtaactacgcaacgtttgaattccatttgctgctgctattttcttgtctttcgttggatgaaaagtgccttatctctctccgtttttcagcctgtaggaacggtgtcgatttctttcggttttcaacagacagccctgacgcgcggtgagcataccgaaaaaaatgatcgagggaaagcaacacattctctagaagcgaaaggatgagttccacaaaagaacactggggactctgagggcagaaaattctcgttgttcgtgcaagtcgaaactgactttcgtggagtggaccgcgctgtagagcagagtagaagcaccggaaagacggaaacaaggtttaccttcgaaaactagaaaaagagaaataagggtgggaagtctgcgcttgcaatcgcgtcgtgggagtcctatactcttttgccggtgcgcgacctagcaccgtccgtttgccctcattggccctcatttcgtgttcgctgaaatggtgtacactcagcgacaacaagcgaggtgggaagacacatagggtggaaacatcatgcgcgtactggttgatggacaacgggaaagttgagagctgttcggatgtctggtggagattcggtttacgacagaagcgaaaaggaggtgctgtctcgtctgaagaagcggacgaaatgacaacagtgcatcaggagttgctcccagcctccacacagtttcatgtgacagatgaagaccatctcactgacctgttccagagggggaacagtaacttagagcgcctaactagaccaggcgaaacaaaccaacaagggctcgtctattctgtagaaagcatcaggagactaccacaatggatatgagttctgtacagatgtcaactgtctttggtgcggccacacactccagtctttttcctcccgtcagaaccgtcatcttatccctcttctggacactgggtgtgcacgtagctccaaacgtttttagctgaacactgaaatgcgcgatgtcgctacagaaaacaaaagagcaccgctctcttgccccgtctgaggggaacttggattgtattttcccttctaacagcgttctgtgaatggtcatgccaacaacacagccttctgtcgaggagctagtttgtatctcgaaaaagggaattcggaatcagcgatttcgttctttcaaggaagctgccgaccgaccctcatccgcgaacaaagaaggtgtctgtcctctcagaggggcgcattttcaagagaacgtaatagtgttccgctggagtcgcacctgaaatacagtgtgtttctaatgagatcacaattgcgttacggcgtgtttctctggaaccatcctcgcgaagtgatgtgcgtttctagaatcccaattgcaaaatagcatgcttgcctagacttcccgatgagagtccgatgttttcccttgtagccccgactactagatattttttccctgtaactcccaactgcaccataaaatgagtcggtttcctctctcgaacctcgacttcaaaacgctgctttttgccgtgtggtacccaaaagaaagcgacgcgcctgtgcgcttgcagagaggctgactagcagaaaacccttgacacgcgcttcgaagcttgggagagtggcttccgagactgtcgctgtccagatgaaacatgcagcggagaagcctgtggtgtgtgcacttcgtcgtcgctgacgggcgttcattgagaagaattagttccctttttggcagtgttgatgtaaatcacgagattccaagctgccgtgggctacaaaaacaaaggccccgttctggtggactagtgcatgtaccgttgtagggtcggaacttcccctgtttcaaatcaaactgagtgtccgatcctcgaccgttgtacgctggttttggcgaacagaggcagaggccgcgagcgtttctctcgcaggtttttgagagtttttgactgggtccgcggtctttccgggtacggggctgcgtgtgtgtggtgaatcgacggcgtgtgtttggcttttggctctgtgagagagttttctcgtgcgtgtgcagtttgtgcacatcccagacatcttgcgaaacgcagcgactcgtgggaaaacgcaaacaacagtcagaacacccgaggccactcccatctaggttccggcacgcgagcgattttcgcgatctggactgcgagtttttcgcgagtagacgcgcacgagttcgcgagggaaatggtctgttgtgaccagttgtcttttgagccgcaaagaaggaaacacactctcaagctggtcgattctcgcagtctgcgttttggacggtcctgaaaaaaaagtccaaacggatactgaacccagttgcccttcaagtgtatcgacacctcacacacgcgctttacgtgaccttttcgcgcgtgcgtccacgcgtgtgccggcagaaccttctcggggcttacctttttcccggtcgttttatccacttgtttctcctctttcctagatatttcgcctcatttccttttccgtgttcgctcgaaaa

SEQ ID NO: 2000 - DNA, 1876 bp, Toxoplasma gondii
  source 1..1876: mol_type = genomic DNA
ctcaacagtagtgtccggtccagtaccacatacgaagagcgacatgccgtccccatcaaggacagagcttcaaccagtagaatcactgatgcggctcgcgacttatcgtgggcactgtagtcttccttttcctcaggtgcatatcttcagtccgtgctcaaccacggcggtatactacccatttgcatgtataccttgtattggaaccaccgatcgctgcgactgcggcgatgcgaggaacacagcacatttgctcggcagtatctccgatgcccgtgggacaacggctgaattcgtcaggtggaagcggacacattgggatgccgtagtgcttgtcgcttactcattttcatccccttcacaccaaagtttcttcccggtctgctggaagaatctcaatattctgctcacgcccgagagacacaggcctgatagtttccaagacttctctcgtttggtcggtccgtagcatgtacaggtaacccagaaattagcgtgatgccgtagggaggggggggggcgaattcacttgtcaacagcaatactgcaagtttctgcacactgccacgacccatcttttctcccctgtccttctgtgcaacaaaggtggcggacattacgtgcagagttccagaatggcattcactcacctaaacatcacaggaaagcctgttcttaaatctcctacagtcatcggaaaggcgagcatccccggcctaggactgggacttcatggctttcgtcggtgccattcatacacgccacgtttcgtaaactcaggggggttcaaaacacagccaaagtctgtagaggatgtgaaggtggaatgccaaatgccttacttgtgtcgcgtggattgtcttcgctaacagcaatcgcatgacgggctgccactgctgaacatttacgacttcgtttatggcgtggcacactgctacctaacgcatttcacgatatagtctacgacaaactgatttagtgttccacttgctgcatctctcaccagagacccttgcttgctgtgtatatatcatatttgttgtgtaaggggcatgcattcttgtcactacctagtgatgtgcagcatcccacttgacttcgacgaagagcaggtataccgtcctcccgtgaaacaaagctgagagttccctgtgtcctcgaagaaacacacaccatagacagtaacgccgtgtggaaagagaaagtaaattgtggtacggaaaaggggcaaaaacgacaaacggatgacgtttgttgcaaaggatgcttgcagaatggcatgtcaatagaacggcctccgctaccgatttgttgcgaggacccgcgtcatattcgttgtgaacatttcttctctagcgcaataattttatgaattcatggcaacaagccgcggggaaggtttctaattttccatctagtacagcagggcggaaaccatgcgctagctaccgccctctacacttttccctgcaacgacaccagcttcggacccaacgctctctacagcgcgtcgcatcggaaacgactcgaccttgaccaccctcttttctcagcgttttcgagcaggaaaaaagcataccactttccctttttttatagagcaaccgaatacatttaaaatcgtttcggcatccaaaaagagttcgagtgctcgtcgcgactggtgcggatacatggtgagcagaagttgtcgagttccggttgttgctaacctcctctctgcgggagccaatgtgggagctaagccggctgcccatctaagcctcatttgttcgctgatctgctcactgcaacattttcttgtctcttgtctgtgcgtttgcaggcatatcatcccgatttttatggtgaatcgtctttttacagaaggcaggaa

SEQ ID NO: 2001 - DNA, 2183 bp, Toxoplasma gondii
  source 1..2183: mol_type = genomic DNA
gttctctgcaaatcttccctcacacgcggcatctgtctttcctcgacgacacacatcctctgtcccaaagcgcttcttttaccccctaacacacggcggtacccgaacatctgccgagcagctctctcgcatgtaatcacatttccgcatttcgaacacagttatccatatatatatatatatatatatatatatatatatatacgatatttgtacctgtaggtttgactgtacatacacgcaattgtgtatagcaacgttcgcagaaaatgcagctgtatgtgcatatatgttcatacagaaatctatggaactcgtgtgaggcattctacctacaaaactacatacacaactatgtattttacacatactgagtatgaatagatttttatattctacacagggtgtacaagaaactgttgcttcttgggaagtctcgatcgctattttcgaaatctgctcggtatttctacgaaacactggcaagcagggggagaaacaaaaatctcccttcggcccagaattggtaccgaaaaagcagaaattcgctgcatccttcccaacctctccctcgtgcgtaggtacacccgcacacgctgcaagtctctggaaagcttttcagttgacgaaggacacccttagcacacatcgcatatagtcaagaacatctctgatctcactacatcatatgcatgcattaatatacatattcgaatacgtgtacttacatgtacaagcacatctacaaaaaggatacatacgtatatatgtgtagaaggtagagagcgaagaaacgtcgtggtattttcttgtgtgactctgtcgctttttaaagctcagcacgaagaaaacgtgacgtgtcatccaatgcagacaaagagaggtctccggtgcaaatggaacattggactccacgatgcgcaaatacctcgttactccagaagggaatgcacaaaagagaaacgactgagagggtgggatagaggacgaggtccgtgaacccgttagtgcggggttcgcaagtgcggcatctcttttcttgtccggagagagaagtgccgttctgcttccaactgctttcactagcagccgttttgcccacctttatctccccccctcctcccccgcatttctctctatcggtaggtgtctgcccgaaaatctcccgagtcttctttctttttcggtttccgccgtggagaaagggggagagtgaagagttcgtctcgaaagtagaagagctctcgggtgtatgtacaccgcagcccgcctgggcagtttcgcggggacggcgtccgcaaggagaaaagttctagcaaagagcgagggcggcgcttgtgcccggctccgcctctcttctcccgaaatagaaaggttttatgcttttgcaaggtgtcgtttccttcctctcccggaaagacttctttgttcctctttctgctgctttagttcgcagaaaaggcgattttttctcgtccacccgggcctcgttgcgctggtctccgagttttgccaagcgtgttgacacccgctcttctcacgtctcaagcgagactgcttttcacgcttcttctcaaaagcacttcgacctgcttcacaaaagtgtctctatgcccgtgtctgcgttcttctacattcctcccttccccctcctttcttcgttttcttcttgtcttccgttcctcctcctgtcttcctccttttttccccttgtcttcctctttccttcgtcctttcttcctgtctccacttctcctgactctccctcgtcgcgctgttctcctctccttccccgccgtcgccgtcaacgcgtttgactctaacggggtgtacagacacccgactgccctactcaggcggaaaagtctggagcagaagatagcccctgcgcgcgctcttggacacgctgcgttcctcttccgctgcactttcgcactttctctcctctttggcgccgtctttgtctcgtcagaaacgaaaaggagaaaactcgaatgtcttcggaagcgcaaaaaccgtcttaacgcaccttcaggaaaaagctaggcgtatacagacacaaagagggagagtgctttccacatctttatgtgttgtacggtgacaacgaacctccaggaggttgtttaggcagaagaccagtgtgtcactgtgacttcatcctcttcttcgatcttcaataa

SEQ ID NO: 2002 - DNA, 4914 bp, Toxoplasma gondii
  source 1..4914: mol_type = genomic DNA
caagcggactgaatcaagcgactgcttgtcatcgatccaggcaaaacagcaaggtctttcgtacaaaatcgttccttggcagagcaactatcaccgatactcagcaaccaaaacatttaatagccgtagccgccgggagcagggttcccgtagccgttgttgtacccagtgttgtagccgcccgcgttggggcccccatatctcggaccctggttgccgtctccgcggtagccaccacgaccagcgtccattcggggtcgaggctcaccctgcacaacaacaaaaaaagttgaaccctgaattgcactgccacaggaaacataatccgtgtacattctgtgcctccttggttccccagttgagcagaactacaccatctgcatgtcattgaaaaacacagtaacgataaaaggaattggtagacgctgtctctacagatgatcctccgcgatccagaactgcgtaactcaaatcgaatacgcacacatgagaataacccctacacggagattaaaactccatagttgatgaaaatgaggagattattcccctacgttacggagccggtaaaagcttggaacgcaaccgccgatgcgaacccacggccgcaagaaactgaaccacatggcgagacacgcgaggtcggattcaaggaactcacctgcacgaagtcgccgttggggccagtcacgctgacggcctttctctttccatcgtggccaacttgtacgcggaactcgacgctctcaccctcagcgaggtttctgaaaccttgagccttgatctcagtctggtgcacgaaaagatcagtgccgtcctcggcagtgatgaacccgaagccctgcacagagcgcaagagatttaaagagctccggataaagagttcgagagatacaggtcgagaatgcaaacccgttccttgcacctccccgagaagcacccgcggcggactgcgcagggtgaaaaaagccgtgacatcttaggattccagggaaactgctgcgtccgttcgtcagatttaccttcttcgagtcgaaccatttgcagtggcctctctgaatttggtcctccattttgcgtcgaggtcggaagagttgtgaaaggtagtaagggaaactgaaaacgcacagcgcaaagaggggcaaaaggtgagtccgtccccacagagggcatcgcactaacaccaaactatggcaagattaccgcagaaaacggatgcactgtcgtgcacaacaacgaaggtacgggcgggaaactcgactggacggaagacgccaagctctcaaaacgatcacggaaaaaagcagccgcaattccccaggtttgaaaaccggtggacgctgcctccgcttccactccagacagttgcacgttcgttgctcccctaagttgtttatttttttcctcagttctaaatggtattcaaactacgcctagctcctcaccttaagaagatgcgaaaatacacgatctgaaggagcaaagaagtgggtcaagcctgtcgacgctgcagacgttctacgctaactctagcacaacttcgctttcgtcattagcgggtacccactcgacagcactcgacggcagcagtgagagggtgccgaccacccggccagtaactttaccaaccgggtctgtgggttccacgcaacctgggttttcgggtttgtggaggtgggagcgctgcaggctgcagcgagtgtctcggacgatgtgcggggaggttgggtcgacttactcctagctcgagagtgcagcgagaaccacccccatccaaaaaccttactcgaagaaacacccattacggtaggtgggaacggggtggtggatccgggtgctaggatgccacatctaaacaaggtgtcaactgcaagactccccttttaaattgcaactccacgtttgccctgcgcgatttgtccgtggtgtggctgcagttcgtggcaacgtgaactctccttcgatccctcatccggcctccctcgtctagtgcctgcaaaacacttcgctatgcaacagagtgccgctttaaggttcagcgcacagataaaggggctttccctggagctattttattgctgggcattacgcgggtttgagagtgaccgatattccaaaccctgaccgctagaaattgtagcagatatacctattttccacgagctgctattgcatctttcagaagtgccacagtcctggagagggaagcggatgcgtcccaggggcagcgatcacctcgttgggaggccgttgcaatgtatttacggtagcagtagtgcaataatatcttatgcaaacttttgttcctattagggaaacgagcgccatgtcggaaagctgtgctccgccagaatctcctgagaatagttcactctttagaaggcggcttcatgtgggacaaaagacagggcaacaagcaatttgttcagccgagcgcggacgcttgctgcgatcatgcagagtaaaccttttttcatggcagctctggtgctgttaactgtaaagcgaggagtgtgtgaccggcaactgccaagaggtgtctacagagcagtccacaaaaacagatattatgtcggtctgctcggcaagaaacattttcgacatacgcagttgaagtgactaaggcgcctgaatgttgtgttacgtgttcccccagggtgtccacaggcggcgtcaggattgccatccgtcaccagcaccgctcctttaaaagtaacagggatgttaccacatttgggttctgtgtctatgcggttttcagtagaatggacactggacagataaaacgagagcagcgtctgagaacacgcagcgacggctgttgtcaataggctccactgtttatgccagattacctcttagactcacacatgtcttctctgcaacctcccagaggtgggaacaggcaagaactgcaagaaacttcacttgtctaggtgacgaccctcttgaggagggacagactgacagcgcctttgtcggtgatgcactggtggtgaagagagcttctcaacagccatcttaattgcaccttcagaacgttcgtacttgtatgaaaatgaaagacgatgtctagggcaagagaaacggggtcttcaaacagctaccattgctcctgttattgttgccttcttgctgcatgttcgaatgcctaaggtgtcgccgagcagcaaccgtggatgaccccattcgcactagtctgtttccgaagatgcgcggtactcctattgaaccgcatcttaaatacctgctggctgcatttgatgctcgaatatttgcactaataagtaaagcaattaatgctcgtcagcgtgctaccgcccattgtcccgttttgctgatggtaggactttttgatcaagtggtaaaacatacaacctgagactacgacgatataaaccttggcgatagcggtcaagttaaccagaacgctgctgtgtcaatcgtgtcatcatgtggtacctcaacggttgggggctgccgcaatgtcctactggtggactcccacggcggggatcagctggattacaccttactgtcacaggctgacagcggagagatttcttcacattcgcatccgcgatactcgaccatgagttgctccgagtgaacacaatgcctcccctcacttcattttcccccaggggagccgcttttgcactaatcccattgttggttcgtgtagcgtttcccttttttctgtaaaacgcattccagcctttagcgaaccaagctgccatacatatcccttaagtagcactgaagctgcacataactcgcatttcattgctataaacagtgacacttaagtgagctggccaatattacacaatgtctttacaaaacaagcctgagtttctttctgaatgccactaccaccatcctatgcgaccaattgacgtttgttgacatcagttccgtactaacgacaagcataacaggatgcgagaaaactgtgtcacgatggcacacagctgcgttgccagcacgtggtggctgtcaagaagcggagctttcaacggcaaaatattctgctgttttttgcgaaggctcgagctctagctgtggtacttgaacacacgtgaatcaacagcgaaaaaatccatcacatgtatttccgactccaagatagtttcttctgcagtggatctctgggatcctgtgcagttccgctgtttgccacacttgtaactgaaaagaatatcactacgcacggttcttcccaagggcgtgaccgcgtgcgaatggctctgattcagcgctatggacgaccgtcttgatccgctgctccaaaatgtgatgtgtttccgacaccgtttcctcatcaatgacacaaagttgccttttgagcaaccattactgaggataaagatcgtgttaatgaaaaacagtcgctggcaatgagaacgagtcaaatagttcgcgcgacttgtggcttcgatgtatacgagatttacgcgtgcatgcgcgctagcgcgtgactcgtgtgtaccggtgtttttttttgtggtttgttccatccgagacgtacaacttaacagtccattttacgtttgattttgacttctgtctatcgtatcatgtgtattgtctccaggagaagtcttgactacactgaggtaccagacttctataccgccttctcttggaaaagcacaccacaacggatgtgctggctcccttgttgcttcaccaggagactataacctgtaacctttgcacgtgatgatgaacaactggaacgcgtgtgtgccgtgccctgtttcttcgggcccggaggtttgactgtataaaccagatacaggggagacgagctgttgtaccgatttagacaacgaccttcttcgtcggtctccgcagaccagacacatcttcttctccaacgctttgacttgctacacaaagccaccacta

SEQ ID NO: 2003 - DNA, 2533 bp, Toxoplasma gondii
  source 1..2533: mol_type = genomic DNA
aagaaaagtccaagagagagagacgggcaaaaagatggcgcaaaagaaaaaacggggaggcgcggagcagaacacggacgcgggcagacgacaagggaggcgagcgacaggtgaaaaccactggggtaccggcgaaggacggagcaaaaaaaaaagaaaaaaagagggattgaagaggacagcagcagaccggaaaaggaaacagaaggcagcagagaggaaaacgctgagagagaaggggaagagtggagaacagagtgattgagagagaagaaaagagttgtcagagtcaaggaaaaaacgaacgggagaaaacgaagatcaggttgaaaagaaggaggagaaggcggtcgagcgacacagaaaagccggtgagaaaaacgagagacaccacggagatgcaaaaagttcgagtccgaaaacaaaggacctcaaggccgcgttccaatgagggaagcggcgaggaaggaagaacacagttttagacagaaagaaagggccggccgagtcgcttgaggagagctcgtggagcgcacatgcagagcgcgcctcgcgccgcaaggctttccagctttctcttcctccctcatcctcccggagtccacatgcgtccagatgcaactgctagaagtccaaggattcctcgcggcctcgaccgaggcgacagcttcgcagagaggacggcgcacaggaagaacaacggacgaagacagggtgggaagcagatagcagcgcggaggaagcagagaaggaatgcatagaggaaaagagaaggataagaacgtcaggaaaaaacagaaagaaaagatcaagcgacaagagcacacacagaagagaacgaaagaagggaggagaagagagaagaagcgacgagaagacgagcgacgaactgcgagcagaaagagagagagaagacaggcagagaaggcagccagagaaagaggaaaagagatagaagagaacaagttgagaaagaggagccgagagagctgcagagaatcgggcaaaagcagacgcaagacaacacagggagagagctccgcgtcctcagagacgagaagaagagaagcagacgcgcggaaggagactgaaaaggcttcgcagcgactgcaagagagacagaagcagcggtgaagaaagaacgcgagaaacctttgctcaatctcctgaagaaagactcgcgcgtttcctctgtcgctgcgttgagaacggtcgccagtttctcgcgcgctaccttcttccacgttgtgctaatatcgagcgatgcgggtgcggcttcgacgttcgccatgaaaacagcgaagcgcttcacccgttttccatttttcctgacgaaaatgcccccttttctcgccgcagcccttgtgtctttctgcggataaaaagccgcaaacccactccgcgtaaaagacagagaactcagcctcgtccgctggcgctgagagacctccgtggaacaccgttgtgcgcggccgcaactgtttctctgaggcctctgaagcctgcgacactacgcgagcgcgttctctctctctgtggttcttttcctctttgtgtagagagcgtggagatgctctctgaggcgaaagagccgcagaaaagctccgggaaacgccctttcgtcgcttgtctcgccgacagctgtctccccagctccggacatgaaaaacagcgtggcgagcacgggagaggacgagagtctttctgtcggccgtcaggtgaaagtcgaggaggcctctcatacacgcagtgtgtgcatgcagagagacagaaagcgttgtgtgacggtcgcgaacacaggagcgaagagtccgagaaactctctttgtcgagaaaactcaagacgcagacggtgactgtgcgtggaaaatcgcgcctcgacgagtgccgttctgccgttcctcggtgcgcgcggaggtaaagagaaatagaggcaggaaatcgctcttcactcgaaggcctatcgtctccagtgcaacctgtgaacgattttctggtgcttcttcgttcgtcacttttggccgtcacgaatacagcagaaacctgcgaattcgttttttcgtcaaatcccttccctcctgtcagcatcaaagaaatgcaaggcaaacagcattcgcgacgtccctctgcctccattatcacaggacgaacatctctttatttcctctacacgttcttttctcaacgtttcgtcgtcctgctctcctgacaggtcgtccttctcttatgcttgccttcgtgccagttcatccggtttctcattccctccttcctgtctcctttcgcgtcttcgtctcctcgtcgttctgacgctgtctcttctcccctgtctctcgtcgttgtcctcattccaggttccccctgtttctcccctcgcgtcgtgctctccttccatcgccgctactctcccttctcctgtccgttctcccctctcgacgcgggtcccctgtcttctcgcgttcctccactctccgttctcctctctgttcgccgtctttttctcttttcgcgactctctcctccttcttcgcca

SEQ ID NO: 2004 - DNA, 1622 bp, Toxoplasma gondii
  source 1..1622: mol_type = genomic DNA
ccacagtcttcgaattaacgcttgtgagtttctcgcttaacttcctttgcacagagcctctataccgaagcaatggcttgtcaggtagatgctgtattgaagatggaactacctgagtccctgagggtctccggtgagcaattggggagggcggagattttgagacgattgattggcaccgaaaacgaatggctctgcgagaatcccgctcgtcttctcgggcaagcatacctgcaaaaagttctggaagaagacagatgactatgtttaatctcgtagaaaacacgctgaggaagattcacgaggttgtggaaacctagtagtatacatatgaaattctgatgtgacacggtattcctgaggaagcaactcgatttccgctgttgaattggctttgttgtctatctttccatcacttgtattacaacgcccctctcgaccgaacgacgcgggtgcctcacttctgtgaattaagaggacgaggtcctcaccagctgaaataagcgatgacacatcgccgttccatctccctgtggggacatactcttgttcgtgatcacctttttactacacaaagggagttggaccatccagatactgcaaaaactgtggtagccactgctacctttctcccactcagtggctagaacgaagaaagtgcgctacccgtcactgaaccaaagcagatgaataggggagttcggaggtgttaaacctcgtttcagtcaagttagctctaataaatccccattttctcaactccgtgcgcttctagcaatggaaacagggaataacaggttggctttgtgcgacatagtagggaccacatcgcgtgtttcatagttgcctagcgctccttaccgcttcgactgtaacaaacagccccagcggaaggctaatgaattatcgctgccgtcattcgcttgtataggctttgcccgagaacgctttgccccgtcgttgtgtcaccagtgcatactggctgtgttctaaagtcgtttcaggtcacgtttctactcttaagtaaaatagtagagcgtgattctctctcttggatggcatgaatccgtgcatgtcacagagatgcgaaaaccgcagaggcggagggtcggtagtgacactgcagtagggaagagcctgcatacatgcagaactacaagcagtgtcagcaaaggacatgcgcaaattgatggcccaaaacggacctcctgagttcagtgcttgcttgcacgccccttactgacgtgcgttcttttctgcagaccggatcagcggtagtttgatacgaagccacggaacacagcacactgcggaaagcacttgaactactacactcccgaagttctggagtagttatttttttattaccgttacggagcttcgtatatttaaacttgccatttgtaagtgtaaaaatttgaatgattaggctgcgggagtgtcagaaaacgacattccatcaagtatcacgggcattagatgcacactgccatttgaactaacagttgccagcttgttgcatgcgcccgcaccggcttccgcgggacacattgctgcacttgagcgaggccgcacacgtttctttcatttgcattttctccgtattctcctataactaggaa

SEQ ID NO: 2005 - DNA, 2176 bp, Toxoplasma gondii
  source 1..2176: mol_type = genomic DNA
aaagaaccagtctccgtaatactttgagaatggtctcggagttgcttagagattcaactcgagatagggatgaggaccacaggtgcacagacaaaggagagcaaaagaagtggagacagtcagtttgccgtgaagataagtggaggaagaaagaggggaaggcgtacgtgctgaaatcaaggttttcttggtctgcataaatcttgacagaggccggggaacgcccattgtcgccgccaatgaggtgaagactggatatctggtacacgggaaaaaacaaatatagcaaagaaacactgccagttctcattcggttcttgcgtatgcgcgtgactctggtgaatgccgaaatcggtcgcccagctagttggaaaacacttgtgtctcagtgagctaggaatggacatgcataataaaatggaagtccgcttttgagacaaaagacatctggtgtagaactgcggaccctgcgcgcgtgtcaggctcggagtccactagcgacagagcgaacaaccgagagacaagactcaccttgcaaggagatttaaaagggatgtgaatcatctgcaaatgcaggacaagcgtaaaaaacgctgtgaatggaatgcacagcccagctctgtgactccatttgtgtctaagaaagaaaaggtgcgcagagggatcggacgagataattcgttcgattcactcttcgttgtgatccaaaatacagagccagtccataccagctcagggtcgtcctcttcactgcggcaaaatttcgtctcatccagacggtcttcatacgacttgaaaattgttctcgccgagttctgaacctgcaaaagtcacacgcgatgggcacagcatcgagcagttcggtcgctggcgaacatagaaagaggcgaacggagtcacagaaagttgcgcggcacattctggtgtcgcggcgacgaaacgattgcttgttgtgcagtacgggaatgaactgttaagatttttcatcgtggcgcggcgactcgtgtaggacctaagcatagagtacctgctcgttaagtcctcgaataccctcgaggttgatatacggcaggaggaattgtgctcccttcaggtcgatctcgtgcacacagccacattgtggcccatgaacacctggcattttcagtgactggggcagaaaggagtattgtttcgatggccagcccgctgtttagccacaaacacgccaatgtgccgcgaattcggcgacgggctatgctttgaagcaggcggttggtgacagattggtcttgtcgtgcagtcgatactgtagaaaatgaattcctcgattccacagacagaaccttttcgttagataccagagcctttgttaacggacaaataaaacgaaacaaagtaaacgcttcgcctctcagtcactttgcaacgaaccgtccgtgtgcatgcgcggcagtatctatgcattcagaacatcgcagctgccacgcgaagtcgaattcttcggtctagaccatccacgttttggtagtcccgctagcaccagtctgccatcttcgcactttctgtatgtgccacctcacgcacctaataaccatttctcattctgggctcattgatccatttgctgaggaaagtctggcacagtccgcaaaacggctgcactccgagcttcaagttgttaccgaagccgtccgccagcgggagccggtccgccacatgtagccgattgtccaaacgagcagcagctgccaacgcacgagttacttgcaccactaccccgctgagccaagcgaactggaaacagaacccaaacttcgaagaaattgcagaagatcactacagcaagcggcaacaaccgcaaaaggatcaaactgacagcggagctgcgctcgactttgacgtcgagcacgacccttccgagccctttagaatgataacacaatagaacttggatccggtaaacaaagaccttcaagatctgaaccagtattccaactagttgacgagtcatgaactgttgacgaattaacattcgagtgtatgtacaggtcaccagtttgcttggtcatgcaacgtaagacggtagtatgggttctcattttccgcgaggcaggcactaacaagactcgtgatatggtggtcagtcttttctagggctgacaaaactttatagaatcaagcactgtggtgaaga

SEQ ID NO: 2006 - DNA, 3241 bp, Toxoplasma gondii
  source 1..3241: mol_type = genomic DNA
ggggaagaagtgaagacaatgagaagacaaaggcaagaagccagaggaaaaggggctgtagaagactcttgaaagcacctgttgatacagcggagaaaacggttcgaatgatgcgtttcagtagcgttcactgccgcactgtcctcgtggaagttctcctggggcccactgtgccaccggtgagatcacagggaggcctgggccttctcatcgaatgggaccgaccttcatgcctgttagatcactactgttcagttggcgtatagacaaggcactccaggtagtcacaactcgaactggaggcacaaaaaagcgcgtccagagcgtagacgatagagctatttgggcgggatggaacacggggagaagtatacacgcttccgagaccggcgaggtgtttttcgacttagagaaagggaacgaagcgtcctcagaacttcgtgtgaagtaattcagaactctcaatagaaggtaacaacggttcgttggacatagagtgccaacggtttacaaacgttccgctttgcctcgcttcattgccgacggctcgacccctgcggcaacatctgccgggagtgcctcccggtttgttccgcaaaggaacgagaaagtctgcatagaagaaaaaagtgtgggtacttcatcggcgttggtgttctccgatttcttgtttgctcttcactcgagatcatagggccggttccacgcgggcgcaagcgggctgccttctggggtccgcgggtggctcccgggcgccttcgtttctgggacggtgagacggaaacaaagaatgaactggaacaggaaatgagagaatattccacggaaagaggcgcaatggagggaaaaaggcgatcgccacagcagctgtgcaccccccgtacgtgaaattgcctggtggttgaacctcgaggtcacgcattagctggaaaacacatggaaagcagcaaccagggacacgaggaaagcaaaagtggactagaagaaaggagaaacagcttttaaaacagatgctcgcggtgttccctggctctcatctcgtcgatgcatgcaaaaacgaacgccgtagccggacccgctgtgcgagagcacgtctccccgatatgcttcaggagagcgggtggttcggaaaagggagagaaaaaaagaggaaaaagaagagaaaaatgcacactcccaggagacagaagatatgctgaatgctttcagaggtagtcctgccggtacagttcaagcacggaagttccgggacttggcccagggaagaagtgacagaaggcgaagaagcgagacccgagagctggacagactgcatgcagcgaagcacagagacgagaggaaacgggaggtaaaatgcaggaaaccctgccttttcgccaaggctcggggcagcttttccacgaaaacagaagcgtaaggcacagagagagacacgttgaattttcggggctggcactgtccgtactgtccctccccgtgcctcgaatataagatcgtcgcacaccctcgcagtcgggcaaaactacttccaccacagcggcttaagctttcaagtgttccagagagggttaaacgtgtttagctccttatgttgccaccgggtcgggtgctggagtgctcgtatcgaagtgaaaaagatctcttccacgactactacctgcgccaaagggaaaaagcggatcagccgcactcttgagcccatcagggcctttgttgtgctacagcgatggtttcacattgatattagctatggattcatcagcatggatcaggaatggtacggtcatttgtgggagaaagtggacaggctctttgacaaggacgaggaacaggaacctgtgatagggtggtctcccagcgagcgtgcagcagcgcacaccatcacagataaatggtaaataagaattgtttggaaacatgcttctgtttagatgtcggctccctactctcgggcaacgtgccaaagatcgaaactttctggtgcgacgcgtatcttcgaataccagaatgaacaagcgttcctgtctgggaccctctagcagccgaagcgtaaaaactggtgatctttaggaagcctgagccacggaagcaaacacagatggtgacggaacgtaactcacaccaaggcgaaggtttcttttcagtcattacggaaaaacgaggatacccgttttcctggtgcgtgcttctatgcgaaccgtgaatttcaattgtcaccacgacgtatgagccgtaacgctcggtcttacaagaccgcaacgcattacgcgtgactatcggggcgtatcatatgatatgttgtttttattcagcactcgagttgcaggtagacgcacgtgtctgtttctgacgaactgactcatgctggcattttgttcgagagggcgtggtgtcttgtagccagggattcagtgcagccgcctcgaaataatgcacattctgcacaacttcctggatccttcgctaatcgtcagcaggcttcggggctccctgtcgagctcgcagctgaaacctgtctagcagaggctctgcgtcataagcgtcttgtaaaagacaatgccacgcaagcgtgaaatgctcacggtcctggaggtgtcgtccctcgaagttgggaaacacaaacaccacggagctatgccggtaccagggaacacaaaacagccactgtcaggtcgtctagccgtggtgtcgtcgttccctgctaggagctgccagagtcctgtcgtgctgacttcatccccgctccagacatccatttttagttatgtgatatttctgagtattcctatgatttgcaacttcgcctctgagatcgcttacgttcagtcaaataaatgttttcttttttttccacggcctaattcaaggacgtcgaatgagtgttgtggtattgaaaccgcttgggagacacggtcatacgtagcagatgcgtttgcgcagctccaagtatgttcgttcattgaaaagcaggaatgctgcgacatgcttctcttcgcattactgcctgttctacaccgggggatcgtttgtcagttccttcctcaatgtctcggtccttgtctctgccctgtcccaggggggttcttgcgtggagctgacggctagttgagagcccttattcaggggctgcgcagagtgctagaattgaccttctacttgtggctgtcgtcgtttcaggatgatgtagaagtcgcgccgaacttcgagaaacaagtcgagagtcacagtgaatctcgaagga

SEQ ID NO: 2007 - DNA, 3878 bp, Toxoplasma gondii
  source 1..3878: mol_type = genomic DNA
cttgtgcaggtctctggtcctgtctctgcgtatctgtttctctgtttgggaccgtttcctgtgtttacctttttctctgcgagaccgtttcgttaaagaggcagctgtagagacagctcaagtgagtggcgcttgtgaagggacttcccgagaactgcgtcctttgtgagtcgactttcgcagtcgacgaacaggcagaagagcctttctttgtcgcttgcaccagcggctagagaaagtctgagtctcgttttcttcccccttggagttgtctctctctctatcacgttcactgggtcctttctgttctctcttcgtgctctgggcgacagtcagtcccaacgaaaaaagctgtcagcggggatgaaagcgctctcctgttgcctgtccagcgcgcctttcgctcgctagtgcctccacggaggaccctctgtctctctcgcctcccttctcttacgcgacgagggagaagctgcgttttcctggatgcggccgagcgttttcgtgtcttcacaggtctgtagaggcgccaagggatacttccctccagggtggacaaaaggcgcatggaaaaccttcgtggatgccgccgcctcgcagccgccgccggggtcgccgagagccgcggcggccgcgagagccgtcgagcgcctggcgaacgaaggcgcgaagaaggctgcagaaaacaggcggaagatcgaagaaagatacgcggaaataaggtgagcagaaggaaggagagggcagaagagaggacagcgagcggagagggacgcggcaagaagggatgaagaggaaggacggggaagagagacgaagacaagggagtctccttttccagattcgacgactctgcggctacgtggggtgttcgacgacagtcgatgtgcaggatggcctgtcggtgctgagttttttgaattctttgcctggaagctcatggcccgactcgcggcttcgtgaaggaccgcagacagtctcggttcggtgcctgggcaagtgcgagaggaaaaaagcaccgggtacttcatgcggaagacgacgcatgcgattagcgttggagacaggaaagaaaacgttcaggctttcagggaggaggggggcgagtgccggcgtttgagcgtgagtgaggagtgtcgtttctgtttctctccaggcgacaatccttagaggcttactcgcggtacaatgcactggaagcagtcgaggagaagaagtacctgcctggattccataagatgaaaaagagctactcagacaagcatctgcagtgccatggcgaggagttgagcagcgtcattgcagagcacttcacagagaaagacctgaaattcgttctgccctggaagtagcagagaagccagagggcgacgagaactcccgtgaaaagaaacgagacaccacccccccagagcagtgagagggagagaaggcaaagcgtgcgagagacagaaagagaaagagagagagagaaagagaagacgaaaaagagaacaacggaggagcgagaagagaagaatacgatggaacacagtaaaagagaaggagagagaagatgagaagaaacaaaacgtacgagaggagggaagagtgcagcgaaccgtgcaagcgcctcgagagggaacacagcaaatgccgagatccaaacatcctcaactcccaaagaaagtcgaaccgagcttctctcagcgagagagaacgcgagcttcacatttgcgcattccctgtctgaggacgcctacacgagctccgacgatagcacgcttgaaatgtacatcagcaactataaatagccatagatagccactaaatacatcttgaaacattcaatgaaaagtcaaggcaaaaacgcagccggatttccctgcgttctcacttcattaccagtggtgaacgcgaagatgtaaagcgtatgccccttttctctatcaaaatcgcaatggtttttctgatctgtcaactcgctcgtcaaaaagacgcagctctttttctgagtccctccgagacaccaaagtggaaatgtgcggcgctacagtgtgtggcgtagcggtgaacagaggggagactctcgctgttcaagaagcctctggtgtattaacttccttgcttcttgtcctttgagatatcataccactggcgagcagggaaccgtgtttcagggaacggggattctttttgtctcctgtcttcctgtccttccttttccactcattgctgtgttctttggaagagaaaaaaactcgtaccggcgtctccctcttgctgtttctctgggaggacagaggagcatttctctgcattcgtcaaagcgtgagcgttggaggttttcggccctcctttgtaatgtctctctctctctctgttcctgcatgtcggcctcgcgttcttctcttcctcgcttcctgtgtctttctttccgatttcgtttttttatttcggtctctctctctctgtgcctctctctttttctctgtgtcttcccctgtctcctgggttcgagtctaaacgtccctcgctgtctgaagctgcaggtgttcgccttcctctgttgcctcttctccgttctcttggttctgtcgcttcttctttcctgtctcggctgttccttccagcctcaatcaacagaatcgaaagagccgagagaggcgaggcgagaagaaagaaacgtagccgcgacgcgtaccgacgtccactcttccctgaaaatatttctgtctttcgcacccacagagacacacctcttctcccgcgaaaaacgaaacagaacttctcgtccctctcctcagcttactcttcaacatgcactcgatttctcctctcgccgtgtcttccctctcggtataacaacctccccagcggttgagtcggaggacttttcagtttagcctcgaaggaagaagcaccgggagaagcagcgacgccccgccacacaccgagagacgtaggaaatatagaagttgagaaagggaggcgtggaagaagtgaagagaagactcttgagaaagacttctttccactggaaccgagcgcgtcactgtgcacttgcttctacgcgcgcaacgagcagcggcccagtggcgaagagagcctctcttgtgcctggttttgagctcgtctgcaaaagaaaagggggcatagtgagacatttttcagaaaagtgcgttctgtcttgttttttgccggtgttcttgcctttttaccgcgtaaaacctccggagacttctctctgcgaaaacggcgccaagcgagatctcagaattgctttccacgtatacgctcgtctgcacagctcgcgccgcgactctcgtcggtgtctggaggcggtcgcgcgaaaactcccgctgctttcgcccacgattctcgagagagcagatcgagcggagaaaagaatgcgaggtgtgtggtaaagtttctcgcgagtccagatttcctcgagttcgccgccaaagccatccccttctcctcgaggaagacgagatctccacgtcgcgagggggttcatgtcgatatcagtggcgaagagtcttaggagtctccggaactaggtctgccttttcctcgtcttttctccactcgagagacacagcactccagagagcgttcatgaagtctgcgtgctccgcggtttctcgagcggtttctgcagctcgatcttcaccagtgcaactctcccttttttccagctgtcgtcgcgccaaggcaggtcactggggcgccgacgcgtttcgagcaagacattctgcaggcgcctgcgagtgtcgttcttttcctcgcgggcttacaggcgctcggtctttccagttgacaggcttggcgagaaatccgctttttcactttccaattcgcgtcctcgtctctctaactcctcctccagagaa

SEQ ID NO: 2008 - DNA, 2547 bp, Toxoplasma gondii
  source 1..2547: mol_type = genomic DNA
cttcttgactttgtcgtccacgactttctcctgttcccgcaagagcgcttctcggcggctcaagagccccaacgccccgcactcgctgctctctctacacttccccgtctgcgcctcttggcttctcccggctgaaggaggtgacgcagaagcagaagagagcgctcgcgtggaagagcaagacgcatggcctagacggaaggtcgcgaggtagtctccgcccaaatgcagaagcggcggggcggccgacggcaggaggcagcctggaagcagagcctcggtcgtgagagggatgaaaatgcggggacagggagacgcagagacggcagcggctgctgagtcaatgggagaacagggcgaagaacatgacggcggagaggagggtggagcacccggggcgacatcgcgaggtccaacgtggaagcacggagaaaggtagtgagataggagagacgaggcggcctgaacggggagaaaaaggccattcgaaaaacagacacaaagatgttgtgctgtccaccggaaataacgcgggcaccggggcacctagagattcagagcttcaagagatcgtaccgagttctgcaaagctaaaaatggttccgcttgttcttcgtattcgccaacacagaggcgtagcagccacacagttctgtacacggtctcgagtccacgcgcggaccctaggagaatgctgccttcctcagcccagtcgtatccccttcttcgcttcgcctctttcttgtctgtcctttaagacagtgcagttggcatgtctacctccagggagagttaaacaaacagacgatactacacgggatgttcgcccaacctcgttttttcctccgcctgtatcgcgaccatagtctcgaccatctcctcttctccgctccttccacagctcctctacgtcgtcgtgttccctcgtttttcttttcttcctccttttgttcgctctttcttctctgcgcctacctcgtgctggtcaagttgcgtcttcagctcctcagcagcggcttcatgctgctgcagcgcgcgcatgaggtgtctcaccgcgccctcgacagaaggagagggagaagaccggttgagagccattccgatgcgacgaacaaacgctctggcgactctgtgctgcggccaaaaaaggagagagaacggctgttccccgtgagtcttgagcgcgaacgtgacaggacggtcttggaaaggaagaacgtgaaagcgggggtaagcgatagacgagaagccgagaacgccctaggagaaagaaacgagagggagagatgagtggcatcgaggagaaggaggcgagtggaaagcaggaaacgcaggggcccgccgaggggagagtccggtgcatgcagaaactttcgaaattccacttcttggaagagggaacgaaggcgaaagagaggaacaaagatgcaggccacagacattgaaggggcaccaaggaagacaacacttcgtcgaaaacgaagacttctcctgaagagattgttctgttttctctgttatcttttgatgttgatcgcgtcaactcatgaagtcagacgctgtctgcctggcatctgtctggggaaaggactgggaaaattgtttcaaacgagctctggagacaccccgagagacattggcatccgttcattgaactacagagaaaagaaaaccgaagcggccatttttgccgctgaaagaaaggtcgattcgccgatcgagaggcctccacatgcttcagtcacggcgtctctctcggaatgcgatttgcgcacgcgctggacggcagctcgttgcatgcagatttggcaaagaaagttccacatagagacctgagaagaagtttctgcccctcttcatttttgtctttcctttcctgctggtttgttgtcttttcaaggagcgagtgtgggagcctcagcgtgtgcaatttcttgcttcgccttgcgttcaacgtcccattgtgaggggccgcctagaacgagagcggtctcggattcgagcgtcggggcaacgcgaggcgaaagggattaaaactcggcaaaatcacctgggattgggtggaaatggccttgttgaacgcttgcaagaaggaaattcttcgagcgaaagctctaaaacctagggcgagtcgcgggtgccattacggtattgcgcaggcttcaaaggtttttcagttctgggcctcgagtgacctctgcatgggaggacatgtcgaggccggggacgccttcggattttttctagccagaacgacgaagaagtcgagagcggttttccccgtcagtttttcaaggtgcgtgtaccattcggctctcccccagtgctgcttgtttttgagtccagaggtcgcggtaaaaacctcctgcaagatccaagatttcttgaagctgtgtcccctcttcctccattgacttttatcttttgtatctcgtgaacgacttccttcgcaaaacagagacgctgtggagttcggtggaaagagcaatgtgtgtctgtctttcttccgagcttctctaagcaccacacgcggtgtcctcggcaaaa

SEQ ID NO: 2009 - DNA, 1617 bp, Toxoplasma gondii
  source 1..1617: mol_type = genomic DNA
aagcgagacaggcaacgcagtgagcaagcaataaaatgcagataggggaagaacaagcaggactggacggaaggcaaggcaacgagaaaagcaagcgaagagacgggaggacgtagagcaggaatcacggcgggaacgaggttcagtggctcggctgcgacctggagtcttctgttcgtcgtttcctggtatcctattgtgtggattatttgaggaaatctcggcggaaagactacaaagaagaaagaatgcctttaaatcccgggggggaaagggtcatcgtatccggggtctgtcgaccacgtcgatgcaagcagccgagagattccggttggggacggtggagtggacgcaaactgcacgagacaaattttagtggtcccggtatgaaggacttctggcttgctcgcgagctccaaccaatcattgatatatttgatgtaccgcacagcgactaacggtgtaaaactgtgtagcagaacggggaagagagacacgcgccgctgttgctctagattcgaaggaaggaaggtccccccgtctttcaaaaggatcgagaggcctgcgaatgaggagggacggcagagcttaatgtagtgcctggaaaccggtatcgaggtcaagggagctaggacagtcttgaattgtgccaacacggaaacggacacacccatatcagacacggtgtagcagcacgcaccaagcggtggcctgtagcgcggtttagtcaacaaaggaaacagagacttcaaacgattgcgcttgaaacaatgtgagcaaaacgccttcgcccgttccggacggcactgtcacaccgtggagctctccgccgccgaggcggaggcaaaccgctgacttggtagctttacaagtctggcgcgaatgcctttctcgccacgacgtctgcttgttccgcgatatacccgtcagggaaaccgtcattgtacccggaagggaaaaatccagatgtctcaaaagtgacgcgcgccagccgcgaaggagcgacaactgcgtgggtgccactgctgcttgaggtgtacatccactgtccggtgtcaagcacagctgcacgtggccatcctgtccactacatcaaaatcttgactctctcaaagtttgacgaaaaagcttgctcacacggaagagctgattgctcgtgtgcaagcgcggcctcacgcctgtgcttgcgatttccgcttagtagcgcggtgagaaagtttcaagcgctgtgaagatggacagaaaggggggcgcgggagagtgtcttcattgcatgcacagcgcgaggcaacccaaccaaaaacgagttgcacccttattttgcgcaggcacgggtcatcccagttacccggcacggtccctgcgccctacgacagggagccgaggcaggctacaccggcgggaagcccagtcggatctccgggagagagtggaacggaggtcccaccacggaataaaaggcgggcgactgcacagctcggccgagttgtcgacccagactgctgcagttttctcaaataagccggctgcggcgtctgtcgtttttttcgccctgcgttggggtcgccaacgaccaggtcgcacgatgaaaccgtgtttaccgtctgccaatttaca

SEQ ID NO: 2010 - DNA, 1942 bp, Toxoplasma gondii
  source 1..1942: mol_type = genomic DNA
caactggttctcatggtggaggcaccgtacacgacgccaacaaagaagcagaagcgagaattcgcagtgaaatccgatgtagtgatggtgggacgagcggaacacttcctgcacagtgtgctttggtccacacatgtgtccaagcacagggagccgaaaaatttgcgtcgctcacttgttgaattttttttttgacccagctagactctgcagtgttccttgcatgattttctggttttgtaaattgccgcagcgaaaaactggaacccacacattttttgggtactttaggtattgccttgattgtttccacctgcgtccaaggaaaattagtgggatctgcgtccacccgtgccaaggagtctacactgcgtgaaagacacacccaatccctgagtagtgaagagcctaacggcactcggccgaatcatcagtgagacatgagtgtaataaagcacagattctcgactcagtgtggacagactgatctggaattgcgctgcatacgaaaggagctcctgagcgctgaccggacaagatgcgtttctgaagttgcgttgctccaccctcgcaatattgtctaggtatctggcttcattgctgaatccgtgactgaggaacctgccacaaacgatctgccgtctaattgttcgcgtgaacactaaacacttcggcggcgtcgagaatcgtggtgttacggagaggttcatgctcgaaaattctgtcagaacggccacgtccgttcatgtcgctaaacagcagccacttgcgtgaccataacagagtagtaagccgtaatggtaccggttccggcatatttcgtgatgtttttccaaaaaacacctaatatcccgcgatatcagtttccgcgaagacacgttttgacgcatcccctttctgtccacgttcaatgattactagataccgtcctgctcccacagtttttgggggcctgcagcactcgacagtctgaaatgttttccgacggtcgaaaacggaatgccctcgtttttcgccagagcctggcgtttagttttctagccatcgtatgaaacgtgatctcctgccgtaagttgacgctgcagtcacaagcttgtgggcttcctggaacgcaccatttccgtcgttcgagtcggtcctcattagagaacggaacttagacaatctttcggctataaatgacatgcaactggcctttttcattcattcagttgcgtcctcaactgtaactgcttcacttcgtatctcattcgtgcaattaccgttgtaaaccagtggatgcatgcgctacctactgccaaacttgagtcccggatattcgatatggctgatagatctgttttctgacggtgcgaaacacttatataacgaaatcaaattcgtactttcatctcgaactcagttttttcttgaaagcgagcaaggcgttcgtgcgagttcaaaactcgagggaaagttgtgtgacagcacaaagaattgtcccgccgcacaacgcatgcagatgccaatgcgttgtggagtagcgtcatttcttcttgttgtgttgcgtatttttctctaaagtgggacgcagtgtacatcagtgactgtcacgagctctatcaagataccagctcagcacttgaaaggcaaagccgttctgggcgttcggctttttgcgtgacggagaaattcaccgtcattgattcaatatcccgttgaacttcatcgtacccgtggcccattgagttttatccattgaagccccgattttagacccggttttgcttgtgggttgagcgaacgtcatcgtccatgcgctgacactgacgcgtaggaccgtgctgcttgttttgctgtaaatcatttaagcagagtttcatccggcatcctcgcctatactagggtgtctatgtttctaattgatatcataatatccgcaggtatttgtgtttgatcaaga

SEQ ID NO: 2011 - DNA, 2749 bp, Toxoplasma gondii
  source 1..2749: mol_type = genomic DNA
gaagatcgcgccgaagtaggcgatcgcccaagcagggctgttgcatcccatgatcgcgacgcgagatcttctgtcgcacccgaggtacaggagacctttcgcaaacatgcaaatgtcgttccagtacccctgccaggtgtacatacaccagccggggaaaggtccctcgacgtacgaggggggagcggaggcgtcgaggctctttcgcggcaatagggaagtcaacatggatccgccgtcgtctttctcgacgtgtaaccggtcggagtttcctggagtctccgaatccgcgcaccgcgggggatgctgcggcgaggccccgccagcctcctgcgaggttttcgaggcgccgtctcgacttccagatgcctcaagcgtctccttcgcggcgcgcgctctctggagagagacagcgtcgcgcgacagaatgcgcggcgaggcgtgaggctgaaaagcgagagctggagagtctggaaaacgcctcacggtgtctgcaaagaagtcgacgaccgtcagcggaggcagcgaggcaggtccggactccgcgacgcgaatcgggagctccttcgtcacatctgtcgtccagaagaggtcctcacccgacttgctcggcttcaactgccgattcaagcgcgcggctgactgcagagaaagcactgtctgtacaccggcacactcctccaagccttctgcgcccacggacaccagccgccccgtcggaggcatgtccgaggggtcaaaaagcaacgccatctcgagaaagcagacggcaaccgcgcgacgaggaaaggcggcggaggggaagagccggatcgaggcaacgagagacgaagaaggccgaaaacgagaagagggagcgtggagaggagggcagagaaggaaagagaaagcaacacaggagtgtagaagaaggaccgcagagagaggcaaaaatgaagcggaagaagaagaaagaagcagaaaggaggagaaagccgagaggggagagcgggacggagtcgcggaacgaacgcgagaagaaaaagaagagcagccggagaccgagcagagcgggagggactcgactgcagcgggaccaagtcataaaaagaagagaagagtagtggaactggcgactctattcttctcgcctggctcgggtgcccgctgggctctgagctggctgcgatgtcaggagagcttgcgcgagctagttctgggggagctgaggagctttccgagcaaagaccccaagtttttaaagaacgcgaacattgtacaaacagcaggagactcgtcgatgcctgagcaactgaaaaatatgtcaaaaacgcaatcttcgttgccccgaggcgccaccaccatggcccagcagccggatggtcttgaatggcgggaaggcaggctgcggcgagcgtttggcttttcagatgcaaagggggcggggagattttgaaagtttttgactcccaccgcctttccttcctttcgctgttccagcaaattcgttttcttcagcggcgactgcgaaaccatcgaaggggagcccggcagcgaagctctccagggaccagtaaaaaacgcgcgcgtactgataggtctcgaatcgaagttcaacaggacacacacgccgacaagcctctggacggattctccaaaaagctttctccttcttctctctctgttctcgcctgctgctccgttttttatcccctttcctctttgccccgtcgccctcctttcttctgttctcgcggcgactctgcctggtgtcttgcgagagaagagagactcaggcgcaacaacctgccagtgggagagagaggacgatggcgatacggttggacgagtcctttttcgctgcatgcacccgagccttgtggcttttctcggggacaagagcgcagaattcttcgcttcgtagcttcgcgccgttttaaaccagttcgttaccgctcgaatgcgtgaggagacttgggggggagagggggactctggagaacaggagtgacggcgacaaaggcgcgtctcccagctcggtgtcttcttctctctcggggcgttgggtgagtcgccagcctccgctttccaagttaaatcttcttctcaccgtcctgcacctcgtcctcttctcttttcttctgctctctgccctccaactcaacggctttctccaccattcttcgagacgctttccgtgggcgcggggacatacggatacaacattcttatatacacatcatcacatatatatatatatatatatacatacttataaatatatatatatatattgtatgtatatatgtctatatattattcaatttattatttgtgtgcatgcaaacgcgagtgctagaagaagctcaatctagcctgcgtggacaactaggagtcatgtcggaggcgtccgcgttggcgcgcgttgtgactggcgaggcctttcttccagagccttgcccaggtgactcctagatgtcaaaaacggtttccaggagaaatcgcgaaagtggataagaaagcgctcgcggctttcttagccagccgcgcgccttccggtgtctgtccacccggcttcgctcccttctcgcacatcttccgaattcggatctcggtctcttcccgccacatcgcttttttcttctcttcgctgaagaggcgagaactcgagaagtccctcctttttggtagcgccctcttccttcttgcgttttcgcgttctcaggttttttcctcctctcctctctcttcactgtccggtcctccacga

SEQ ID NO: 2012 - DNA, 1092 bp, Toxoplasma gondii
  source 1..1092: mol_type = genomic DNA
ggaacgtgaatcgttagcaacgatgtttcgatgaagtgtaaacagaagactgcatatggtcaagacggtctcacacagtgtacctcggggaaggtcacaccggacttacgtccgtaaaaactggtttcatctgtgattagcagctgtggctgtgagtcgaggaacctcgcaagagttcgagtgttagactttttctgtgagtctgaatgtaatcgttctaggaaagagtgacatccaagaattctgaattgcttcaatagtgttcgcgagcgacagccgaagagcgttcaaggacagactcactgaatcctccacccaaacgctaggaagaactgcgaggcagaaattcttaatgcctccagcgctgcgatgtaaagttttcggagaaatacggactcgcgaattttctgagggcggcacatagacaggcacggtgtagtccgtaaatgcgccgttgcagacgtttgattcgctagaaaaaaaacgaaaatgggtgttgagagactatgtcggggagtgcggcatcgcgattcttcagtgaagaagtcataaagagtaacctaacacaaccaggaatgccatgtttcccgtgtgtcgctaagcgagtgacggattcttcacggtcaaaaggtgcctcacagaactgtgcacggcgacgtctagatcgtcgttttccagtaatgctgaacgcacaccgtagagtaatcggaaggaaactcggactttcaactcttcccagctaggtcagtgtaaaacttcccttttttggtgtcacgagtgcttctcccttctcgaactggagacagcccttttcgaacaccgcgtcgacttcagcaaggcacacaatgtgtattttttgccatgtctgccttcccgtctccttccgcctttagcaggttcttggcgtttctcctgtttcggcgatttcgactttcgtttcctcatcgtggcgctgcgtgggcatttctgtcgctttggttcacgccagtgattccgacgtaacatataactcgaagcgagttctctgcactctgcaagttcttcgccagtccttcctctcctgctccgcgtaaacacaaacgtctctcaaaa

SEQ ID NO: 2013 - DNA, 3361 bp, Toxoplasma gondii
  source 1..3361: mol_type = genomic DNA
acagttaaatatagttgcatatatggcaaatgattcagattttatacgcagtgatttaaagaattaataatatatattttttttcaaaaaattatacggacattacttgaattttaagctttcttttctctttgacggaagcaggaaagctttgcgatgtcctggactgtcaagagaaccttgtgtgccgcgtgttttgcaggcaaagagtcccctgttttcgggacccacctgtcgagaaaaatcgcgagaaaacagtgttgcacctcatgcatttcttcgcaagcactgcgagcagagaaggggctatgagaggtgcgtggcatgtttttcaaaagccgcggcaacgagctcgagattcatttgcgagcgtttcggcttcgacgcgttacgctctttgatcttcatggcaatcggaaagcagaggaccataaacgtaactcgctctcttttcgtgccagtattggtccaaagacgtacagaaatacagttcttcgcaaagtggggctgtgccgctttgaaggccagacgcttttatgaagacacatagcgatgttcaatcgcaacactgtttcaattctacaccgttgtacccctacctaaatgcatgaacagagcggatgtctctgaggagaaaacggagcgcagagggtggatctgcgtgcatgtcgtgtaggattgctgtgcattcgtggaggcagagaagcggctcaaaaatcttgaaaaaagcagatgcacacattcatacgtaagtagatgcatatgaggaaatcccgacggggaggggatgacctggctgcgtgagatgtagaatccctgagcctattatttggatggcaaagaaggttcttcgaaacggaaaggcaacccgagaggccataaaaacatgccagcgaggaatagacacaatatcttacccacgcgcgtgtcttgctccagcttgaaaatgctgcattcaaaagattctttttgcctccaaaaaatttttttaacctccaacttgttttcctcgtgagcgcaagctcagagtgggcggaaagcaacacacacgggggagttcacctgcgcatgcgtgaacgcaattttttttcaggagcgagacagcgggtgtcgcggacgcgacagagaccgaggcgtcgtgggagacattggcagggtcctaggcacgagagggagagttcttcgtgcgtcgagggaccgcaaaataaggatcaggtgagttttcaagggggttttaagttagaaacggaagcgaaggtgaacgagaaaacctgaatgtacggccagtgtaaactagcaaaggagagacccgccaagcggagacggcggatcttcgccgcgcgtggccccgtcgcgggccttcgcactgtgagaaaagtcgaaggatgttgcccgtaaggtgagacaaacatggcggctcttctcggctcaggcttcggaccttctgactcctctgttgaaatttgcatggtcggggtactggcaatcttcactctcccggcctcttccccaagaacttctggagcttttcaacatccaggtatcgcgactattcagagagaaaaaaccctggcgccgggggggtttctgtgcacagaggggaaattacgctgcgctccccctcggcgtctccgcctctccgcgacaagagacggcaacgtttttgtgtttccgagggggattcggtcctggccttccctccgcatccactcgtctctatttcctgggagtttgcatcttcttcgctgccgccgaaactgcagaaatctcaaaaaagcgcgcgaataggtcttgcccacgggttttcccgtccgaggctgctggcgccacgttgcgtggtgtgccgcggggctttgggtccccgcgggggtcgtcctccggttgcctctcggaattttgccgaattcgtactaaagcggcggtgaaatattgccggaccgaaaaagccaaagaagaaaagttctgcgaagctttgtcccggcagtggctctcgccgtcccctgtctttgcgaggttgctgtgcggaaaacggtttgtggcatttcgaggtgagcttcaggcggctacgtggctcaactctttccatattcgcgtgtatattgagttcgcttgtcgaatgttggcctgcgttggcggacagagggaaaaaacaccctcgaaagagaccccgatgggaaacgtcaggtgttgaccgtatcaacgacggtgtcggtgtgcttgcacgtttgcgaaaatctgtatgtcctttctgctccggcgattcgtgcgcttgccaaagaattcttgccggcgtgtgttattaagggcggagtcgcggactagttgaaagtctttgcgtcttccattcagacaggggagagccaagatttgagcgaggcggctgcggttccgttccgcgaacctgcactgggcctttgggtactggtgtacagacaccgcgtcgcagcggtacgcccagcgttgggactgagccgagattcacagttctttgtttccgctgaggctgtggacattcgcgaaacgcgagggcaaggaactctggagcgttcacgctcaagtggacggaaaactgtgaagagaccctgcccttcacatctactcgcgccgcgactgtgtctgtcgcgggttccacggggctcggcttcggacggacttttcacggattcggtggcggctggagaggcgtttctgaatgcatggccgtgtatatgtttcccttctcttccagccaaagaggaacgggttaactcaaaccggtaaccgtaactgatcgtagatttaccagtcagcagtacttgcagttcaaacagccgccgtgattcgcccgaaagactcaaggcgcccggagacgtgtacgtgtcttgcgaaacggtccatggatttcgcgccttcagctgcaatttcttcagtatttttgcggccgccaacttgccgttcgttccaacgccacccgcatgcctcgtgccaaggcggacaggagtctcccctggactcgccctgtgcacaaatagagttttgaggtcggtcagacagccgcctttgcatgtgacccctattcttagacaggcgccgttctcagctgcctcaaacgcgagtgtctctttcacgcagcgctcgacctcgttctcaccttacctcatatcctccatcaactccttccttttgcttctccccagttatgagaaacggccaaccgagttcttcatgagtgctgcgcaccaccgcccgattggactgctgaagacagctgaaggtgtcacacatcaaatccttcgccatcaaggttattccacataggttttattgtaggcgtttcggggtacgcaagagagctagatcgattcttccctgctttgcgcga

SEQ ID NO: 2014 - DNA, 2901 bp, Toxoplasma gondii
  source 1..2901: mol_type = genomic DNA
actcgagctcaagagcttgagtttcagacggaaactcgaagagggaagtcctgcggatgtccagcgatgggtgggctgtacaaacagcacgcggcccagggatgaagggcttcacagagtctcagacgccgcaagctgcgcgtgtcctggttgtaaccgacacactgtcgcagattcacatagtgagaatcttcaagctagcttccgcagaagaccggagatttggtttccacgaatctgaatttggccttggggaaaaaagcagactgggagttcgcgtgcagcagcgacctttccgtctccgaaacggcgaggtgagtgtcaaggctgtcgaggcgacgcgcggcgcgaatctagcgcgagcaaagaggaaatacaaacagaagaaacgcagaaaacgacttggaccggcaggcgacagggccggagctgtcgccgccatttctgcaaagacgctcaagggcgaaggtgagaggcgggttgctcccgcctgggtgcatggaaatctgccaagtgggtcgaagctgcagttgttttcaagccagaaaacctctccatattgatcaggagcccgaaacagattcaaaatacagaattttctgaaataccgggggaaacaaaacagagacgactggccactccaatgagatcacggccgcagcacacttcggactggaaactaattctcacgtgggaaaggtagggtggcaaaggaccgacggcgaaaggctgtctggaaacggaagagaagcgccggggcgtgagaaggatgaaggcgagcaacttcagcagtcgctgtttccggagacactcgtcctggtggataagcgggacgagaccgccgagagccatgtgctaattaaaagcgaggaaagagccgccgcaaaacgagaacgggtagacacagtgaacccgaaaagaacagaagggcgacggcagatcctcgtgtcgctgcgccgcgcgaacataacggacggtcgtgaaacgtcacgaggcaactgacgaaaatgagccagaaagattatccagaagaaagcacacgactaccgatccgcagacggaaccctgcgggttgcttttagcgaagaaactcgtgcgtcgaggctttttgaagtggtaagcgcagaagggacatgcgacacgagacgctagaagggaagacaagccaggtagacggaggtgagtacaacggatacaccatcatgcacaaaatcatagaaccaagtttgtacaaagatatttgagcaccagttttgatcgcaaaaaagagaacgccgagaacagcgatctgcccgcgaagttcgtgttcgagagaactcccgcggaagaaccaccaccccccttctctgtgtcgattttgctactcgtgcgccgctgtttcttcaattccctcgggtgtcaggacacccgaacgatatcaacggcgtctcggattttcgagggcggcaaagaagcgcagcggagagcttgcttcatgaatgtgtcatccgtttttgtccaccaaagttcggaccagtgggacaggaagatcggctacacatcttttcaagcgacggaacggagccgcgggcacgtaaacagtacacgcggttctgtagaaaacacgcgagagcacgcgcgggtggccgatgctggtcgcacaggctagtgcctcagagccatcgaacgcgatggtcggtacgagaaaaaattccattttcttttcgtcttacaggacgttatgtcaatggaaacttacgcgagtatggaacggaggattgggaaccagagtcttggcccctatctaggtaggcaagttccgccctgcaagacaccaaacaagaccagatgcactgaaactcagaattcagctagaagcagaacgaccccgcctccagaaacaccgttataaggtgtacaaactgtgagaagaggggttttgctagagtagagaaacaacggattcgacacacgtactccttggcaaacacaaggaacactgccggctaatacacgaactacgacattcggttcggcaatttctgcatgttgaggcagcgctctaccaggaaaactagggttcaaccaaatgtcgaccgcgtattctccgacttctgctgtgctgcagtagtacaagatgcgaatggtagcattagtcacttacacgctcgtctcgggcccacagttttgtctagttctctcacgcaagtgaggaaccagcattggaaacccagctgcggtgtgactctcacgcggtgtgccggatttgaggacgattcaatacttgtggttgcggctttgtgttttcaagtcctgtttctatctgattcccacagtatcttataacataaactgcgaatttgttttcgcgacatcgaatggaggaaggctgcgcacaacacgcagaacccgagacaacaacccgtgtctccaacgtagcacgcccgagttgggtttcatggttcccctgttttgcatccctcgtttctgcaagccgagccagcaaaatctgtcaattactttcctttcactcactcatgcaggactccagcaatttatcttgaaacaataaccctcactgtcgccgcgtccggtgacgcatcgggatcagctgttgaggggaaaacatagtcttactaattctccgttgatggtgttttaggctttctcgggtggactgacagtgcgttaccgtctattggttggtggcaccaggtgactggggacacaggtacaaaggtcatctgcagcctgagggctgaatttttcctctccggtagctttcgaaacaagttaaccgaccacacttatcaacccgcaacatcaaaggctttcaaaagaacgggcgacaccgagcttccggcggcccgtggcttctctgtttcctacttggtggaagcgtgtccccactgccggtagcga

SEQ ID NO: 2015 - DNA, 2474 bp, Toxoplasma gondii
  source 1..2474: mol_type = genomic DNA
gtttgagcacgtgctggccgaagaacgtgaatctttcttcagtcggtgtgaagagtttttttataaagtctgagtctctttacagctctgtaggtaaatgcttgaatgccataaaacagatatagtcgggcactctgcgacacgcacatgtctcgtggcaacgcttgtgctggagctctaaggaacacaatcagccaagtggtttcttttttgacgtttccagtgaggcgttagcgacaccaagctcgggtcgcgactcctgatgtttcttgccccctcgtggcgtacttgctgcacagtggagctgcacttctctgacaaaagaaaacgttcacttcgattctttcgttgccttcccagtttgaacgtcagttagtctgcctagtggatcatcgcaacacccattaatattcgtgatctgcgacagcacctagaaatgactgaagtgcactgcgcgtgaacgcactcaacaaccagaccccctcgtgcggaacctagaaaacagaaacagacatttattggtacgtggcgggacacgttttgaatcaaccattgctttctgcgcactacctgctgtcctttcaaaaagttgacttgaagagcttcctttcccctgacgccggacctacggctttcagcgaccaaggtccagaggaatacgtgaaatgcaggatatcctctcatcgacacctcctttgtaggtgacagctaaacgaggcgtatgcttcgtcgttgaattgtggtacataccgaacttgaaaattggcgttacacaaacaaccgatggccttagtgataccgttgaagctgcttcattgaactccagatcccttgttcacaattcacacccataatactagactgcctgctcactggcactgcttgcagaatggagtggagctcgttaaccggtttcggcgtagcagtttatcttggttttggctgcgggtgttgtcacgtctggactgtgtagacggtacatttacactttcccctcctgtcaaaccagtttctactagcggcctaccgtaattgccgctcgctaaatccgagttcaaaatgcggtccgcagaacataaacatgtttaaaacgaccctgccgcacccggggaggggggtgaagaggtcagaattcccaaccattatcaggtgtgcgcgtgaaccatgaagtcatgatgttgcagtcagatctcagaacctcagaaatttttgaataaagacaagcgatatagaaagatgaacctgtttcctactgagaattcaaccacctcaggtctctaattgaggccaacttttcaatcgtgtcttgtggtgtgtgtacacatcgccgattggcaatccgtgccgtgcactccagtggccagcgccctgctgtttttactgaactaccatcggagagacaagagtcgctttattcctccagaaaacatggaatgcttgaacatagatgcaactcctttactttgctccctatccttgggtgaaagctagctgtgaaagtaaattgtttgtcgtctccgtgacatgcatctgcgggcagatttcgcgcgaaaatcgccgcgagcgggtgaccgaggcgggaggggcggaaacggctttcgagttcttcagtttctctcccaggagggtctcggtgggtgggagcaggaagaaagaggaggagcgggaagtgtgaaaaggacattcttctgattacgggaccaaagcacacttgctgattttttccaccaaaacctctaattgttttctccacaactgcgcaactgcggtgagttcgcccgttaacctgctgcttggcgcatctcgcccaccggccctaggtgacacacctttgtctttgaacgctccgctaaacctgtatacacacacgagctcggttgatatatattatgtgcgtacgcatgtggtgtcgttcctttctgttgcgctcccccatctgttgggtactctttccttctttcttacaaggatttctcgtttatttcatccacatcctggtccccatgtcaaaggacgacttctcgccccctccagggtcgagggggctagaggtttcgctgtgctgttggtgactacggcggtgacccgtgccaccatgagccctatttttcctcatttcaagcgctaactccgaagagccatttgtactcagtccggacaagtttttttctcggaattgcccgtgttgtctcagcgtcttgaagacaagggctcgaccctggccacgccgtcaagcgactctttgtgctttgttcccttctattcacccttctttgtcagaaccttctatcctcccctttctggtgtcttgggaagtgggaaatgcacgtgacactgcaccaaatcggcctgcagaggacgttctcgcagggaagttaacaggcaaccagaccaagaacatcacacgctcctgaggcgtcccatcgccgtttgcggctctgccttcctctcgctgtcctttccctttaagaaga

SEQ ID NO: 2016 - DNA, 2559 bp, Toxoplasma gondii
  source 1..2559: mol_type = genomic DNA
ccgtacttagtgagagtaatcttttcaccgccggcgtttgagtcatccatataattaatttggaatacagcggtcactgcagctaagaaacaaaagtcgtaacgggtgctcttacccagaccacgtcaggagttttccggaaaggtacaaaccgaagaacacttagaagcagtgttaacttagaaggaccggatgggcaaatgataggggtggaactgaggttagagaaggcacaaagagtgcgttgaatcacttgttccgtgcgcacgcgtctttcccaggcaggtacgtgcgaattttcgaagcaggagcgcagagagagccacgcgtgcatgttgtagacgcatctgttaagtggatacatgcgcttctcgcgtatgggttgttgccgtacgtacattgcttccccgcaatgcacttgtgcgtttggtttggcgtcctctgaggttgagccaggagtgggacccccagcgggcggtttgagagcataaccgcaaccgagaatggtgcataactttcatcaggctttgcataggagtccggtcacaatttcaccacgtctacgaaaaagagcgtctggggactacgcgctacgaacctgaaggcacctcttttcgtggaacaagcaggaaacacatgatacgatacgggtgtcggcacaaacactccaacacagatcgatcaaactgccgtgcgtttagaatcgcaggctttttctatgtctgatatcttgggtcaaccgatccaaaatcgtgtggggaaatgacgccggttcccagacgtcactcacacaccgtgtcgcgattttgtcgtaggtcacggtgggggagcattagctcagagcagacagtctgtaagctcggcagtcaactacagggctaacacagaactccgaaaggcaacgatacggcctagctgccgtttcgccaatagagtacgcatggatgtattaaaggagtaccacgtgagtaggcaaaggctacggtgtacttctgtgtagtttcgaggtgagatctctacggaaactcttcgagttaaatgttgataacaacgctttctagcgacagcttatttgaaagtggggatcgcctattgactccgcagtatatgggattcccatcttgatcgcgtgaaaacgacacagtttttcaaatcaggatatcgaagtaccttgttagtacggtgcagacatcatcggcaattgagtgttccggcacgcctcgagtgtagagcagagcggatacttagcaagtgcgctcaacgcagtcgggatctgccccagtgattgcttcgtgcgagtgaacacactgaggagaacagacgcacagagtgcattatacgggccattcaactacctgggatggacatactggcactttgccctcgatttcttccgagccgatcgcatctgttgtttccatctgttcatcttgacacccctagaaagctgtgtgcccttttctttcgacgaaagagagagtgttattgttttgtttctacgctctaaacgctgttttcttcgcgctcgggaaaattcgagaatcacaccacggcaacagtcggtgtttcgccagcaggcgctacagcatgcatggatcaaaaagggggtcattaatgggctttgtcgccgggggcggggggacaacaagggggaaaccaaaggtaccctaagagaagaatcctcctatagaaaggagaaattgccgacatctctgaacgttctgttttcgtaacatggacatttcccgtgtcttgaagtgaggcggctgttggtggctctgaagctgccggacataggtgtatgtacaactcaaccgcgaacatttttgtggtccccgtgcgactttcccaagaaaggaactggggaaaaacgagatgtcaatgcgcaacacagtgtggaagcttgaacttcttttgcttgttttcccgtcttctgcgtccccaaaatgcagaagtaacgtccttttcctctcgtctcgtcttcgcagcaccccgcgtcgtccgtcaccaccaggagatgccgttcttccgtgttccactcttctttgatgtgactgagaattgctggcgctccagtatcgtcccgtgttctcgggaagacttttagttttgatacgaagaagataatcaagagaaagcgttgtattttccttcattaaaccgtctcgaagccctctgcaactaccgccgcggtgcagcttctgaagtttccggtcctctcggccaccactgcttatttatccctctctttggtccgttgttcttgcttttgtgctcctgcgttacctcatttattacggcagaggagctgttcgcttgtttggtcgttcctacgtcggtttctttccacgtctgccagtggtctgcgtgcatcgccctcgttcgccgttctgttgagcgtcgccacaactcgactgcggcgccttcttttttgtgactgtgctatctctctcttatcagggcgaggggacagaagcggcctcctgcctcttgtctgttgttcgcttccacaaagtctgttagttttggctgttggccttcgttttctctgcttcaaga

SEQ ID NO: 2017 - DNA, 1917 bp, Toxoplasma gondii
  source 1..1917: mol_type = genomic DNA
attacctacatctacatatggcttgcacatcggaaagcgactcccccaaaggagacgaacgtcctcgaaagtttaagaattctcgatctcagcagtgccactctcatgcttggctgaaaatatgtctgtgaagacttggagatctttttcagatcgcaggtttctctgctgtacctcctgtccgacgtttctgtggaaaaaactgggtctgcaaaactatagattacgttcatctccgtacgcatgcctttcactgcacatgccaacgtaatcggatctatgtatatttacatactacatggtgcacatacatacaatgtacacatctctttatatgtacgtaaatgtgggattgttgtttcaagaaatctgtgtggagtcgtcgctctgtgcattcgtctctgtgtgtgccttcgatcgagtacaccgcgtctgtctcagtcgctaggatactgaatgagactccagttaccagatgcagcagccctgttcttaatccaccaccaccccagcggactgcagaagaccgcgaaaaactgccggccatcaatatccgtacatcgtcgcagagaagtgtagacttccagtaatggctcaaaacatgcgtaaatgtatgctgaccttagtgggcgtttctctgcgtatgcggcgacaacgcgtttccgttttctgtgaatctcgcagaggacctgcagcctaaacagcccctgcgttatttaggttttctgcaaaggagaagaaaccagaaaatgcggttgttctgcaattctctcgaccctacagcctcctgtgtgtcgttgtaaaagacagcgaggaacgtcctagacctcacgaggaagaaacccgctattcttcggaacgaacagagtcaaagaactctggagagagtgtgtatatgttatgcagaggcacctgaggggaaacgtcgagaagcaaagaacgttcattgacaacaacggacggtatagtgtccgcactccgcctctgtagctgtttctggcgaaaaaaccggcggtttcggtccgatttttcaagggtcacccgaaaaaacacactctattttccactcgttcctcgtcctgtcaaagttctgttccaaaatgcggtgcttttcccttgtcgcacccgcgactaccccactctccttttttcgactctccttcgcggtcttgcctttcctcagttagctggacgcagaggcatcagtgtcttgcggcgcgtgtctgtccgagatttttgtgtcagagtttctcgggatttcacccagaggaacgcaaacggaagagagcgatcgttgcacctgcgagaagaaacatcgagtgacttctgtcgcaggaaaagcagaaacgttgtgttcccaggcactccccggcaggagcggaccccgaactagccacggctggaggccctgttattgtcatgcgaggtctccgtgaacagagaaagcgcactgtcgagctcttgtttgactttgtcaaggagacagcctttttcttcacaacgtattcaaaaaagccgtggcgctccgagctcatggcaaagatttgccgcaaaaatcttgtctgggtcgcgtgcgacttgctaacggtttctcgacctacgtcggcaaagcgacctggcggaaatggaggtttgaaatttccacgaaactcgacggtctcgctctgctaaagacttgcgagttcgttctctctggtcttctcgtttcttagcatgagttccttgaaagttccgcagccgctcgccccaaccgaatttttccacgcgtgaggtttgccctcaatttgagtctcgctgtcgaacttccttgggccctttggggtcttggcttttctcgactcgacaagagagcagagctcgctgttgccttcccagaatcacagtgtgcttctctcttttcgtaaagacgaggaacca

SEQ ID NO: 2018 - DNA, 3899 bp, Toxoplasma gondii
  source 1..3899: mol_type = genomic DNA
aaagaatccggtctattatcagtgtggtgaagttgtccttccgttgtccttagcgatgcggtccttactgccttgagaacggccacgggggtccgcgcaatccgcactttccccttggatcttctttcactgataatcccacgtggttcaaagcgtagacacgccagtaaaccctcgcgttctagcaccgtcgcccagtgcggtgaagacaagatttcgcggcgcattgctttgcacgtaactgtgagtgccgcgtaggcaactgaagctcccagagtctcaagaagcaaaccacagattgagagaagggaacaagttccacagagagatggtgcagatgaccggcaacttgagaaatgtctgatccggttgttttcagtaggctcgtctgcaggagaatgtgtgtagcagaccaaaggtgccgagcatttatttttaccggtatcttcctcgcagcagcgacatcgtgtcgttaccacacctgtttctgcacagagctgccttaggcagcctttgggatttccagtgaatctctccatggaagatgcagtggatgtgtttccggtggtacagaacgtgtccttaatcgtcgttccatttgcgtcgtgctgtcgcggcaacgggatggacgctgagatttccccacgcgaaaaccccgcgttcacatttgagcacgcatcggcgtgccttacaagccgcccgcgtggttcctgcatctcacgagcagaagttgcagatgccggatagttcgaatacttgccgcatgtaaacgtctgtgcacgccggggtttccgctggtgctctgtcggtttctcaggaaggtaagcaaacgcagcccttgtacggaccctcacggatgtgttcccctgtttcctcagagcagggagttcgaccaatttgaagattggctttcatgggaacggtgtctatccacaaaatactgcggtaacgagacacaggaagtccctgttatagaaaatgtcttatactgccacaccttgggtctccggtcatgaatttcacctgacggttgggttcgctgagacgttatggattcaagcttgagtgacaaccgttagctgcgcgcatatccgaggggaaattctggccggatagacattctacgcgtgtaatcggagaataaattttcggacgtgaggggaagtttaactgcagtatatatgtttcgggaatgtgcatgtatgtttgtgacgtggctttcgctggcaatcgccaccaaccaaacacaacttctattggatatttcgacacgtacagtcggtaatgcagaatttattaatctacgtgacacgcgtagagggatcggtgaatctgttcgaaaccaaatatacggtttcagggtttgattttttgatggaagtttgtggacgggcgcaatgatggaacgttgacccgtctcgatcgcaagtaaggccagtgtccttgtttccaagaccagtccaggcctagatggatgacttcatggggaattcagtcacgtgtaaaaaagccaaaggaaaagcgcacagattccgccgtttttatgcttctcctcccgggcaagaaaatgaaagatggggaggagcagcgaaagggaaatcactgcattacatgcgctgtcctctccgcttttcgggggagcttgttgaaggcacctttgactaaataaaaagcatcaaccggtacatgggcccttgcaaaggaggagaaattaataagaaatcgatacgaatttcctgaggcgacagacagaacccatgtgggccacaaccacccatgtgcagttgcctcgcctgtcgacaaccaacgaaaaaaagagtgtgttgatgagtcttctgcccgtggataagaaacgttaaaaaatttagccctctctcggaacacaaaaacaaggcgtttggccatgaatagggaaacgcagatgaggatggaatgcttatcctttcgggcgagcatgtggaaagcgctcaacatctacagccttcttctaaaagtgcctttcagggggtcttttattcgatacttgtgacatcttgagcccatttcttttacaagaaaggcttcagacagcggagagcacgcactgccatcaaaaggaaatcggcacctaaaaaaagccggaacgacgcagcgagtgcgtgccctctgttgccacaacaaggtaaattcagttgttcatgccgactgagaaatgcaatgtttttttcgcatttcgtgacgaaaaatcgattgtatgagagccgagaggacttgtattcacagacgaatccggccaaaagcccacctatgcgccttccgcgtgtgacagcacaacgcagcaatgcgtgacgccacttatttccccaagcctgatttgatgaatatttgtacatctctgacatgcaagaagaagagcttagattagagtttttgttgccgatcttatattcaaattctgtttgtgtgtgatgtagtttcactgtacgatccctcgcgtgaggccacttctgttgcttaatagttggcctacttcgtccagaatagatacaaaacctatctggcactggttttcgacatgagtccagcatgcatacacaagtgtgatatttccgtgggaagtcagggtgtatctttcaggacagacgtttttcggtacggctgcagaaattgtgggcttccccgcaaggccgaatagataatctgcgactcaaggtctttttcgcggggtactcactaccgaaagggactattcaactttgttttcatcatatctcgttccttttttagagtgtaactagagaatacgtcgacggcggccatatttcgtgacataaacggtccaaacggtccatcttcagtcaattgacaatgctgttgagtctgtctcgtagtttcgagctgtcccacctcatcacttgcgtttaaatccagatattgcgactgcaaagccctccctccgccacgagtatacaaaataacgtgcttccttctcaaactgcgggagccagttatgttcttcagtctttcacagccgcatggactcagttcagcatgcttcaccccacgcatgcgaacaagcgacgacaacggaacgcctaagttcgctgggagcccggaacacacgagtcactttaggagcctctcattatctcagatgccgcataaattccaaaacaccgtcctcatgattcggtgcagcgtatcaggctggaaaccaaaagccgcgtcagggcacaactttaaagaaccgggcggacggcctagcgccgaccgacacgggacgcacaccataacatttcctgtatgctcagcaaatatctctaggcatcttgtctcgttcaccaaggagaacgaaacactcgcggttccagtggtgtcggcggtacttcaacagtgcacacgtttcccatttctcttttttgtgtctcttctagtgacgcggcgctttcgttggactaagacggaaattggcgtcgcacgtggccgaattcacagccgcacctccctcctggctagcgatccaggggcgctgctcaatacgtaaccccaccacgctgtggactataaccagcagtcgatggaccgtgctttcagctgtccgtctgctccaactttgatacttgtggggggtacgaaatttgtgtggcgttttttgaagtgcatgtttcacagaggtctaagtccatagatccaccatcgagctggcccctgttgtcagggtttcattcggaccctaggtagagggcctgtctccgaggcagccacccagcatctgtcaaacggatactggacgctggacgttcttcgtcgtcggttttttctttttaattctgggtccatccctaagttatgttttcgggactgatataaaggtttagtgtttacgtcgtcttggacagctaatgttccaacagctgcga

SEQ ID NO: 2019 - DNA, 4999 bp, Toxoplasma gondii
  source 1..4999: mol_type = genomic DNA
aaatgagaacggagatgcatgagggaaacgctctcagagaagaaaacatgaggggtcgtcttgagccgcttgctgccattgtcggagaggggcgacgccgtttggtgtctcgaacatacctgggatgtctgcgatcgccgtaatacctaagcagcggtttttgcatgttttagaattggaaacgcccacacgtcgtccccatgtacatttccacgcatgcatgggtcgacttgttttttgcgttggctgtcggtgcactccggagaaggcatcgcgtgtttcgctgtgccttaatgccgtttttgacgttgcgtttgtgtggaggaaacaggaagagtcttttgaatgcaatcgagtttctaactcgagttcccgttttccaacaaatgcgaacatgcaggtatttgtgcctttttgcgcccatggcacattttttcggcggtattttgttcgtgtcagaccgataccgtcgttctcttacatgccgcgtcgataaaccgggctacacactctgttctgggtttcgcgccttcccctctcgcagccttgcttgggacggaaactctaggaatcgattcactgcacgactctcacatcccttcagtttgtatctcctgcaccagatctcatgtaaaaaaggtatgcgacagaagacggcttctgtgtggagatctaacctcaaagcgcaaagccaaatttatgctggcatgcgtccttggcacaaacgtggctgttttgcgcggcaacaatgctgcaacgcacgttccagtttcagtttccccagtgcgaattcgctgtgtcgagggactttcctagagtcagcgcgagaacacggaatctgaggcagtgtcgaacaggagtggacagaggacagagcagcttaataaaacggggtctggaaaagagaacaaaacaaagatagttacacagggaaggtgaaaacactgcagttttgtcggcgctgtggaggagccaaagaatacggttgctttcagtaccgggggagtccgtggacaaatcctcgacggcaaaaacaagaaacaggtgagacgtctttcctctgaaatgaagaacgagatggaaacgcatgcctttgtttttcaagactggaattgcctggaactcttacgagttttttccgggtgccatattcctgggaaccacttggataaagtcgagattcccaacacgcagcgggaagttgtttcagttgctaatacaagaaatgatctcggagaggttcccgcacctatggagttgacaacgactgcgcagacagtaaggcatgtgtcggtgacgagaggggaacagaacgtgtgcagaaatctcgagcgttttcgcatctttttgtccgtagacaacgtagcccgaagtggaccatctgcggactccaactcgtcgtgtgcactccgcagaaggtgatcgttgttgtaagcctacgatttccattttctgacgggagacagcgaggccagcttgagcacattctttcagtcgatagcccacgttcaatctgaccatgcattttacttgtgatcccagactggtggtttgcttgaaaagaagcgtgctagttccggcggcttctgggggttgcttgcgtcttcgtttctacccagatcatgggagaaagcgaagaagttacacatatcacatccattgccgcttctaagcagtggctcttgttcgccgtcggctttctagatcggtacagattgcctttggttcccagagcggaacgcccaggagttcccccactttgttacagggcttaaatcttaccaaattaaaagagaaagcctgggaggaaccccaccgcacaaagccacccttttcgtctctattcttttgttagcagtgcgccttgtgcaactctcctcaaatgagccttgtcgacccgcagtgagagggtttcacctttttgtctggttctgcgtgttctctccagtttcctggctttttatttttttctcaacttcggctgcccctattctgcagaccttccacttccgcgtttctgttcggagctgcctttccggacattgccctgtccctcgacattgaggccccacggagagtctcgctgcctctcctcgagggtgagcacggttccgcgccggtgagctcccgtcgtcttctgtctcttttgtctctctctggggggatcatggagcttcttctctctcttgtcgaccagttgttttttttccaacgcaaacgcgtgctttccagtatttcgcatgtaaaaaacctgcatctgaaactctcctcccagtttcgtcggtgccgggtgacagccctctacctggctttccgctcgtggcaacccagtgacggggatatagtgcacccggcaggtgacttgggcatgtctctacggagttagcgcagttgaaagggactaccgttctctttctctcgtattctttttcctcctttacgctcttgaccttttctcttcaactcgcatgtgcgagtggtgactctgcaagtttggccgcggatcctagctaccgtcgcgcagcaggtgcgtccgttttgccgtcgagctctgtgtgacctaacccgtctcttaagaggcggcactcctggcgggagtgtgtagcgactccagctcactcttgtccagaaggaagctaggaatgctccacaaaaccacgattctttctcggttgcttcatctgcgcccacaaactcccctcttcccgcctcgcagacgctacctcgggcgcgaagctcccgactcgtcagtctgtcgaagatccgtgtttctcttcttcgtgcaagaactaaaagggcggctgcgcgtgtggctgctctgaacctcttgcgagtttcagttcgcggacatataaaggaaaagaccagagaaacaacgaaatccgtgcagggggagaaagcgaatgcacgcgcgctcggttggacccacaagcgccatcgcctcgtcctttgtaaaaccgtgtccttcagggcggggtcttcccgggtcgaggagaggtcaccactcgcagtatttctctcggttttctggagaaaagcgtgcgaaaaagagctaacagcactgactggaggaagaaagctgcgatttggagccctcgttttctgcttctacagctccgacctcttctgatacatgtgggctatcgactcttgcgacagaagaacgaggctgcgagtccgcgccctcttgcatatctctggtctacgcagacgcgtttcttagcgagctttgatgcacaaattttctgtgtcgactggagaaattaccccagcttcctcgcttcgctgtagagattcgtattcccccctgttcacgctttttgaaaagccttccccgccaaaaaaagacccccgatatcgacgcgtcacgcaggggcggcctccagacaacgcaacacagatgctctttttttcgctgtgctctcttgtgtttatttttcctgctttctcgcaaagaacgagtagcaccacaaagcttgagacgaggttgcttttctgtcttctgggacttttgaccctctgcgtgtgtgtgtctgtccggcccccctcggtttcggtgccagccacagaaagatgccgataatccctgcacttgcgtgctgccttcgcgttgctctccctcttcttctgccgctttctgtatctcagacaaacgtccctttccaccgaagtgaaacgtcgctcttcatttccttcttagcgatatcgaccttttgactacaccaaacgcgtctgcgttttctccccgggtactccaagtgcgcggcgaaagtaggcgccgaggagagcaaacgaggtgacagacttactctgagagtcgaaccgcgacagtgtgtgtgtttaaaatgaacacgaaaaggcggtgtttgtttgtgtgaacgaaagaagcatcgagcttccgccggcaccattcagaggtcgccactactctctcagacaccctggcggaaaggatcccgcctgcttcctccgagagtctgcgcgcctgtgtgtccgcaactgaggctgtcagaccgctctttcgatatttttcggtgaaaaccagatagtcgcggattcacgccttcgtagagaaggcgagacactttctcccggcagtgcaacggaatttctttaacacgagttgcaagcttccacaacaccgtccgcgtcctctctttgccgcgcctgcctctcactcctctagcctggtccttgcgtctgtctcccgctttttcggtcacgcctttcaccaaaggttcggcggactgagacaaggagacaagtggaaaaaggggaaaggttcacggtttttccattccgtcagtgtgtttgtgtgcaaacgcgcatgtgcgccctgccctccgtctcgtttctgaaaaaaatactcgagctgccagccaaaaggcttcccaccgtccgcgtagaagacgccgcgctctcctgggtccgcgtgtggacatacacgttgcacgatgtccaggtttctctcgagaagatcgagtagaattttcgttttctaaaaactccgactgcgtgggtctctccccggacgcccagaaaagttcagcttccctctcagcatctcctgcgttttcgcgctagtgcacccagaggcgccgacccccgcgctcggctttccgtgatggcccagaggacagggaacaccctagacaatggtaaaacgtgtgcggcgcgtttgctcgagttttgaggaagctagtgtttgtacttgttcgcgactgcgagccgcagaaatctgagccgacttccacgcactctcaccacggtttctgccgcaatcctgtcgtggtgcaagcacatctcgacgctcgttttccggttccggggacttgccacagtctacgaaaactgcgttgcagacccgcgggagcgtttgtgcgaatgcgttctgcggctgaagaacgtctctgttcctcttcgcgtgcctgtctgcacagttggtgagtatggaaagcgcgtttacctcgtgagtccggagatatttttcgtgcgaaaa

SEQ ID NO: 2020 - DNA, 2083 bp, Toxoplasma gondii
  source 1..2083: mol_type = genomic DNA
agttcttgctctgtgttggcaacgcatgcacccgaggaacttgaagcgtctttttcgtccttctcttctccccagtttgagaccttcgaaaaggcatctgcatgcgcgcgtcgcgacctgccttctccgaatcgaacgcgaccgaaagcgggagacgcgcggcgcagttgtgtatctatttttcgtagttctgtatatcctttttaccgtaatcgttctgtttcggataggcggtacaccgcgggagcagaggagatactgtcaggggaaggatttcaagcagctgtgctcgattgctgcagacgcatgcgtttttcgaaaggacgcgcctggagatccgtttactagacaagaacgcgaaagtgaagaatgatttcaggcttcctccacgcttctttagccgctctaaagtgacgaatataaaagatttctctgggttttcacctagacaccacagaagcaagtttgaaagaaaacatgcgactccactttcttcctaggtacagactgtcaagcatacacgcagaaagagatgcaaaagccgttctgcggccaggagacttcagcaatgactcctgaatgtcgatctctacatgcagagaaagcgaacgagagacagagctggtacgcccagcttcctgtcgttgtgaggaggtagaaaggcgcatgagtctgtcaggatgcttctctacagatttccgcttcagggtgtatggaggcgacgagagcaaaaggcagagaagaagaaaacaacaactcgccgcccttgtgtcctcaataaaatgcttgaaactgtgtgctattcagaatcgcgcatatatatatatatatgtatatacatacatacatctgtgccgcaattgcatgtgcaccccacatacacaagtacacagacagaagcattcacatacatatactcagacatatatgaatatgcctcaatatggattcgcccctctaaacacgcatacataatatatacatatatacatatatatatacatatatatatatatttttaaggtatgtatgtcttatacattggtgtataggtgtgtcagtgtgagccaccctcccccgtacagtgtggatatgatgaggttttgctttcccttggaggacgcgacagtgtctctttgccatatgcagcttgataaaccgcatgcagtgccccctctgctcatctcttacgtctttctcctttcaactgtcgctgaaataagaattcttagaacaacctgaaaaagttctgcgacccaggcagatcggcgcgcctctttcatctatgtaagggaggctgtgtataggcgaagtcaccgacctgagaagaagcagggcggcatcgcgggaggcagcgcgaaaagagattgttttaattaagaattatgaaaaaaagcattctgtgcttctacgggagggaattttagatgcgtcttttagttttaattgattggagtcaggaaacattctgtgcagtaaaggggcgatcctctcttctttcttgttgccgtggcggggtgtctctttttgtcttctatcgacgtcgcagcgggtgtctcctggctcgctgcggcttctccgcctctcgctgtcgaagcctcttgtccaggacgagaaaatttctggttttctttctccagaaaagtcgatttttttcgtatttccgcgcttgcagatcctcagattgcgaaggaaaaagacgagacgaggtcgaggagaagtttctcgtcatacctcgtctccagactgcttgtcctcgtccctgtcgccctctgggctggctttcttctctttctctgatgatctgttgttttgtatcgtgtcatctgtgtcgctcgttcgcctccgttccctcctttcttgccgagtactcgtctccctgttctctcccgaccttctgctcttcctcgtttcgttgcctctctcacctgttgtcttccctttctcctctcccctttgttctctctatcttgttctctctctcttcttctctcttccttgttctcgcttccttgttatctctcccctcctttttctctctcttgttctctccgtctccggttcgctgtccgtgtgaatgtaa

SEQ ID NO: 2021 - DNA, 3051 bp, Toxoplasma gondii
  source 1..3051: mol_type = genomic DNA
gacttctcgtctgtgcctacgtggacagtttagcagttcacttttccgcgtgttctcgctcttttcacctgagtagatttcgactccgtagtgttcttcggcgactgcggcaagccactgggcgagctgtcccagactgataacgtagttttttcctttgttcttcagttctgcaggcaggatccaggcggggagggagagcgcctttgctccgctgagaaacacgaggacttcgtcctccgtcgcgagcgtccgaactggcgggccgccggctgtacgtacagcctgtgcggcagttgggccggcgttgcggcatctgtcttccgcttcgtggattccctgttctgcagctgaggcggaggccgtgactgccgtctcgtcgaggtgcttgtctctcagcgactgcaaaacgttgtcgacaatttccgctgcgtcttcgtctctgttccgtctccgacttcccgacttcttctcagttgcatctccatcctgcgggggatgctcagagaccgacccgacccctctgtcgactctgtctgtcttgtctgcggctcgggcaccctccgcgtctctcttctcttctgtttctctgcctgcgtcggcggccctgtcctctgtcccctgccttctctcccgcttcgcgtcacgcgtgtgcagctcgccccacagcgccctcagcttctccaggccctgctgcaggaagaccgcggcggcagctacgcctccagcctcctcggctgcgggagagaaggagacagtagaaggcgacaggttcgtcttccaggcagggaagagttcatccagagcgcgaggctcgaaaacgttcccagagagaatgtgcgacccaatgtcacctcccttgtcaatcacgcagacagacaaagacgcgtttgccgtctcgcaaagctgcttcacgcgaattgccgccgcgagacctgcagggccgcctccgacgaccaccacgtcgtaccgcatgcgctctcgggaagaggagaaaacgcgcgacgccaaagaagacgcagagaaaggatgtgaggaagaagcgagggaaggggcagcggagagaagagcagaagaggagacagaaggcagagagcaagggcgtggaacggaagcgaaaaaaaaggactgggtacggaaaggctgttgagatgaaagggaagaagaggtagaaggagaacagacagaaatggagacagacgaaacgaaggcagcaggagttgagggcagcgagaaaaaggacagagagtgcggtggaaaagacacttgggaagcaccacgagaggtgaagaagaacgcgcgtggcaacgtggaggagaacggagacagagaataggaagaagtcgaaacgcaggtcgcggagaacggcaaggcgttcccagagacaagagccaaggagacgcgccagggcctaaagcgacagaagagagagcgaagagacgccatggggaaggaaagcgggcacaaaacaaactggagagcaggttgggatcggcgacgattgatgcatgcacagaaaccacggtctggacactctaggttggagaacgtctgttctcaaacgcgtctgtgaacctcttctggaacgttccttagagagacggcggcagctcggctgggcaccgacaaagaaacaaagatcggtgatgaaagtcccttccgacaaatcctgttgagtctagtcacgaagcgcgtcgatctccatctgcaagtctccctttctcgccggtccggtaggtcgcaagacttggggtgtacgtacagcttcctgcacacgagccacacgcgccatttccccgtcggtgcatctgctctagcgagagcgcggaagtctctgcttctggcctcaggtggcaacgccttccacatggacagacagactcgcgggcggaaggagaggagcagctgcgctccagagaaaagcaaagacgaaaaactggtaaaagccggtcgagcgcgctcgcgagctcgcagtgcggtttcgggtctacaggcaggtctatctctgcgcagcaggcacagcacggaacgacgcctcaagaaatgcggcgttgaactcgcgcttttgtcgaagggagacaggcacttcttgccaaaaagagagaagagacagaaatgcgacagcggaaaacaccgctagcgatttgagtcttgccagactcaccgagtgcgctgtctcaacggttgccggcgttcgtctgtggcggtcgccggtcgagactggcgggtcaaaaagacggggaaattgcgagagaattggaggaaacttcgaaaatgaaaaggacatttccaaggaaagtgcttcacggaggactgggaggaaaacgaggacgctttcggaaaaagttcccggagagcgcctcgacctcgcagctgtctcgcgagacaccgtgaagcgttcagagcgcccgcgaagttgtcgcttctgctgcgcattttttctctgcagcgtgcatgtagattcgcggctcgaagcccccccactggccctgtgaagccacggcatggcgcgcgaatcatcaggaagctgcagccaaggagaaagactttcctttctgcgagcgccgagttttccacagtggacgatcctcttttccacgtgtagagaagtcgtctcttttttctgcacttgtggggctctcgcaagactgcacagctgcctcggtcgggcgaaagaagagaagcgcgcttcttctttcttcttttcttttgcagatgaaaaaagtctcctcgattttgactgtgagaagaagctggtttctcggatttgcggcctcgtgacgccagcgtgtctccgtctctcggcgtcctcagtccacgaccttgacaaaggcgaatcaagtcgtttcctccctcccttggggcaagcgaattgcgcgttccgtcgattctccgacttctgacgtcgcccccaacgcagcggtggcgaaacgcgtggtcttctcctcccgctttagttctcttctttttctccctatcgaaagacgaaccgggtcgcacagctgtcccttctgtcgggctccgcgcgttgtctctccgcctcacgcacca

SEQ ID NO: 2022 - DNA, 2441 bp, Toxoplasma gondii
  source 1..2441: mol_type = genomic DNA
atagagaggcctgggtatattggtagagaaattgatctagaaggatagatttaaagagagaaacagatatagatacaaaggtagatagacgaacagatctacgtatttcgtccagactcgtctgaggaagaggcctggaaaagtgaatatcgtgatacgcgtacagcttgtttacactttactgagagttgacgcaaaggctcactatgttagctcgtatcggatccatttttaatctcctacctggtctgcgtacacgtcacacaacagtccatctccaaagcgcaaacgtagagtttacggttcagctacacggcgaggtctggtttccaatcaaacagatccacaggatttcgatgcgaaaaacgcgtccgatacagtgcacctggttattcatttttacaacaaacgagacccttaggaagagcgcggcacagagtgcaagcgtccagatatctctatggcgcccggaagaggatccgcaccactgcttatgtaaatacgagcaagcagagcttctccgaaatagccttccgtctgttttttagaacttgtttttcaaatctcccgtaaatatatgctgcaacttgtgcatttgccagagttcaacatctagttagcgaggcagcagcaggatgcgatttcacggtgctgcatgctgcaacaccctctttcgtattcttttgtatgttccggagtgactctctctcgacaggagaaagaagagttttcatcaaccctggaacgccttgtactttctccactccccgtcacacttgtggtaggacggtcaagagtcttcttccatatctttccaggactctacggaatcctaagactgcatcctttcacggcccggctctgtcttgtgagtatggtcttccggagtatgagcggcgctattgcgcaagcaacattcatctttcgtgggagattcgtttctaacttacaccgagattttgctggggggtctagtctgaaggtttcgactcgtggtttagatcgtgaaggacatggaggcccggaacaagaacgcgattcgggatatgctttgtttcgcggatcgaagtttcggaacgcgtatctcatgagcataccaacacagaaaaaaggattaagtttacctttgctttcgtggacgcatcccgaagggtgctgtcggcgccgccgcatttgaaggacttacgctcctcttccacgccttgtcacagtcttccgcgccacactgggagacccgcgcatacgggggaacaaaaaaaactttccatctgcttttttgagcttttttccgttttctcaccaagagacgttattaagaagttcctgtctcaaacgaagagacttcctttcccctcagtgtctcccattgtctcgtgattgcggcagctgagacgaccagcgatgtctcagtctgctgcttttctcatggcaacagtcacagtggcggtcaaatctttcaagagaaaaccgtgtcgaactccagaagaacctagccgtgaactttcccttgaaatcgtgggttttcgctgtttcctctgcatgcataactatgctccttccggttcttcatccgggtgtgtgtatgcgacggggctctgcatttttgccatttttgccggccgagctcccgtttccccgtggtcgatttttgccgcgcgaacggcgagaaagcgacaccgcaggcaagcggagactcgtctcgaaggggtctgtgtcaaaatttccgaggaattctgtgttccacgcgttctgcctctgaaaaagacttctcaccgatatacatacacacaccaccagtcagctgtatgccccccgtgaaacagccaatgcgtttggcttgcgagcgcgtctaccgctcctgctgattttcgcgtccttttccccaaactttcccgctttttgtctcgaactcgcagctttctcgctgccgttcggccgtctagccgcgggcgccgtcccctttgtcgtgtgtgtgtaaggctgtcgaactcgcggccgtggacaggttccttctgaagggcgtctcaacgctttcgcgcttcccggagtctcgactccagtcgctcctccttttttgccgccttttctcccgtcgttccgatatttttgcttgcggagacctcctgtctcctctgccggagtttccgcgcgtccagctcctctctaagaagcatttttttcgctctgtttaggtgccgcggtcgtcaacgaggtttggacggaggacgcgcgaacttctttttcttgccagtctacgttttggccccaagtcgcttttaagaaacgcgtgtaaccacggacgcgaaccaagcgcagcaacttgaaggccgtctgaagcaggaacgggggcaaggtgctggccttcagcagtctgcgatctcgaaaaggtactccccgtcggccatgctccaggcgcctattctagacttctttttctccga

SEQ ID NO: 2023 - DNA, 2292 bp, Toxoplasma gondii
  source 1..2292: mol_type = genomic DNA
gaacttggagaggaactctcggtcgacgtgcttgaatgcagagatgatcctcgggcccagcgtaagaaacaattctcccacctgctcagagggcagaggaaagggacagaccagcgaagacggaagagacgaagggagcttgaggagaaattcagacgccggggaagcaggagcggaagacgtcgagacggcagaggtggacgaggggggggaagccacagatgtagatgaggcagatgatggggcgctctcagagctgggagctgcggtgggctggtacgaaagcttttgacgctttgattttggaaggggcttcaccagataggaagcaacgcgagacggaaggtgggtggcgcaaaattccgaacacgtcgccccacagtggccatcgaagagggcaaccaacgcagctaagagacatggagaacaagtggagagtgagagaggtgatgaagaaagaggtggacatgaaggacgcagagaaggcggatgggacagcacaggcgagaaagaggaaggggatcaaacggaagactgaggaaagctattagcttaacggcgttacatgaaggacagggccggaggcagtaggaccagaccttatctacacctcttcaagtgcagcgtctcgatgggatacagtttcaacagagacctcccgcactgtgtttcaagtctatgcttggtacacggaccgacaagtacctggaggagtgtacgcagtatgaagcactaaattgcaactcctcagacgtctgtgtccatgcacatacgtgtctagatgtgtgtgtgtatgctcgcgggcgactggcagacttctcaggagcttacctggactacagttaagggcttgaatcgctgctttatcttggccctcgaccagtatgctcatgtccgaaatgagaacgtgtcgatcttcctgtttgggtcgccttccctgcatgaagcgtgcgtccatccgaacttgaagcgaagacgcctcgggccgagatctcttcgttctgtctccccctccacttgacagcggagcaccgcaggcgtagcaatcagtctgggtgtgtggccttgagatggacacagaaccagaaaaagagcaggcaccagaagaagccggaggggaagagcagtcagaacaagaggacagcgacaagggagcagaagaggcgccttcaggaggcggcagactgtcggtggcggtctcatgcgccattttttctcccacacggacaataacggaaagggagagtctgaaaagatatgtctttcttccgccaagccgaaggtttcgcggacaaaacggggaaggtcaagttggaaacaggttgcaggtatccctgtggaattgcggaatggcatatcacgagagaggcatgacaagagaccgagaaacgtgggtgttatatggaggaagggaggccatacactccccggtcctgtgtcctttgtgatgatgagcgcctgagaaccgcaggacgcatgacacatataaatccacactgagggtgtgaagaacgcgcgcccgacagagaataaaacaagtcgacgttctcgcctgatccttcttgctctccgacgtctcgatgtattctgtcgcccgatatctctttgtttctccgtgtgtcctcccctttcgtggaggcgagacagttttacgtgagagcagacggttagcggggcggggtagaacgcagagaagaaaagccttttcgatcgcgcctaaagacgcgtagacttcacaaaaaagagtgacggataacgagataggagtgaagtagaggtaacacacagcccgccagcatacaaaaaaaagagacttgagagtcgtcgatcctcggtgcccaagaaacggaccgacccaccgggcgctggtgtagacagatctcgcgacacggaactgagatagagggaagacaactgagacggggaaaacgaacgttttccagggactcaccagaatttcacatgcttgccacatgtaaattcttcctcctggagaaaaataaggagatagaagaacagcataaccagaggaaggtgtccatgatactaatgcctctgcgatgggaccttgaggggagatgccacacccggtgcccgggtggtgtgcgcaagatacgaaaggaagaacaactctgcaaatcgccttaccttgtgggtatcttagtgtgtcacgaatcactcactggttttctgtctttcagtctgctctctgctaatcttacagtgacaggaaaccctgaaacaggaaaaagggagtacggcggcggtgaaaggaaagaagatgtacaatca

SEQ ID NO: 2024 - DNA, 3374 bp, Toxoplasma gondii
  source 1..3374: mol_type = genomic DNA
tctcctgtctccacagaaaagccaggagacaaagaagaaggagaagaggaagaggattcaggaggagaccaagacgaagaagagcagtgagaagatcgagaggaagacgcatgtactggcgcagaaggatgaggacgaaacgcatgttgacggtgagcgtgaagagaccggaggagagcctcgcgtcgggcgtcgaggcgctcgaggcctgaggtgtcattacacccgaggtcgagaggacacactttcccgtcttcgcctacctctctcacaacaaaatcttcgcttctgtagcgaatgacgccttccagtttggagggcctttctgacacgaacgctcccgctcctatctctgtctccgtgtacagttcttcatcttctcccggggagaagcgagaagaagcgaaagcagaagaaggaagagacggggggagacgagaagatggaggcggagacaacaaagaggaagaaggggaaagtggctgggaagagagagactctgtggcgattgcaggaggcgcacaggcttgctcatcgaagagcctcgggactccttccccatctgcgacttctggaagaagagtgcgaggcgcttgaactccgcgaagctgcagaacgggaggctctcgccaggccgcaaaggcgttggaggagaacgcagagcgagagaaccgggcattgggagagcgagaaaaagggaagaaacgcgcaagagtcggcatcgaaaaacgcgaagaagacccgcgacggaaagagtccgaaaaggaagagaaagaagaagaggatacagtggaaaaagaagaagaagaggataaagtggaaaaagaagaagtggaaaaagaagaagaggagtaggggagagaaggctggcagcagggatctgtagtggaagagtgtgttttgcggttattcctgtttcgcatgtatctgaaacgaacaaaagaaaaaggtgacctttccggcgagagaaagttggaacatttctgactttttttgtcatcgaagcgagagaagccgagacaggactgctgcggtgtctctgccgccgcaggactagagccacgaggggcacggaggagaaacaaaggcctcatttcgtccgcggaaaatgcgtcccgccagtcgacaagaaaaggaagagaaaaagatgcagtcgaaaaaagaggatttggaaggcgcgagcggaggagaccgaagagaagatgcaaacgcggacacagagagtccacccgttgagtgtctggacactggattcctccccagacagacagaggatctggagaggcagtttttccagtgaaaaaaaaagtttctggagaggaagagaagagagatggcagacaaggtatccataaaaaagcaagtgtaaagagaccgcagagttgtacgcaaaggcgcgcagtgccgcgcagaacgctctttccctgctcgagtgtctccatacgaaaagagggcttccgcaaaatctgcaaatgagttgtgaagacaagaagagtctctacagttttccatgatgaggagactttccggagctcttcgtcttggtagtgacgggcgtcatgaggcatctccttccaggaaaccagaagacaaagggcaaggaaatctgtagtcaaaggcaatgcacagactcgaaagccacacaggcacgttacgatatatatatatatatatatatatatatatataatatgtatataaggaaaaagctagatgtatgagcatatatatagaacgatttttatttatatatcttggtatatctatctatatgtgcattcatatatatttatatgtgcgtagatgcatgtgtgtttgtacgtgggtgtaggaagagagagaggaaaatatagagagctttgaacgcgtcgagtgacaggtagcgctgaacaggtcccagttgtcttcttcaaacggcgcagtctcgaaagcaacgagggattttttaacgagttccaggcacacataccagtaatcagaggcaaacctgcgttttgtttgtcagagaaggatcctgtggcgtccttactctggaggttgaatatggaagaggaacaaagagaacatcgaagcgcctctctattggaggcgtccttttcggaaatatgaacgcggcgcgaaaaaaacgaaaaccaattcgtccgtgtccaccatcacatcgctatacacatctgtgtcgttgtatgtatttcgtatggtttacttcgagactgtctgcgttctttaggttggagttctcctgggcatttcgtgattaccgtgtcaggtgctgcaaatatcagaatcgctacgtcccctccgtatctttgagaatcgcctgcaagcatctcaagatacatctaccttcgttttggcgagactctctgtgcgtctactgcatgcgtaggtgtgaatgaatggtcgctttgtgtgtgaaacgctcgagtgtatcagaaaggtttcgcatctctgaaagcgtttgtcttggttgtctgactgctctcgattttgtcggattctgaaaaagagaatctcctcgtgcggataaatcctcctctcggcctttgcgtttgccaccctccgccaggcacacaacttcgatctctctgaactggggaatagagacaaggaggcacatttctctatccgtgtattcatataaacacccgcatttctctgtccatgtctgaaaaatgacatgttttccatctacaattatgcatgagcctacacttctgccttgatgtagacaaacatagatttatccttccctttaaatagacgcagatttgctcatttacttatgcggggccaggcaactttttccacatgtgttttggatagttgtcaggagctgaaaactgacacagacaggaaagacagggacttccttttgacactgacagagcgagaccattgttcacgagtgactccgtggcgctcgacttctcgtctttttcaagcgaaaaacagtggagaagcaaggagtggcttttcggccgttcttcccatcgctcgacatctacgtggaaggcgaccttggcgacttggaggagttgtgcgaatatgcttgacgtaaagtggctctttgcgtgcccttttttcgcgagtcttgtgcctgggatatcctcgtcaaaaacttttgtaggtggaaatcgctctcgtgtgtaccggtggttttttatcggacggcaaaaggccgcatgttatgcttgtttctgcgagagtttggcgcgtcttaaatctacaacctgatctgcgattgcctgcgttaaacgcgttgcgtcaccagagcggtcggcgtttgtcttctcagtgtacttgcagcttctagtttcgcgtgctcaaagtctgcattctttgccccttgcgcaaagatttcaaggaagcgaaaa

SEQ ID NO: 2025 - DNA, 2125 bp, Toxoplasma gondii
  source 1..2125: mol_type = genomic DNA
acggtgttgacacaggatttagctagcgagcgatggtggaccgtcccggggaaaacacgtacggtcggttccgcatgtcgagagtccgtctgttctttttgagaattgggccatcatctttcatttaaaactgtgtaaggaagcacaaaaagcacagaactactccgcgcaggcgcacaaaaccgtcaggatgtgccaccggatgcggaacagagaaaaggggagaaaaagagacgacgaagacacatgctttggcccttttgagagcttcagggagcatacctgttgaacggcgaactggcgtcgaactttgtccgctttgacaagccgtctaaggagatggatcagccaaagaagaagcaggatgccggcaaggacgcagagagtgttgtgcaagcctggtgagatttccgaggccgctagcagagagcgatgcgacacaacaggcgccctgacgctgtcgtgccatatcggttctcttcgcttcccttcgtcgaccaaagagaaagaagaaagtagtgaggctgagaaagccgcgtctgccatcttggagaccacacgcgacggaagaagacggagtggacctgtacttatttcctgttctttccagcaattatcgttttccctgaatctcatgcagttcccttctccaacgacgcctttttcttctccttcttcctttctgccatccgcccaacctctctcgccgcccctcctacttcttcctctgccctgacgtgtgacttcctccttgatttgtctgttggaagcaaggaccgaagcgggagagacgaaaaggagatccacaactttacgagacaggaaaggaaatcgaaaacagaggggaaatgtctttttctttcggctttttagtcaacttccgcacgcgtccaaccggacaaagagagacgatgaaaaccggcgacgaggaagaggcacgaccggactcaagacggcgcaggaggcagccatatgcagagataagcgttttttctcaagagtgcatgaaaaacggtggaaagctggagaaaaggagacgagcaagtaaacttaactctgcagcagccaacgaagtcgtgtctcgccggattcccttctcgccgttgcttgggagacggcctgctgaccgcaggagagaagggaagaagtcttcctcctcagaaattcattttgattttcatcaaccgctagagagagaaaattcaacagtttcccgtctacaggctctggaccattcccgatctctatgctcttcgcccagcgacgattttttttcgcgcatgcagagggccagaggtacagcttcgcgacgggacagggcaattgatctttttcggaaacgaaggtgatttcaaccatatttcaaacgcgaaagggagaaactgaaatgcatctcggtttcttcccggtatctcttttgaaccataatccctttctggaagaaaacattcctccaggaaaagctgagtgtgctggcttgcaagctgactgacgatgaatttgcctatctttgtgatgagtgatttttgttctcttcatatcgccgttttgaagagctgcagaggaggtagagctgagatcttggtttaggcgatccacacgatgtctcagccaccgcgtagagagcacattggaagctggcggccggaacatgagttcaggtgcagcgttcatagactggggagaagcttttgcccgttttgttaggtttctgcagcgcttgaacccggtcatttccacctctgaagaaaatgcgagattgatatactgtagatacagatgcaaatagacagaagctaactcaaaaagatgtaatgctatcaaagtgtagcaggccctaggttgttctctttcctatatcccaagttctcctaagatcagtcagaaacgtttctatggggctgtgcacgaactataaacgctaaaagattttcaaaggcgaggaggctgcgggagctacgtagacgcccgagagaaaattttcattcacaggcttctggtcgctgtgcaggcaatttgaatcacagcggggcctctgcttcagatgcgagggcacaggctctgaggaagagaacctaggctccgccgcaaaaccgaaaaagtttatcgaaaacgagaatgacaa

SEQ ID NO: 2026 - DNA, 2608 bp, Toxoplasma gondii
  source 1..2608: mol_type = genomic DNA
caagttggacttcttttgcgtctgcgaatgcgctgttctcgcgttctgtctctccgtcctccgcctgcccggcgtcaagggcgatttcccgggaggcgcaggcgggcaggattctgtcgactttgttgatgacgatcaggagcggcagatcgaactcgtctgcgaggcgcaacacttcgtctgtctgcaggcgctggccttccgtgacgtccacgacgatgcatgcaaggtcggcgcatgcactcgcgcgtccgcgcatcgccgcgaacgtcgcgtgaccaggagtgtcaatgaacgtcagctgcgcccatggctctcccgcttccgaagaggaagacgcaggtggagaggaggaagaaggggatgcgcgaggggtacgagatatcgccggtgggattcggacagttactgcagaaaggttttgagtaattccaccggcctcgaagggcgcaacgagagtgcctgcgagtcgatcgagcagcgttgtctttccgtggttgatgtgacccagaagaacgacaactttcgtagaaggcagcgggctgggaaccgaaggagcagaagaggaagacgagacagaagaagacgagacagaagaagaggaggcagaagaagacgagacagaagaagaggagggagaagaagaggagacagaagaggaagaagaaaaagtagaaggagaccagtctggttcagggtcgacaagaacggggtgcaggccaaagagcttgcatgcatgggcagccgaagcgaaggggacgagaactttgcttttgttcacgcactcaaattgtcgttcgcccgtctcgtctcgccacaggtaccggtggggctcgggtgtacgtacaccgcacgttcggaggcaggtcgcatagtcgacgcggaagaagacacggagttcctgtgaggaaggcagcgagatgcgaagcagagagtgaggaaaaagacgcggcgaagcggagaagacgaaagaccgcctgaagaacagaagcaggccttccccgcctctgcagaagagaatggcgaaggacaagaccgaggagcgaaagcgaagcaaggagagaagaacgaggagagaaagaaggcaacggaatggcgaggaagagacagcagggaggtaaacagagagggaagagagctacggcgagcgaagctgtgaggcgctgagacaccgaccgagacgagagaggtgtgtctgggagcggagagcgtgaagagaagggcaaagagagtcacgagttccttcgcgtcaaactcgcaattgatttctccggtttcttcgtcctttaacttaccttcggtgccacgtagggcggaagaagaaccgtctttgttcgctgtctcctccccactagaagagtctctttcatgcgcgccctgccgacgggtctgtggcgccgaacactccagcgaggagaagagagaaggaaaaacggagacaagaaagaacaaacgccacccgagaaagaactcgagaagggagacgaaagcagcgtagacgccctcatccttcccctctcgtgctccccagacttcttcttctctctctgttcttcgtcctttcttcttctctctctgctcttcgtcctttctacttctctctctgttcttcgtcctttcttcttctctctgctcctcttctttgcttgccctctctggtcgggccccttcttgtactctgtgcgctcttctctcgggggctgcttctgcttgttttttcaccggcgcagaagttttccctaggaagaaaaggacgttgtgaaaacggttgcatgcacgcggcagaaacaacgaaaaaatcaggcgtccgcgctctgcccggcgaggacagagcgtcttggcccgactcccttcaggctgaaaaactgtcattcaaaagcatcacaagacgcactggcgagggagagtgtctctcctgtgttgcgcgccgcgagaccctacacggttggctaggagagacatgcgagagacagctgtctctccccttccggaaacagcacacccccggactcttgtctttctcgttttttgccgaacggcgaaactcgcctcagaagaatccacatttcccgctgccttcctcgccgtctctctgcctccggtggagtcgattctctccactggacctgttttcgcggagatcacatttcggtgtcttgctgctggtcacactcctgtctgccctcttttgccgagagtcttctctccctttccgccgctttcttttttcttctttcctctttttctcgtctttttcgtctctttcgtctcttcctctccgccttcttccccctccttcccggcggcagccttttcgcgggcccggaggaacagcgccggtcgtcttctcctctgctgccctgacgccttttccgcctcgactttgcttccgtcgttcccgatcaccaggtgacttgcggcttctccagaagcgcaggagactcgccgcatgctcgtgcgagggaggaccgccgcagctgtctcgcaggatgatggagactgcggcctgagtgtatccgtccccagactacggcgcttccatcctccagtgaagacactcttcgcctgctgcatgcgcgcaactcacgagtgctccagtcgagcaaga

SEQ ID NO: 2027 - DNA, 996 bp, Toxoplasma gondii
  source 1..996: mol_type = genomic DNA
gttaacgacgcgtgggaattgttaccggcacaagtacgttatgtatgagcatgcagcgcttcgctgacaccaccggataggtcggcttgcatgtagatgtggagaggtgcattgcagggcgttggagggtaccttggaagtagcgcgcacagacgaggcaggcgtagacatgttggttggagagacagatgcagcagactttctcgaagtcaaagtcgagaaggtgtcgcttgattgtgcccaggtacgggcaggtgcggcgcagctgtttcgtctgcggtgcagagactgcggcggcggagggggaaggcgcaggcgtgcgtttctttgcagctcccgccgcctctgcaagggaactgccttcctgcagagatgccctcttctgcggtcccgcaggagactccgaagatgcagggctgtctgccatagagtctcgcgtgggcgggggagaagccgtggacggagacgtcatcatggtaggaagttgggaggagacgcgccttcgaacgcgtggagagagccagctaaacaagggagaaacagtcacgaagaagcggatttcattggccctgttctgcccggtgtccacaaagtcttttaatagtcggcatcaaagaagaacgccagtactccaacaagcctctacacagcagtcggggcgacgaggagagcaggcgcagagcagcagtgtgcgagagctgctttgaagaagactaagactgggagggaagaaaggcaagacagtccacgaggtaacctgccgatcggaaggcctttccgcgacgaaagagatcgaaatgccttttctcagagcgaggcgcgggctacacgcgagggagagtgactcagaggtgcgcgcgccgcgtgccaaggcagtgcgtggtgtctggcccagtccttcttgggttgacagaacgggggactgtcgttggagagcgcgggaaacgaggacaaaattccggcggcgagcgtcgtttctggactcacgagtccaca

SEQ ID NO: 2028 - DNA, 924 bp, Toxoplasma gondii
  source 1..924: mol_type = genomic DNA
gaagtgctcgtgatcggcttgttcgctcgttcccaggaactttcaacggcgtcttacagtgaatggaaacccaaagcagagagttttttcgaaatatcgcaacatgcttcaaacagtaagttgagtgagtctgaaaccttgcagtttagcaggacaggctggcacaagcggtggattcgttgctgctttgtttgaggtttcggggatatccactttcgtggcgcaactgtcttctaaacagcgcaagtcttacgtggagaaaccgctgactgtcggcgtttttggtgaagagattgagggattgtttctcttaggaaacggcttgtgtcagaaccgtatcgaaacgctcgaaatggcagcacattcgtgaaaacatgaaacagctgcgctgtacgtacacttggcaaccgtttcactggaaagccagcagtgttcacatcgtgtaatcatttggtttgtcagtcactttctgctcgtgtaacgcgtgcctcggcggtttctcgaaactctcaaagtctcaacctgaatatcggtgtagaaaaacattctgggaaaagagggactcttttgtaactgtgtctgaaaagatatagtgtggcaacaagcgcacgacaaccctaaaaagatatggcgtcgcctggttgcctgagagtcgtaccttgcagtggccacagagcaggtaccgtgtgtgagttcgtcacttcccgtttctgcgatggacgctggacaccacagcagaccgcatgaagcccgctataagaaaagaaagagaacgagcaaagaccctgcaggcgtgtgccctcgagtacggaaaagacagatgctacagaagattgatctgagcacgagtgttgcggagagcttgtaaagttattgtcgcgataaacatggtggaaacaacaggaagaaaaatcccggcttcca

SEQ ID NO: 2029 - DNA, 1724 bp, Toxoplasma gondii
  source 1..1724: mol_type = genomic DNA
tctgcagtttccgctgtctgttctcttggctctcttttcggacgcaccggcgcctgcagcgctgccccaggcgttgacgactttttcgattttcacgggcggtggggcctttttttcgccttcgtcgtcgagggacgctgcggaaggcgagatcgagagcgtgagtccgtcggcgagaacaaggacttccggccgagtggcgtctctcttctctcccacaagcgcctcgtccaggcctgcgagcgtcgcgcgcgacttcgcgactgcctgcgtcgacagcggcgaagccgaaagcgccatcgagacggagcgagacggaaaaaaggctcaagggaggaggagaagaagaacggagtggaagggagacagacggggaggaagagggggaggaagacggggaggaagacgggagagagaagagaagaaaagaaggaagtggagagagtagcggaagggagaaggagagaagagaggagagaagagaggcgtttttataggtgtttaggaaggaagaaagaggggaaatgtggaagggaggacgagtaaacgggagaaacgggagagaacagagggacacgcggagagccgagagaacaggtacgagggcagaccgacaggaaaacaaagtgaaggaagggagtgttcacggagaatatgcaggccgcgcatgaaagaagggagagaatccgagagagagagagcctcgcggcgcaaacgcagttccggagaaagcagcagagcaagaagacgacttcgcctccccaacacagcgaaatgaggtgtatgtacacctcgttcgcgtgtctggacagtcgagactcctcgggatgaggtgtatgtacaccagagttgtctgcaacaggcgcttctatctttgtcgtctcggcaggcgcgccgtgagaagccggagaagagggaggtggagacacagccagtctcttctcctgagtaactcgaaatgccgtgaaggcaagtttttttgcagacaatttacacttcagacagagtcacgtcgcatccgctgtcggctattttgtcgctcgtgacgcatgctcgcctctcgcacgcgtccagttcttttcttcgcatgcattttccttttttctccccgctctctggcttgttctgctgttcacctgtcgcgttcttctccttctctctcgctcctctttctctcgattcttctgcccgttttttcgccttctcttctccccgttctcgctgcgagttccccccacaacgagggaagtaggtctgcctctcctggaggcggctgcagttcgttcggtcgcacaagggcggaggcatccggacagaaaagcgaggccagaaattcagccgatcgaagttcttcaagttcttgagaagctgtgccttctcgtcgcagcgtgttgttctcctctctccactcttagagtgaaaacttcttctcttcacggcctcctccttcgccttctcctcccttctcccatcggcctcccttccccttttctctttttctttacgcagaaacgcgagagtggagtctcttcttcactctcctcagcggtgtctctgcctggtttgtgcgtgtaccgcggcctcgacggcgcgtcgccagggcgcgattttctctactcctctctttctctttctccctctctccgacttcttctctcccgctttgcctccacctcagcgacgcttgcctttcgctaccgtgcgttttcttccacacttcgcaa

SEQ ID NO: 2030 - DNA, 4939 bp, Toxoplasma gondii
  source 1..4939: mol_type = genomic DNA
cttctagtgccaggtgtgctggatgttaaaccggattttcgttgttccgatggcaggttgtgtgcgggggggaccttttgtgtcagtgcaggcatcctcttgcgggcgatcacatttcgtgtgacactgcttgtgtggggatatcgtgcaacagcatgaccagtctgtgctcgaaaaacacgttcagcggcgggggttaagctaaacgcccctgtcgggggttcaggtacctcgacagccgttgtcgcagtcgtccggcggccattctcagaagagaggagggatacccaagggacgtcgccacgaaccgccattatacccaaacgtggtcaccatgctgacgctgtcgcatgaaggcactcccgcttctgctgccagctctcacgacgcagtgataaagtgagacctcgtccaaactaacgggcagaaatgcggctcccgcgggagagtccattgtactgaaaaggaaccaagtacaaccttccaggttaatcagacaagtactgcctccagaaagcgtctttgtcttcaataaaccaaaaaagcacaaccacgcgaggttccggcgtaaaaggtggggggagctgatcgtgcagtgggacggtggaaaccgcagtgcaacggatgcagaggatttccaccttttcccaaaacgagcatgagacagactacacaaacaaataaacggtataagagctcgtggaccggtggcatgaggtatcgggaagtcaagacatctcatattacaacagggtcattgaggcaaaacctgacgtgtaacactgttgccttgcgcatgaccggtctggacggtcccctgctcctacagggtcaaaccaatgcggaggacggtccccctgatttcctctcaacacgaaatatgatcgagcagacgacacatacgataaaaatccagggcctcccggagagggaggctgagcagtatctctgtctatttttagcgaacatcgatcccgtcgatacataagaaaagtcggtgggcaacaggcgacccggtgaggggggccaccgtgcagcgattgcgggcctgacagcagcgcccaagtggaaccaggccgcgcctggttgtgtacattcgcaaaagccagtcagtcaatggctgtcgtataagccgttggatggcagtgtgacagagccttcctgcaccggacagttaataaatagtgtcacattgtcccgtgcatgcgcccaccagcgcaggcaccggactgcagcttcaaatttagctgacggagactcctgggaagctaaaaaaaagtatgtgccgttatgatccgacgtgggactctatggtttgccgcgtagaatgacggttcttcgtgaggccacttacatgatgaacaggaggtaatggagagccagccttacgtactcattcagagggatggggggaaggagagaacatccagttgtatagtctaccgttcctgttgatgctgcgctagtcatttccgttttccgtccgagttaccgcacgaataaagtgagttcttttatgtagaagagctacggaggccgagcacgagggtacactgcgtcgcattattggagccacactacgaaaacatgcagtggagggctaccacatgcaagtccatcactttagttcctttttctcgtttcggcagagctgcgttgttcgttgctagtcagtgcacgggtaggctgcacaagtgctgtcacaatactggtaaaacgcacctcactagaacgaactggcctttccgcttttgttcgtcctgttcgcgcagtgtgagcttacttgagctccatcacgtagcgtgaaagaactgaagacgtctcaatggtaacgcagtcgtccacctaatgtatgcatcacggattctgttcgaatcgagctttttctctggcgctaacgtggatttcccgtgcgcaagtgtttccatggacctgcactgcatcttgcggcctactcaatcaaagatcgtatggtaagacgcatacatggccgtgccttggcttgacattgacctaaatgagcgatttcggaggtggggttaggagctctgcgtcaacagtcaactggacgcgcttgatttgccagcttacctggaatggacaagagttcacctacaggaaatggagacagagaagagaggcggcatatgctgttctgcggatgacgttacacaactctaaccactctataagggatatgtcgtaccacgagtgcaacggaatggacgaccatagcaaattcgaagcgtggtgtgcttccaacggcctcacctcgtgacactggttcacgttgacaccggaaagtctgtggatgccgtggtgagaataaaagtgtttcgccgcattttcatctgatagctcttgactccgtccaatgaagtagtctgctagatgtgcgggtagacctccgacagcatttttgggatggataagaaacaccgtgttaccctacttcatgtgtgactcaggagtgtcacaaaaggtggcagtgaactgtggtgcggtttttgagtgtgtcaagtaacgacttgtcttctggttgcctgaaggtgtacgaaggggttcgcagtcgtgtgctgcaagtcaaaaatcacgcggggggcgagtggttcgttgacaatactgtcgtgacctgaatggcatcaccctaaaatatgtgaaggggtgcacacttgagctacaaaccagtctgctggaacacatgttttggtgctcgccggagtgaacggaaactactgaatcgacgacgaaatgtcgatggggggctgttcatcgagcactacgagttcgtcatttgaaacgcaccactttctgactcgtccacccgcgagacaaaggattgtccacacagaaacagtatatgtcgtcagattgccacgagtacgaaccagaaattgctgttttaaaggcatcacgagtgtaaggcgagatgcctacatctagcacacagctcctcctctgctcattctgccaggaacagcacaaggtcgtaacaagcaccctcagtatccgtttaaagacatactgctcaactcggcgttgagagaatggaagtacagagaacacaggcaagcgtttccgcatgatggcagtcccgccgttgcggggaaatcagtggcgaaatatcgaggcggagtgctggctagcgtttgttttggaacagcaacatcgaaccgttttgggtgcatacgcttttatgggatcttgtgcaaaaggaaaggactactatgcgtgttggattttccatcttttatgttagtcgtagcatgcaaaaatcaaattcttcactttgcgttcttcggctctgtgtacactgtctgtggcgacacggttaccttaaagaagttttgacaagtgacaacagtgataaagagctggggtgccttttttccggtatcaaatagatacagctagtccagatcggttacgaagggctattagatacccttggttgcgggttctgaatcatagcacagacaactctagcggggcatccagacgggatttcccaaacgcgtaacgtctgcttcagaaaaggaggcgcatttatgcaacgacgtgacgtgaggggcaccaaacaggaggccccttgacgggaacgcgaagtcaagttgaggccgattctagtgcctgcggtttttctgaactgacgcacctgtccattcccctgtacgcagcttccagcttattctccgatactgccggaaacaaacgagttgttcggtaagcctgctgcggggataaaatattgtgtgctcaacgacgatgtcgggagaactgcggcttctactctaacggacctgccgcagtgttagagacattgtgttacgtaagcagcgttcaatatacttctacagtcgttgtctaaggaagtctctccgtcactgatagtcttatgattcgtttttgtggagtgcattgcacccatggttgccaaatgtctacatctcaccggtaccgatactgtgcgacgaccgggcgatttctgactacctgttgcacactttccgcatctactgtgtacaactatcttcctagagggctgttaggcgagccatcttcggagtctttttctactgtgagttcaggcgagaaggtgaagaaaaagggactcaaagacgataatggcaatacctcccacagaaggggaccttgcgtcacaaccgggaaatcaacggcaggtacctgaactttatggacccaactgccaaccggcatgcaatcattactggtggtatttttagcagaacgttgcggccaaatgttcttcagtttggcggctcgaagtgtgtccatgtggttgctgataatcagcatttccaagtcctgttcccgtcaacggggtgtcttagctagtacgtgttacatacgctgggtaccgtattggctgatgtgaatgctgcgcctcattagtaaatttacgcccatcttttcccgctgcttcgaacatatttggactgcgaaaaatgtggtttgaatgccgttggacgccctgggacaggtgacacgaactctcgtcatggttggctgacacgtcccgagtataagacgaggcttcacggctgctcccgcgcgacttgaagggaaaacagtcgcaagacaagatctcaagcagcttgactaggccgacgcgccgcctcttgcgttactgtttgttgtcgctcttgagcacgttttggcattctcagttttcccccgtcctccgtcctacttttctgatcatcttgactgtaattgaagcctggggacattccatcgcggcgccacattctggtttcttgtcaacactgtggctcccatattttctaagcctcggcgtctcgtcgacagcagtcgctgcgtaaaagtgtggtctgccggcaacgccaggcttgtttcagctctcctacaacttctttgcgtggcgcctcgatccactcgacacacgtcgacaaagaga

SEQ ID NO: 2031 - DNA, 2676 bp, Toxoplasma gondii
  source 1..2676: mol_type = genomic DNA
atgtcgaccctcgtgcgaacgagcaacgaaccgagttcacgttccctgcctccccactgaccacgaggactccctcgccttctgcgctctccccagtgtctctgcagctgcctagtgcagcagggggacagccaggacgcgccggcaaagacgcatcggcagaccgcgccctgacccagctgctcctctcgccagcgccagctgtaggtccttctcgattcgccggagccgccccgcaagactcagaaaggagagacgcggaagaaggccagggcggagcgctctggcctcgagagtagctcgaagagagacgcgacgagctagctctctcgagttcttcgcggatgagttgctggttccccaggtgtaaaagacgcagatgctcctccagggaggcaggagaggcagaggagacgccgggagctgcggagacacccgcggaggtggcgggcacacagggtggcgagaggaaggccgatgcgcacagagagaaagccggagaggagacagagggtggagggggaaaggaggagaagaacggggacggaggaacccctgcaggcgtcttctgaaaaggaatctccgctccgaagcacgagactgcggtcgacggccgggtcgagtccgcctcggaaggacaagaggagaagagacgaggcagaccgtacatcgggagagttgaacaggaaacacgaaaggccgcggaaaagaatttgtgtcgcggaggcccttaccacaaccgctgcccaagctgccctccgggtagaggtgcaccgagatggagaacgagagcagacgaagagagacaaaaagagggagctccaggcaaggagaggaaaacggggttgtccgacgcagaacgcgaaggagaggagtcacacgagcaattcggcaggacgagaaagggaggtggagagcaagaagaccaaacagacggagagtagaggacgaaaaggggagatatggaagccgtgatggtggagactgagactgtggctgccggcacacggccgccgtcgatgcaccgggtgtctggggaccggggtgagacaagggaagggtgtatctacacttgagcgggcgccagcagtgcggacgagagaaggcgcagactcgagacgcgcaagcgacgattcagtcgcgttctgttcaatatcaaatgcgtcgagcgcatgcagaggaagaacgcgttgccgcgagaggtatgtgcgtccgtctgggccgccgctcctgcgcggagggcaaggagtcttcgagtgtgtctcttcttaaacggagagaatcacagaaatccggagaaacacaaagggaggcaacacgaaaatggcacacagaggaaactcgcgagaaagcagactggtgcgcgcacacaggtattgtgcatacacctggcgatgtgtggcaaggcaaaaggagcgagcgatgagctctggtggtccacgtaattcacaatatccggtggcaaaacttgtcaatcgctacgagaaggaaaaaagcatcttccccaaccgaacccaggaaaataagacaataaaaacgcatgataagacctctcctcgcaaattcctctcccgcgcttgcggaaccctccccccggacacacactagcgatctctctctttgggtgtatatacacccgggaggcgcggcgagctgcgtgaggccgagccgctattctaggctatttgaccgagaaaaaagctgctgatgcccctcagaatctcccgcgtttctgccttctctcatgttccctgtttcctttcgagcaggccatattcgacacagactgtgacagggaaacagtctcgccgcctctccttccaggtttttccgcgtgcgctgtgtgtcgtcctgtcgccccgcggccgacaacggctggtgcatgcaaagcacactgacactgtcaaggatttttccggcggcgagaaaggcgcacttcttctggggaggcgaaaggactttcagtttgtaagtgaatgagaaggcgaggtcgagtccgttgttcccgtgtctgttcgctgcatctgtctcccaggtttctcgagcagtgccatccctggcaactctgagctctgtgtctttcggattccaggcgtgcattgttgtctatgaactttcgtcttttcttctgtttcctcccctcttccttttcgtggtaaattaaggcaacctcttcagagacacaatcacgaggacctctctgctgcttggaccccagttcttcgttgagacttgtcgacctccggctctctattccagcacacgtcgtactctgtctgtttttccccagagctatccaccgtgcgactatctctaaagagagaggtaggcccgcatgcagggccatttcttgcggctccatgtttttgtgtcggtgtacaaggcggtccacgtcgctcggtctgtagcatcggttcctctgcagagcgaaagcgagtgtcgagacacgggaaacaaggcgtgagaacggcgagaaggctagcattgcggcagaagcgtgttgcggttttttttgtggattttgaagagacctccagagaacctgcagagagcacacgcgtcgcccacgtctgtcgcgggtcgtcgaccagaagaagggtgactcagggaagcggatctcgggtggcaacagaaaaagaggaggcgagagcgaaggagatttccagtttgacagca

SEQ ID NO: 2032 - DNA, 4326 bp, Toxoplasma gondii
  source 1..4326: mol_type = genomic DNA
gacgcactgggcgtggtacctgcaacaccgttggctactgcaactatgaggtggacaaacttcacatggcaaccaatcgcggaccgctactcattcgttccttcctcttggctttaaagatatgtttcggttctttcccgtctctagctccgagcaagcgatggagcgaagagtgtgggcgacacctgacaccgagtcagcttctgtgattgactccctgagggtgttcctttgctctctggaggtgaccgacgtccaggaccggacgtgaacatggtcgatcgagtgcggtatagatttctttcttcacttttgggggcacagtttgaacgtgggtcagcccctgtagctcccaaccccggcggaggtgcagggattctgtcgcttccattaaaaaatccaaataccctgcaaaaagttgttctctagcgggcgggatgagtttacacgctgtaatcaggctgcggtttgtagggaaaaccgttctgaaaagggtttttgtgctttagactcttccccgtcacgctgacatcacaggttgtagttgttcaggctaccgtagaaggcgagccgcagcgttctttcggcgtgcttctcgcatgtcaaaaaagacgagttccccagctattcatcgtcgtagtcctcagcgtagagcaggatatgttttttacatggtaaaggctttccttttcggcgagcgtcgagccagtaccatgagacgccctgcatggctgcatgaggatctcgttagacgcttatcaaatgggaaaaactgagacaaatcacaaatggtttgttttgtccacgcgcagggctactccctgctgaccgagaagatctggaatcgaagcaatcaatgggagccaccgtaaattctttagcggacaaaaaacatgagaagagtgacctcgctgttgctgcttgtaatttgggagtggaagggcgcgaatcatggtaccaagacttgggaccctggtatgatgtgtttgaccctcggaaccaaacactgtcacgcgagggcagaactgctagtgcagtggtgcagaatgaggcatatgccacttaaaatttagacagcgcaagaggcagtcgtgcaaaggtcgtccattcacatagcatgtgcgaacgcagaaatgatggcgacggctgtcaaagtcagcgacacctttgtgccggacattgctgcagccccagaactatttggggaaccctcaatcgtcactttaacttgacaagcagacaatgaatgcgtttcgctagagttatccctctcgttagaagactgagcagctttcttttggcacccaaccacaatacttgctgcctcctctgggaaatccgtcggcggaatctggagtgtgtacgcttttgttgcgtcggtttccttccaccatgtttcatgataggtttcgatgatggaagtgtacgccttcagttcgcatgcagtggtgatatccttgtctgtgctaacgcagaagttcttcgtgtacgtgcttgggagaatttgtccttcagtcccgcaaaccagagtgaaactgttctgagaaggactcaaagtgatggtctgagcttctgcgttgctgctcgctccgtaggcgcaagtgaccgtctggtctttctttgcagttgctctcgctgtgactgttacggtcactttgcactggtcggggttccttgtgttttttaagcaaccgacaacgaactttcggtcagtatacgggaaactctccttgggcactgtcagcttcctggtagtagaagtgggtgtggtggttgtgtctttatcccattgtaagccgttttgggagccggcgaaaatatcgctgacattgatgcaagcatcacttccggcggatgttgtacagcactgatcgagactcgtagtgttttccgggcatactttctggccgctcgcgtcgtcgggcgcgcattttaggtccttttcgcaggtcacctgcagcacattcaagtcttccgacatggttgccgaaaggggttttggtgcggtatcttctttgaggcacttgcaggtggttgtacccttgtttgtgtctgcgacacaatctgaaaccgcggttcctgcggaaggcagggctccaccaatggtggaagatggggaatagccatattgcgttgacgtggctgcaaagagtaccataagagtcagtcccatccggaaagtgcgtggccatttccgtggagacatctgtgatatcgtagccgcgctctgggaacccaggcactgcatgcgagagccttgcatcatgttgttacaacgtatcaagtcacagacttaagtcttcgtagactgcgaacaatcaagaatcacaaacttcaagagtaaaacagttcgtacttcgaccacactgtggaagactgggacttttggaaggtctgatccgttgggggtgacgcgctcgggcctccaagacgaggtgcgagcgacaagccatggagaccccggcgtgtgtggagctgcagcaaagggtcccccggagggcctcttctacaactttgtactttctggggatggagacactagtgtcttctggaaaatagagtgacttttgtattagctcacgttgattttgtcatgcttcgagttgccgatgttcgtcttcgaaggtgggaggccaagtcgaactgtactacgagcgggtcactgatacataccttgcggttaaagccgaatccagatcccctcacgcaatatccgttgtcgcaacgaaagtggaagaaatacatcttttttggtagtccagagaatcccctcttaaacttctgaaggttgaaccgcaaacacggagtgactgttgggataataactgctatgcgtggtgtgtgcagtgtggatctacgctacacactgaggcagtgatgcgggtgaaggtttagcttgtcaccacagagaaggatattcatttcgaactgggaagacgtaattctctttggggtgccgctgtgtctcctgaagatcgtacatcgttctatccacgcacagttgaatcccgtctctcttgttgcttcctgctcctcaagcgacacggacaaagcgttatacctgatccagcatgctgccacgcacatgtcgtgcactgtgtcatagaccgaatctgtgttttaccgcttgtcagtgtgtgtgtagagacctgccaagaaaaatgcctgtttgaaagggtgtgccgtgatctcttgatccatctattttctaggatcacacacatcactacagagttagtgaagtctgtaaataaacagtgttcactcgcacgtttcggagagttaactttgttccaacaggaataaatactgagctgcccatgtccgcgaagccatcgccataacagcagagcaggtctgcaagggaagcgcggatgtgcttttgtttggtatggtgtgcagagtgaaaagcactcattaaaatgggttagctctctcctgattgtcacctgcctttattggggacaaagaatgacgcaaaatattgtttgactgttctctgagttctagcaaaaagaggtggaaggcaaggtgctgcattctcattggttctagcgcatgcgctgacagatattcagatctgtcactagataccaatgtctgtcgttctaattgctcaaaataccaagccccaaagggcaggaatactacttctggtctacaacataaaagtgacacgctctcccggtgggtggatgcgcgtgtgtccgaaaatggggggagaaaaggttggtcaggcgttaccgcggcaagtcaggtgtcctattctctcgtaattcccgtcaagccctccctggggttgtgctgaagatggaagccgtagagagcgcgcgaaaaggggaatcgtctgttacctgcgctggcgactaaggaaccccaggctccacagtgtcaggcgtccaaaaactcaactctcattgggggtgaatatcgtgttacttttgttcttccgttactcaggtttttaagcaggtgggggtattcaatagcgcagtggcaacatcgccatgtaatgcggctgagaactccctttggttcctccatcacagcacgcgcttctatacctgccgcttctttgtgaaatgcgaatccacctcgctagtctttgcaggtatgctgtgaaacgttttggcaggaacttcgtttttcgttcaggtattgccacatcttccaatcaggtttatgcctagcaaacgcggagactgcagattgaaaccacgtttctgccgcggcgcaagtgcaacgcgagttctattctgcacttcccctctatgcgcctttctctgcggatttagggatttcatcgatttgcttttctgtgcacga

SEQ ID NO: 2033 - DNA, 2246 bp, Toxoplasma gondii
  source 1..2246: mol_type = genomic DNA
agcatacaatgtgcctaggattctgtgttgttgttgtcgtgcacgatgctgacggggtctttgttgggtgatggccagaggttgcgatgtgacaaaccgctgtttgaggtggtcctggatgcgtcggagtgagcgcagtaggcgccccagttcagcaacatgtcgtgctgtgggagaccgatgagagaattcacggagcctacgcttgtgccgcaggtgaagatagctcctcaacatcggcccttaccgctgttcgtcttgctctgctgaggggactgcagccaaccataccagcaggaccacagatcggaattagcacacctcctggcggcagatcactcggcagcccgcatagctcccccagccctcatagctcccgcagttctgagagctcaagcaggtctgagagctccacgaccgccacttcgtcagacgatcagggttcgggagggcgcgaggagaggacgctagcgggcgcgacggctgtccctgcatctgctagtcccccgggtgcgcggccgcaaacaccccaaccaatgacggaaacgcttttgggtgccgcttcgccggcgatagagctcccgcttggcggcgcaacaccgttaggcctttctggtggctcgtcactgggaacgccgtcgctaggacatccttcaagaggtgcttcgtttccttctagcctgtcgctatttttgcgcggaaggcgaattcccttcagatgcccacggcctgaggcgtcggaacaacccgagttcccgggagattgtaatgactgactggccaataagacggagtacacgcatgctacacagagcactatattactcaacgcggggacacctagtgatacgaatcaaggcgtcccgcggacacggtcccgacgcactgcctgtggttttcgtcattactggaagatttattcgtagtccttgttagtcggtgacgcttcttgaacactggtgggcagcttgctcgctcggtacagtcgatgcgatgctgatggcgttccacactatatttattttgcccttttcccgctgatgtttcccggcagaactgacgagcgcgtcagagtaggggcatccaaggaaagccatacatgcgcatggtttgaaggaaattttgaaggtggcggtagttgaagtggaggcggcaagtcgctgactacgaggggcgggagacactgcacttgggggggacctccagggttgggggacgtgccgagcaaggtagatagaaggagcatgacaagcttgggatgtgttctccattgggtcccgacgagccaatcacgtcgctcgtctcatttggacagacgtcaaaaataccgacccgtctcacaaacgactggctaggtattacccagaggatacaccgttctgtgcatttgtcgatggatcagcagaagcaagccgtgtcgtctgcgcaagccgtgatttttatagggcgacacagtctcagcagttttgttgctcggggtcactcccccggtacactggcgttttcctgcacaaacaacgcgctgttatcgcggtagggaaacgcctggacatggccccttgccgtctgtagtgtctcggcgcgaaccagagaagtgaattcctctctggaagacagagttcttcttatatcgcccagtggtcacagcaaagcacaatcgttttcgtgacttttcatatggtcacctgttcttgtggccgctacacccgtcagacactgggagtgacactgtagatcgcaactgtgacgcatcaacgcagcgccgcggctgacgctcgcaccacccgattcccgtctctgaccccattagtcggtgtgacggtgatcctcaatggccagtcgccaccaaaatccttccttttccaggagacgtagaggagttacagattcgttcctgttgcagtgaggccgtatgtagagatgtcattgtcgggacataatggacgaagcagacgtccagtcttcctgcgtcctggttgaccgttgtcggtgtctcgtgggagttgcgtcacggtatttttccgtggaagctgatgttcggtagcctgggcccgagtccacttctcctcactcagtggacgtctcgtagaaacacaaagaagagccaagaaatactagtaaagggaacggaagagtcatcgcgcagaaagtggcctgttgattgcctccttgctgaattctaccctctgtcacagcaatcagcttttatgttactcttccacctctcctgcaactctgcagcgtca

SEQ ID NO: 2034 - DNA, 1458 bp, Toxoplasma gondii
  source 1..1458: mol_type = genomic DNA
tgttctttgcactcacagtttctttcgcagtagatgcagtactccctttgagcgacgcgtttgcggaggttgctgatgacttgctgcctctgactctcaaccatctgtccgatctccgcgagggtgaaagcgacctcttccccaggacgcagcggaggccgcaccacgcctgcggcgccctgactcccctctgcgggaggcgctcgcgtcgcgcatccctgaactggttcccccagcagcggtcgcgaaggagagaaagaagaagccagcgctgacaaggcaggctgaggagagaagcacgaagatgatgaggacgaaaaagaagcgaacggcgagcacgacggagagctagagaacgagcaacatggagaagaagcggcagaggaaggcacagaagaagaagagagagaagaagaagagagagaagaagaagagagagaagaagaagagagagaagaaggctttggccaccctgcagggtcaggagctgcaacgaaacaggtgaccggagtgactttacgagcggttgagaagcgaacaggggattcgcatccctctggacatgaacacactggaagcccagtatacgcgcagcttctgtgaacagtcatcgtgcttttggaaggtacagagagtcttcaagcggaacagaagttccggcactcgtcgccggaggagacgcggaagagagaggcagagtatgtttgccttctcggcaagaagaattgcgggcatggaaatcgaaaagaaaacgcagaaacagaaactcgaggtgcagagacccgtcgcagcggccgcgaggaagaagaagccttttctgttgcgttggatcgcgaagttcgcgcagatgcgcatgcgcgtgtaagagatgcacgagactgaggagcgccgaaaggaaatcgaaaacaggaagcagacagttgactgcagacacggaggagaagagaatcgaacggcattttgtgattcatatttcgctacggcttaaaaagacacttgcggaactcgacgactttcaggctgcactgaagctttctctatcggtgagcatgcgtgacccaagtgaaggtgccttcgaatataagccgaccccggtgactttgtccttgcgacctttgcgcatgcagcatgtcaaaaagccagaaaccgcctctggtctgtcgcgtggaaatgccaccccacaagaaaggcttcttcgcgcgaggtgaactctgacgtcttctgggtctctttcgccttttcttttatttccccttctccgtttcggtctttctttttttctcctgtgttcctcttccctgtggaaggtctgtctccccggtgcgtctgcgcaaattcgaggacttctctgaatctgtggccgtcctcgttgtcttgggtctctaagaccttctttttcttctctttttgctgtgctgctgtcgcctttcttcttccctagttttcaagtcaccacca

SEQ ID NO: 2035 - DNA, 4565 bp, Toxoplasma gondii
  source 1..4565: mol_type = genomic DNA
cacgagggaggcccatttccctagcctcttggtctcgcacaattgcatgcacgcgcttcgcctgcagttcattcagagccacgtttcggccgtctgcgtcgacgacgacgatgtcctccttgtcctggtgttcgtcagacccctcggagtcgaaaccttcctccagctggtacgcatacgccttgccgttccctgcaactgtagggcgaaggacgcgcccaaactgggcggcgttgaaggctagagagcccccaggacgccttcgagcaggcgccctgacatcgacctcctccgaagcgtcgttgaggcgaaaccccgtttcccggctcccctcggaggccccggggcctttcctcttcttcttccccgatgttccgccgctgtctgacccgcccttcgccatgtacttcttcaagtagtccagtttcgaagcactcgaagaggtcgacgatcccgagtgagtcgacttcttggaagatgaactcattttggggaccaaaagagggggagcaagtgtggagactgacggagaagaaaaacgcttcttggtagtacaatgaagcgctaggagaggagacaccttaactatttgagaaaaatggattacttgaagttatttctgtaggagagaaaaaaaatactggccgatgcggaggtctatatcaacacgaaagatgtgctgtaacgcaagaaacgggcgaactgcttcattgccattttcagttgctatacgggagagtaagtaaacgaaaaccgtttcctaaagcagacggaagccggcaccgctgaggaagtgaacaaatcagaaagaagtattcaccgatgccaccatgtccacggaggcaagacaaacacgtgggggtggagagggcgataaaaatggtgagcaattccctcgaaaaagatcgaggaaaatgacacgccttctgtctcagcaaattcttccgatggaaggtgacgcaaaagggcaatgcatgcgctctcgtgaaaaggaaacaccgcggaagccttccggttaaagtccttctatacaggagggacgacactatctcggagagccccttcaaaagtgaaaccggagaagaaacagagaggctacgcagaggtattcgaaatacagagtcagcgacatagcaaagggtcgaaccatgaacagatttcctgaagtcgagctcgggaacttgtttcagcaaccctcagggctatccgtcaacaccccgaaaccgggaaacagttcggcgctatcgaataggagaggtatccaacaattgccttccaaaggaagaacactggtacgggaaaggccgcgtgcaacattacaagttgtgtcccctgtttctccctggttaaccggcggtggcatcctcgtcgtcctccggggcacaacacaccccaaaacccgcgtgcggttcgcgcaaaagacggagattcagaattatgtgaataagaccagtttagtatccgctgtagacgcaaaagcaaaaacggagcaggaaggggagctttctaatgaaagccgtgtggcaaaaaaaccgactacacatgcgccatcacagaagagtgtgcctctccccttggtgaaactatacgccgacggccacagcttctccacctggagaaacaaaataaaaaacaaaaggccgttttataagacgagttgccagaatgctgacgaatccttgtctgatgcacaagaattgctgatcatgcaggggtcgcctcggttcggatacgtcagaaaaactgcatgcagaccgccacagattcgagcagtcgcaccggttcctgaggtttcgtttcatcctttcacgacttatccaactcaatatcacgacaggttgcttgtgtatccaaatgcatttggattcaaagcactgttctgtgctgtggagagtgcgggtagctcttcatcttagccagacacgagtacctgtcattcccctcaatccaatctgagtaggagattccctactgctctcatacacatattagactcttttgaggagaaacagggaaacaaaagcgcaaagtatctgcctgaatgcgaacacgtgagggggaacctcgatggttcaatagcagtagccgttgacccgtccatgggcacatcgacgagggcggagacccacaaacgctccactatactataacacttgagaactttttcgctactgaaatgagagtgaccaggtccattcaagcatagtaaatgcttgtaatcatgccttgttccaaggtcagaagaaactagccacatggtagctgctacctgacacgcaagtatgactgctcgtcgggcaacattcttcgtgatagaacatgtggagtttgttggcaagaggctgaaatgtggaacgattctgtccttagaaaacgcacaggcaaagtgtttctttcccccatgtcaggcagcgtcaattattgcgaagaccgcgatacgctggtgccaaacggtaaattggtgaatccgtggcccatgtacctactcacgggtgggccacaggtcttccagaattcgtagtgttcacgtgatagtgctcgttctaaaaatgtacaagttaattgcaaatgagtaaacctatgtactaatgttggcctggcgatctttctttctcaagctgccgaaggaactcgagcaagccagttccagtacgccctttctcgaaaacacaggcagtggcatgttttaggttttaaaatctgatcgacaagtcaggggtcttggcaactggcgtagcagcttctggtagattttcgcaggaaacgcttccctatttaatcatactcctgcatgctggcactaatttgccgtgtatcgcaggagtttgggtaacatcactctagtacttcagcaaagagtcttgtggtttcagattgtcgatcatctgtaatttattatgtgtctgattcagattacgaggcaaaaagttttcatgtgtgtcttgtgtcttgtgtccgtcataaagtcaaaaaagtgaaactgtaagtcaccaagtggggctgcggttcggtttggacgtcaatttatccgctttacaagactgaaggctccttagttagtgacttctgcttatgcagaggctatagcacaagagcagcgacaatatgagtggcggaacttggaaattaacacgttcttgctgatcatctcgtgggtacatccgtttccttcaagggtgacgagccacggaggccagattcaatagctactgtcctctaaccttgatgttctgcaaatatgcggcttgaaaatgatcgatcgtcccacaatcggtctcatatcactcttgtggaactgataaactatggaagacaacaaagctcgtatctggacagatatcaggaagttacgtatccaaaaagatggaacactagccggttagcctctccaaagaattcagaggagcgagaaagtgctattgtatttgtcttttgatattatggttttagtctttacattactttagtaggtacagctgtaactgtgcagtgcccccgccggtcttgctgtgagagcgatacactcactggttcttatttctcgatgctcaaggctgttgagcagactactggcgtagcgtatcccaaggtttcctgagccgcttttcattcttcttttactatctagttctgatcctgaatctggtcgcaaccattttcagttttccgcctatatcaaagccacacatcagtcaaactacgcgtagcagctagcagaggtaccggtggcgggtagaggttctaagtagatgcagactcgcgatgtccttgcaagccaagggtggaatatgcgttcgaaagtattctcttcacgattcagaaccgagacgcgttccgcccgcgaatgaagaatcacctttacaaatgagtgcacgtctagcgtttgaaggaacacacctagctgcatgcatctgctggactgcatgctctgagaagaatcgccattctcaatggttactcaaatgcgactttcgtttccaagtatgctaactagtgttcaaatggacacagttgcgaattgtctaaaagcgtgtttttaattctcgagcgcctgatgaagtagcccaggccttcagggggctgatacccggatctgcaggtagggctttcctacgaatcgacgggtgggtgtagtacggcttgtgaccgttttgcctgcctactgttcaagttgaactttgttatgtgtgtctggtcgtattgcaagcttgtgtcactctccattaagtcaagaataaggcctttcaggcgcagttgagtatgattcgtctgcaaaggcacagccaatagaaccggttctggatgtcctcggtggacagtttcttccgcaaaagtgcctcataactcctgaaatataagtgcttgtttgaatgaggcaattccgccacttttttctgctttgtacgtgggtgccctttcctgtcttccgctccccgagtcgcgtccaagccatcatgccgttgcgccgtccgctttgccccgacggttctctccagcaggggctttgaaagtggtatttaaagaagacagacgcgcttcaccatccttttcgctttttttctcca

SEQ ID NO: 2036 - DNA, 2134 bp, Toxoplasma gondii
  source 1..2134: mol_type = genomic DNA
cctttcaaccctcttttgaaacttgcatcatatttgaaagctagcatcgcagcttcaccagcccagaaacataaggaggacgaactggtcggatgctacgacttctgagaagactatgggattctacgttttttttcattcacaactcggacaagcgatgacgaactagcgggggcaaacactcgtccgtctaaaatttttcccgaagatttcgagctaagaggctgagatactatgccgaaactgtgggggggatggaaaggcaatatattgctgctgatgtttcaagagatgaagaggcgcccgtcacgatgacctcatgactggggatgttgagctgctctagtaacagagggccttcatgctccaaacaatgtctgacgcgtcgcctcactctcggcatttgcccaacgtgaacacaccatgtaacgacgcccacttcactgtccatactttgaagagaaacaaagatcctgtccacagataaatgcgtaatgtgtgaggaaaccttgagttaaccggaacctgggactgtcaaaaacttctgctttcctttgcttacggaggtctcgctcttcagctggcttgcaacattgaaaaagaggaactcacacacgttttgagctctggagaaaacgaacgctttcctgcaaatgactagctcttctctcctgtggagaccacataaaacaccgatgcggataccagctggcatacactacaacaactaaaacaagtaatgcggctgactgcaaaatcgaatgtaccttaccgtagtgcctgttgaacaaatcatcttttttctaggtttcaagaccatgagtagtttaacctgttctgaaaaacgactagtttgggggcattctactagtgtatttctgtttgccggagagaggcgctgtcgatgcccgtgtggactttcacgaggaaggcagtcgaatttcttggtacctggaattcctggtccctgttagctggttggcaccgcaaagaaagaaaaggaattgaaaaacaacctgggtgctacaggtggttgggtcttccctgtctttatcggatctaggcccttttgctgctgcattgtcgtttttctataccaggcagttcttcttctgtttcactttaagctgcgatttttttagagcacactgtggaaacttggcagcacactatcgtctaaatgggcgcgtacacacagtgcagcaacacgatgcgtgagagaaaaatgctctgtgctgcatgcgacgccgtagtttctggagccgctctttcgagttgtgcggcacaggaaaaaaacccatatcatgaaataacttgaagggatagaactgccatttccggtgcttgagctttgtgttaaaccaagttttctactgtttcgccttacgaggcttcctacagagctgctgcatgcgtcctgctaaggtaacacggtccacgagccctgttttccggatgcgtaaaatcatcgcggcgcgttctaccatccgtgagtcacaaatgcatagcattagcattgtcttttccccctcagctcgtgagtgtgtgcttatcgacttcacttccaagcagaaccagtattttctccagtcagtttggaatgcattggcgttggcaacctacgattgtggatttgctttttagaagtggcgggatatctgaaggcgtttcctggttcttgagagtttgcatcgttctatgtccacgcgtagtccttcggaatctgccctcacggggccagacctctgttttcttccgggcgtctagacatgtatcaagcatgcgatgatcccgtctttttgaatctcaacgccctccccggagtgttgtcctccggctcgcttccttggttttcgtgttcatgtgtatgtcctaaagtctcctagtactgagtatacactcaaggcggctcgggtgtctcgtccctttcgctgcctttccgtttctttctgggttctctccagagaggctgccttgaggcatgctcctcgcaaaggccagagcttacgtaaactgaggcgcatcgacgcctgttgaggaactcggcatcgaaaacgccttcatatttgtggagaagacaaacccgtaggtcgaattggtttttcattccagtaaacactcctggttggcctga

SEQ ID NO: 2037 - DNA, 2089 bp, Toxoplasma gondii
  source 1..2089: mol_type = genomic DNA
cacgatagccgtaaagacgagtgatgcgattcctatcgtggaacattgccgtgttgtgtcttcatgctatggaatggagtgccgtgttggctcagacgacagttttccagcttgaaaagccgccttaggaggcgatgtcaaactgactctgccaggtgaggcagcaaacgttgccacttagttggttcggtgataaggttctgtgaattatgttgccgtacgtgcagatatcgacaagcacaaccgtctcggctccgttgtacaacgccttttttacaagttcctttgttcggacggcatgttcccagaaacgtttcttcctctagcgaagcaggctgctttccggaaactgaaccgcaacgggtgcactatggcttctcgcaagactgaggaacacccgtttaaggagagcactggtgatgctggtggtgaagcacctgtggaagggcctagaggtccaacagcggaatgtgccgatgggccgtcgtcggtgcgtatgcccaggatgcagctcgcccttcctgaggcaatatcgcgacctgtgtctatagtgcacaggcttgacattggaaccagcggcgcactcgtggctgcaaagactgctgctgcagcagaaaatctgaagcttcagtgggcagagaggaaagtcctcaaggggtacatcggactctgcaccccagagatccactcgctccacgaggttgacgccccgctccgaaggcacccaacgcagagggggagaatggaagctttgagtaacgaaagcagatccagtttccatgatgtgtgcgacgaaaccgcacaaaaagatcactctagttatcgcattggtgcgaaacctggggtctctgtgtttgctccgcttggaggcaatggcgcgtatggcatgtttgcagcactggctctgacaggaagaacccaccagatccgagcacacctcgaatacattggccaccctctcctgggagatctagtttatggaaaccaaacagttaacgaggaactgcggaggttcgtaaagaatgttgttgtcaacccacgccatcacagggaagaggctgctacaaggatgacgagaaaagaagtacaggtttcgtgctgcgacgcagggccggatgtgttggcgcccgcgggaaatgtcaaagtgcacatgcgacccttcttacacgcttattttctacgctttgcccaccctcgcactggcgcagcggtcaatattaaagctctgccgcctgctgacatctgccaaatcgcagggaagataggtgtagattgggaattgagggcagatgctgccttcgaaagaattcatttgaacggattttagtatctggaagactggatgaacttctaaggtttttggaggccgctgctcctgaatacctggcttctctggcgaacgctcctgccacggcgggctgccttgtcagtggtattatgtagtcatcttcagtaaagttcctgtgggaaacagcattcctcagtttgtaggcgcctataggttgaaaacgaaggtagggggtacggcagtgtttttcattcgaaagaggcttcgatacaggttgaatgtcttcgttcacgtcttgagcagtgttcagtgagattgcaccgtgtgggctttggacgctggagctattgcagcgagatttcggtaagttgtgtgagcattgctcatggcattttccctggagatcagctagctatagagagcaaaaccttcctagattcggccactgtctacgcagggggtgcgtcccccgtctacttgtagagtcctttcggcgggagcgttgttccgtatagccgagcctatcatcctgagcaaggaactctggaggctcaacatacgatgttgctcgcacgaggcatgactctacaaaatggtactttgtagatttgctgctctgtcggcaaaaagcaatgaattcgaaagcggcactgcggagaaagattggtcgtgaggtgtccatacaccgaagcttagtaacatagctgggcactttattgaagagccggcggatggttcccttcgtcgagcactgctctctctcagacacaactagagatttatgagaagacaaagacacaa

SEQ ID NO: 2038 - DNA, 1385 bp, Toxoplasma gondii
  source 1..1385: mol_type = genomic DNA
gaacgcacaggcccgcatccgcacattgacagtgagataggagcgcctgtggggacgcatcgcgacagagccgcatcgacaagacgaaggagaagagaggaccgcctctcgttgaataaggaaataacgatgcagggagaagaagaggcagagagaggcaggaagagagtcttcggggtatgtacagggaaacaggtggcgctctttcgtagcacatttttgttaggactctccttctcaagcggcgggagccctctccccttcgctgttgctttccttaccatcgatgacgactatatgtccttgacgaatgtcgccgactccgacagtcgcaaaaagcctcgcctgctgagagtgaggaaaggtagggcaaggcgtctttcttgcaaagcaaccaatcgactctggacggacgtggagaggaccctccgcaggtctgcatgcattgcctccggaggtatctctcctcagtcgaccgagcggaaacgaagaagcgagagagagaggagagagaggagagagaggagaggggagcgacgaacgttttcctgggagaggaagcatcccagagagaacctggcgcgtctgcggaagacgcgagacaggaaagatactggagactggagcggccgccattgaggcaacggaggaaacgcgacacgatgagaaagtgaagagggccgagcagctgacaacgcgaggcaaatgagataaaaggaaaaggaaggagaagagaagcagaagaacacaatctcttccgggtttaagggagcaaaccaggcagagagtgaatgtttggggaaaagttgcaggaggccgaatgcgtaacgagagaaaggcaaaatgatgagcatgcacaggtcgccgaaaaagaggggacgttctttgtctcgtgtctgcgaagagagttctttctgcatccagagggaaaaaaacaagtcggggattacaagagaaacagaaaaagatggctttccttcactggaaaaatcatctcagacgtccgggagagattgtgcatgtgcctcagaaaaaaaggattttctgcgcctgcatgcactgcagtcgactgaatttctcgggaagaaaacagaccactgtggcagaaagtttccccccacatatctctggaagcaggaaatttttcgctcccttttctgaggagcgaaacgaacggcgacagagaatggaactggtgagagtcaggttcccgggaaggcgataaacaggccagtcgcatgtgagcacagggagtcgacaagagaaaccactacgacaccctccctcccccgtcttttcaggtacacgagaagaaagacaacgaacgcaaaagcctccagctgttctctcccgccctcttgtctcttccttatcttctctcacca

SEQ ID NO: 2039 - DNA, 2876 bp, Toxoplasma gondii
  source 1..2876: mol_type = genomic DNA
catttgctgcatgatctgctggagaatttcctgttgctgaatccgcatctgctcctcaaaccgcttctgcatctcctgcagcgcggagccggccgtgggcgctggcgcctgcgggccgccggctgcgtcgggtgtcagtgcgccaggctgcgccgggatggcggccgtcgccccgaaaggaaacggcggctgcggccacgggcaggcgccgggggcgggggcgcctccactggcgtcttgcgcaggtaagttctggaaaggactcgtcggtttcgggaggatctgcggtccacgattcggactcgcctccccgcacggtcccgtggcgccgagtgtatgtacaccacccgaggcctgcgtctgcggtccggcgagtggaaacgtctcgttccgcaccggcggcgagctgtacttcccaaacgctcctcccgtcgcgtgcggcgcggctggtgcgtgaaggaacgcagcggatgcggcggcgtctgcatttcctgcgttccccgttctcatcaaggggctggcctggggaccggaagcgccgggcgcagcgagcgtgagaatcgtcggtccggtttctggtcgaggaggagctggcggcgcgtggtctgcccgagcagccgcagaagagtcgccgtctgcgacgcgcatccagtggggacggttgtcagctcgagcaaaaatcagttctcgaccccgccccccagctgctgcgggcgggcggtctgaagcgccgagaggcggcgcaggtccgggaggaagcatgtcgacgaaagaggctgtctgtgagagacgccaagaaacgacgccgagcggctgtctgtgatctgcgggttcgcctttactcccttagttgggttcgcctttactctaggagatgcaacaagggatgcaaacaagtggggggaaggaggcggtctgcgggatccgacagggaattcaagctgcaagctcgctgggagtgcgaggaaaacagcgacggtgaaaagagaacgcgaacggagacaggctgtagaccgaatgcagggacgaggccagcaaggggtgaccaggtaggcggaaattccgagacagggaacgaatcggtggatctttgcagggtgctgtgcgagcgtttgccggtgacaagcagtggaacgcaccgagagaacggcagcgaaggtgtgcgagggcgaaacgcgggaaggaaagcaacatccacaggtaaagatagaccggacggaggtgagactaggtcgatgatgcgcgtgagagaaacggcgacaggcgttgaagaagatcgggacgtttcccaccaaaggagatctaggcagacatcatcaaggaattatagaggcggggaaaagtggagtcgaagcaacggatacagaaagagaactccgaaaagcatgtacaatctgcgcgccttctgtgcgacgtgaaagaaaaaacgaagcatctgcatgcgcgccacggctctcgtagctgcgcgtgaattttcgaggcccggtgctcacttccaaaaagagttaccttctgtcgacaggtgtctgcgcttctgcattatttctcattgcactcgaacacaagcaggcgcatgcgtggaggagtcgcgcttctccttccgtcaatataagcctggtggccgttgtttctgaaaaaaacacggggaaacaatccggcgaggaacatctatgacatctgtgcatcctagctgtgccgtccgctagtgcggaaaaagttcctcttaacacattttcattgtgaaagttggccgacgcagcagtcagtagggctgcccacctggggcttcggttctgcgagtcctctcgaggcagctcttcaccttgactaattgtgtcgggtttgtagttctccgaggaaatagtgccgtatgcagttatgtaagcactgacagcgatgaaaagggccggagacgtctgccgtctgcacaggcaaactagcctttgtaggggtttacagtctagtttctgatgtggcgacaagcaacactcgcgtggtaagggagtcgaggagggaattggtacatttagcagaggaaaacggacatcgtttcttttgtgaaaacggaaacgcaaacgtgagaggcaacacctcgcagtctgcctcaaatgcagaaacaaggatttgcgagtggaagcgcaagagtcttcgcaacactgaagcgtatctgcacagcagactgtgatgtggtgatgcgtacaatagaggctgaattggagaactcgcggcctttctggcacgataagtgaggtctgacccgccctttacgtttttgtacctttgctgagaatcgtcccgctcttgcgcgtttttaagacgcacatgttgtcactctgtcgccgtttctcgaactgaagaaatggcataaaggcattctcaaacgtttcaccgttacaggaaattgccggcaaacgcccttgtatagcgcaaatgaggcaaggcatcgcaagagttcagggcctcgatccagtgttcgtttcgatgttccaagtgcgcgtggtttgcaactctaacgtcgtttccacacttgtgttcgcattaaaaacgctgtcgcgacgaggtagttagcctatcccggactcgaaaggactgcgtttttgcaggctcaacgatcgagaagccagcgaaccgtcagcaattcgggacgaagctctaacttggtaaccaaacagtcgttgtcatggcaccccgacgagcaagctcgtagctgctgcttggctgctgccagagcctggtggagcatcgaccccgtcgataaaaatcggagttgagcacaacaagcagctgtcagaagtgttgttctttagctgcccgtaaatgcagagctctgactgtttgtcgagagcctcttgattcttccacgtagcagacgagta

SEQ ID NO: 2040 - DNA, 1985 bp, Toxoplasma gondii
  source 1..1985: mol_type = genomic DNA
ttgtgaatctttcagagcttcctgagtgtaggtcatcccttcgagagaatctccttccacatttgcaggcgatgaagagtcacttgtatagaatcggtaatgaaacagaatgtagttcgaacagcgtaacagttcaggtttctcgagttgtcaagtgctgcagcagagcaatacggaggctgttgtggttgccgtagtgtacccgatgatgcagtgcaggattcctatttcttccataaccaaatggtgggtacaatgcagttgactcctatagcattcagcattctttcctgtatcgcacacatgagaaccggatatgcaatttcttcctgggattcggactttttgcattgacagtgaggaattgtcaaaatgacacaagcattgcatcaaatgccacgagagagaatgacgattttcaacctcagtgtttgtaatccaccgaagactgtattgcttctctgatatgtcagagagaaactgaaatctggaatgtgcttcctagattggtacggtttagtagatcgaatcttagcttctcacacgctcgcagttatcgcacaagcgcctgaccaagtgctccacaacgctgcaccaagaaaagcaagatggccctcctgcatggtgcaatatctccaaacgggaaaaggctggtgcagtcacacctctgtagtgtacgtgtatagatatgcatgtgtacgcaatattcagttgcacagcgtagtgcctgacttccaccccctgtcacgggacacagcccagtgttgctaaacgaaagaagtttccgccaagagaagtggaaaccgagtgtatgggaccacaagttccatgagcgcctacaattcataaatcacgcacgcgtgtatgatgactgcgggacagttatggcccgtcttcaccgcaaggtcgtgaactacgagtcctcctgaaggtacgtttgcgattgtgagcacgaccacacggggttgtaaatggaaacctaatttcagtgtcgcgggctgttcgttaccgttcattcatatctgtacgtccgcttgtcgcctgagtgcgctttggtcgtcgtggcgtgagccatgccaatcacctcgatactcctttctcagttttccccgaagttcgtgaaaactaccagcagtcgtcggtggattcacaattgtgagagaagcttccacagattccctatagaatacgaggactgcatcctcttcaaaaacgggtacgttgcacgtgtccaacactgctattcgggaactttcttcccgccctcccccccattgcctgcctgcgggggagttacgagtgagaacacctttctagattgaagggaaatgtgcgaattcgacaatgaatttgacatcgtcttccgctaagttacgaagaccattgcagaaaaagtctacgaaaaagtcaaatttcgctgcggaaactccgaacggcgacaacacactcctcccaatgtttgcctggcttgcggacggcatgcaacgttaagcaatatgcatgctcgatgtgatcattgcaagcagccccgtatggttgcactgcctgaacggtcctgtgcctttttggaagggacatacggaatagttgaagctttccgtcatacagtcgttgctaggggggttactgcccttacaactcgaacagcaagccgactttgtaaacttctagcgtggaagggggtgttacatgtgtgtcatgcctagtcccccgttgttcgtcactcttaaaccagcgtgcatgcgtctgtcctttccctttcttttagaatcgatatctcacacgcgcttctttgagtttttttctcttcatattttgcctaaacaacgctatagactgccgctcccaccatctgttttggactgagccagtacattgcagatttggcgaatgtttgcagttttacttcaatctgtaaatcagttcaactctaagagctgtacagacatttttccgtgacaattccaaagaactgtcaaataaga

SEQ ID NO: 2041 - DNA, 651 bp, Toxoplasma gondii
  source 1..651: mol_type = genomic DNA
tcactttctccatgaacttttcctgacaaggatacggctggaaaggaaagtccacctccacagagtcttctcgcttctccccgaacctcacgctgccgacccagccatcggctttcccggaagtctcgatgcgccagacactctcagagtcccctccctgcgcagaaggtttatgcgaggaagaagacgaagagactgaaggaggacgaggacagtgcggagaggagagagaagagagacgagtctgcgtcgccatggttgcgaggagagttgcttcgaggtcgaagggtgtttgctgtctcgtttcggactcggatggctgggaacgcacaatacagatttcactttccggcggttgccgctctcggctacaggcaggcgacgcctcaaaggtcctgctgtctcctcgctgcatgcgtttgtagcgtcttcgcctccattcgcagcgcggctggaggcagaagagaaggatacatctgctattttcagtcttcgatcgcctgtccactgggcgggaaggtcgcggtaaatccactggtcgagtacaggtgcatggctggatgagaagactagccgccgctgcctgagaggagacacagcactgtttcacacgcttccaccgcaatgtttttctccgaagttgtccagaga

SEQ ID NO: 2042 - DNA, 1965 bp, Toxoplasma gondii
  source 1..1965: mol_type = genomic DNA
attcttgctaaagtgaaataaaccgtgagagactgaaacatgaactggagcgtagtgattctgtggttggaaggctctaaataggagaggaacctttctggataaagagagaggcgatgttttttgtcaagcaatttcactcgcgtttggtttcctaggatgcacccatttggatcgacagaagtgcggtagttttaaccagaaacttctgtacgaaccacagctggttagccgaacaccctgtgtagatgcggtcagtcgaaccattttcgttttggccgcagtagcctaaaagactgtgtggatggtatttcaaccccaactgcatcacgtgttgaagctggaccagccaccaatacgatgggactcattgaaactttatgtgacattcccccggtgatatccactacccacattttcaaccgagataaagagcggagcgttctatccagttcagggttccaacccgtttggtgacccgtcaggtcagaacggaatgtaacatgaaactgtcacaggaaggtagcatgatagaggaagtcgacgcggagacatcagccgccccaactaattgatttgttctccacttgcacatcagagttcacaggcgaagaagtgtgcagcatctggtggagtctcctgtgtgtagcaaacgaggttcatggcttgggcgccccaacatggatgttgaggaagcgcaggcgactgattaaggtttctagtctactgtcttcatggcgtggtgagataccgcgtcaactggaactgcccgaacaaagtgtatcttcgttcacacagtgttgtttcttcgtgctgtagatgggagaagcgtaaaaccagtcgtcacgctcgatagaaactttgtgcggttattttattcaagctactgaccaatacttgctcatggccagggatgcatgccactgggtttccctgatacctcgaacaagtagctgcctaacaaccaatgtcgccaccattaataacggtcggctatatagaggcgtccgtcttgcaattagtgagacgacactaacaacaggaggggaatgcatactctgctcgaggcacatcgagctccgagtttgatagtcaatcacatcgatattgcagtcactcttgcaaacccgtaatccgacaatcgtgtatatgctggcaacgcgaggaatatagatgaatcccgcgaaagaacctcgcgggatgacacagagaggatatcatgtgaggggcagtgccgacgaacgatatgttgcacaatgcatccattgccccagctctacgtgtgtggcacgatactgaagcagtcactggagaacttgcttattttgccagcgcgagtgcggggattgttttataatcctgtgccgaaacctgaggaaagcacgtttttcgcagtttgccgcatgcctgggcgccacaggcctgctagccaaggtaatcgccattttcagtgccactcttcagaacacctgtatcgaaaacatgccttctcgaatgatatcgcttcccttttgtataaaacttgaaagctctcgacctctcttcaatgcgtatgagagagtgaagaggccacgtctgcacaggggacccctagctgtcggtcacattgggctttagtccagctcaagcttgaggaaagacggtagtttaaggagtttaatgcctccggagactatatgcaaaacagaggaaaggtgttgtaggtggtaaggataaatgacggtcatgggtctacagcaaacatgtctgcaactgggaacacggctagcaccatgctaaaggtcgtcgatacgagtgcaggaacagcgcaacccattggtagaccgagtcgcgtctaccactaacacagcctcattcaaacacttctatctaggcgttgcggcgggacagaaaatctagtcccagttgatgtgaacgctgtcacggtagtggtctgttctcttgaattgtgagctgagtggaaga

SEQ ID NO: 2043 - DNA, 1932 bp, Toxoplasma gondii
  source 1..1932: mol_type = genomic DNA
agagcgagaagaccgtggcagacgaggctttgcagaaagagcgaggaacctgcgacaaggaaggcgcgagagacaaagcagagcagcgccctacagagaggagacagaagaaaaggagggagaaccatcgccaggcaagtcgagaaggcgaagaggagacagagcggaaaggaagagcgccctgtccttctccccttgtgtcttctcgcggcgcgtctcccatggtcctgaaaacaaacgctgcgccgttccccgctaccaccgtggcaagctcccccggagacagttttccctgcacgcgcaaggtgtctgtacaccccaaacggacccgcgagaagcgttttcgagtctcgccattttctttctttgtgtctctggaaaggcacaaagcagcgcagcagagatagagcgcgactgagaagagcggcgaagcaagacgggagaagagtcacgacgaaggacgagaacataagaagaagcagaaaaaaacgagcagagagagacaacacgaagaagaggagagagagaagaaagagacagaggcagggcgcgagagagacctctttccagaagcggcggcgaggaggcagaaatggttggagaactcgatgcctctcagacctccgaccaccgtggagcgagggcaaagagccacaggcatgcaagagacgagaaaatgctgcggagtctgtggtgagggaaaaagcagatgcccgcctacagggtcgagatcagaggagcgtttaactgacaaacgaggagagagacggcgaggtagacacaatacgagtgacgcggagcaagagagcaggcagagaacatggcggggaaaaaccgaaagagagcgactaagagaacgcaaaagaagaagcctgaacacagaaaagttcggcgagagagaccaagagaccaagaacgcggagaatgcgaaaatcgacggtcggcagcatgcaatctccgctggggggggggcgacgcacacagacgacgaacgaacggagacgatgtcgccacttggcacacaacgaacgtttgtctccctcgaagaaagcgccaaggagagactgcagagaagcggagaaaaagagactgcagagaagcggagaaaaagagactgcagagaagcggagaaaaagagactgaccgcgcgggtcgatgtcgacaccggcgagacagttgggagcggcggggtgtcttcgccggcagatttgaggacagagaagaagagcgagaagagagagaccgcgcgcgggaaggtcaacgactgagagagagaagacagactgggaggagatgaggactttaggttggcgaggaacgcttcgtgaagagtttaactcttcggagtggtgacaactagctgattcgcgcaaagtcgagcgatctgtcgattccattgactgcgactgctgtgtctacgctgtcgtcagcgcctctcgcatcgtacacctctcttggcagctcgcggggggcgggggtcggtggaggctttttttttcgtttgtcgctctgcagattccccatctttctcgatttcgtcggattatctttcgagctccgcttgttctgtccgcagaaactccagctcttccgagagctcgcgtcgacactgagcgttccgcgtcctcttgtctcttccttctctctgtgtccctagctcttcgcgtctccccacgacgtcgctctttcctcgccaattctcgacctgaagaaaacagatggtttgcttggcctgcgcctctccctagaaacggccgcctcccttctctgtctgcgttttgccgcgttctcgaccctttttatcctccttcttcaccgccggaccccccctcctcgcctatccctgcttctcgctcttgttctcgctcttgtttctgtgtggttctcgtcgctgctgtttcttttccagcgactcgcggttcgtgcgctgca

SEQ ID NO: 2044 - DNA, 3154 bp, Toxoplasma gondii
  source 1..3154: mol_type = genomic DNA
atccacacactgggttggatctgcgcgtgcacttacgacgcattttctccttccaaggcagtggcttttcgcttttctccagccacaggctctgcccccgcggcgagcgaaactgtagggtccatggcgccagctagaaaagtggcaagaggcgaagacggagacggtggagagacggcgtggggaaatgcccaaaaacctggacaggccgagaacgaagggaaggagctttcctccagccttcactccttgtcagggttgttttgtggggtactcccgcaaacggagaacacagcttagatggatcatacgattgccttgtcgccgcccttcagaatcaggcttccaaacgagctgaaacagcaggcaggcgttgtcttcacacggggggccattcctttctggagaccaagatggcagatacgcgggaggataaagaggaaacggagaaaatgaaaagcagcaaaggggcaacggagagaagaaaggcggaaacgaaagaacagcgaaggatggagtaacatgcaaacggaaggtgaagtcgacacacaagcgaaacgaggagtgatgggtggcggagaataaaagagacacaacggcacagagaaagaaggcgaaggcgcgaggaaggagcaacgtgttgcaaaaacagtgcaacgcagagcgcgaggatgtaaaaaagtccaaaagtaccggagagaagaattcggactacgcaggggcagaagacagcaccacacggtgctgaaggaaactggactaaacttagaacaacgtaagtggcacaagacaaagcaggacgcaacgagtgacaatcagaggtgggaactggaacaaggaaacaagctgggggagcatgcacggcataagtgacactggggtggtgagaacgaaaggaagacaagggttccgagctcccaggtacacgacacggtaacaacgttggcgtatcttgcctaaaaccacggaaacacgcagcagaacatggacccctgtaccaaagccctgcttcagtgcggtacgcaactgcgaacagaggcctctacagaaaagcgtaaggcgcaagttaaaagggtcaacaacgcggctgggtagagggctgtaaaagaagaggaactgttgccgtagcattatttgtgactgtaacgccaggccggacggagacacgcacgagaaaggcaggacgaatggaggatccccctgtctgcgggaagaaaagacactcggagcatgtacacgagcaactttgttcagtgccacagaaagcggaaaataacgtggggaaagaaaagcgtatacgcgaattccaattttgtcactcgtatacgcacacggtagtcgagcacttccacgcagacgctttggttgcttgaatgtatagacagcgtagaatgcagtctcacgccaaaacaaagtcgaattttggccgcgtcgctcatcgccagtaacgaagaagtgtcccttattcaggaaaatgtgatttcgttgccgctccgattccgcatgcaatatgctcgtgttgggccgtggtgtgacctctgctcgccacacggtgcaagcaacatggcacccgtttgcgcggcacaaagatggcattctttggtctctcatggaagaccaaacttgccacgtgaaagctgcaacaaaaagcaagttgcgtgttttgacgcagagggaaagggtggggaactgtcttactgagctgaaacagcgtcgtttgtggatgactggcacacaggtggactcctgggtgcgagccacaaggtcggggacggctgaaaacgcagaagtagtgcgaaattaaccagaggaacagtttgagatgtgttataagctgtccttcactttctcttacgtcccacgagggtgcacgatgctgttgcctcaagtcgctccagtctcgctacccagacgtttttcagtgatgttgtccattagaggtactacgggtttcaagcgatacgctaaacagttgtgattgggcatttagggaaattcagctgcactgacatctggtccttgacgaaaattccggtgtatgccgtcgcattccccaccatatctacagtccactcctgattttggctacgggatcgaagtgtagattcctctgatataaatttttgtcggctgtcttcttttggagtgtattctgggagttgggctaccggtttagatcttgaaggtctattttggcactctagttcccagtgctaatctgtacggaatacttcggtctggtcgcaggcgtgttactgggcaccacagaccgttctctgctgcttgaggtacttagtgtagaaatgaatgtatgcaatctggctgttgcatcatgttgtgcacagcgacaggtggacaccatcactaggtgacgataaaaagatgcattagctctaatgcgtacagaagaaccccgaaaacttgcagtgctggataagggtttggcatttctccctgagagagagcatggaggccatggcattttgctcgcatattcaaccgattcaaacaaaaaaaaaacggaacgatcgagggctgcagtgctctccctctcctcgtattcctttcatggggaagccggcgtccagcaacttaggaaatggcttgaacaagacggaaacagtgacacccgaggtctttctcatagtcaatctgtaccgtacacgctcccgggcagacctgtctggctccacagtgtggaaatacaaatatccgtcgctctacatggggccggacagttgtgtcttatttcaaagagtagttcagttgacttaaacaccgatccgggcagtgcagatgtgtcttgaacacaaggtgtacttccgaacgtagtgaaaaccccggcaacagtgcgttcagcaacaagggggccaattacatgactcgctgcaggcactgcaaacgatactttgaaagcgtcgtgcaccgcactgcggtttgcccttcacgaggtggctgtaaagtgtacagctgtaagggaggcaaggacgaggaacaacttctggagatatgtggtttatgtggtagctgatagggtcacacagacgggtgcgttcggagaggtgtttaccttctagttcaacgagacagaattcactctcgtgctgctgcccggcgcttctgtcacttgtcccgttggagagaccttggcgca

SEQ ID NO: 2045 - DNA, 4896 bp, Toxoplasma gondii
  source 1..4896: mol_type = genomic DNA
ggaaagcgaggaagacagaccaaggaaacccacggtttctcgtcccaacgctgtcagatcccattgcctctctgccttctctcgccgaccaactttcgtcttcgccgcgagaagaagagacacctgtctcgaagcagaagaagctcgcgggcaagacgccggagtctggaagcgcgaacaagaacgcgcgagagcagcgggtcgcagccagcagttcctctggagttccctcacaagagagacacaaagagcagccgaacaagagttcgaaggacgcgaacgcatcgggtgtgaaagaccggaagacccagaaacgagacgaaaaacagggtgcagcgcaaaggagccctgcggtagaggggtccgcccaactgagcgtaggaagccgtgtgtctctgccttctggagtctcctatgaggttgtgtgtcttccctcgggcggttcaaaggggaagaaagagacggcgagtcctggggaccgtgtgtcgatccagtacaaaggactgctggcaaagaatctccgacgcttcgatagtgggagaatcaagttcgttctcggaagaggcgaagtcatcaaaggcatggagctcggcgtcaagggcatgcagttgggagaggcgcgcagactcctcatccccagcgctctagggtatggcagacgcggagcgcctcccgcaatcccgcccaacagtgacctcatcttcgagtgtcgactgatgagtctcgggtgaagcgaatgcaaaataagcgtcgtcgatccctccagttctgcagcaaacgtgaatcccggtggcgtactgaagtaaagccatactttggctggccttcgacacggtccagcagggtgacgaggacgacttccatagcaactacacagagtgtgggtgtttgaagcaaagggtgcgggggcgacagagaacaggtggataaatcggaaaaaaacgagagaaagagaggacccaggtgcaacgcatgaagcggaggacacactgaaagcagcgcggaaggattcaacaggctctatagtatcttgtcactccagacgcacattttgtgaacgcgcagttcacagatttttcagctagataatttccagtgacgtgctcgcgcatgttgtaaacgaagtccgtaatcgccacttgttctgcgggtgtgggcgatcccatcgttttgcctttgctttagactgctaatttttgtcgctctctgtccaggagagtgtgctcgagtcttgattagtcatgggtttctcttcagtttcttctgcgcctcgactctccaacgagacgagatggattttcctctcggtgggggcattgcttcctgcctcgtcactcaaactggaacgactgctccaacatgtattcggtagcatgcattcctcgactgtgtttccatttctcttccgcagctctaaagctggcggtgttacgccacttcatgagccgcttctgtcactagttcgaacgaatcgaatgaatcgagactgtgactttgatccgtcgaggaatcacgacgcgcagaagcttctgatgttcaaaaagagaagccatgaaaacgattgttcggcaatttactcatgttctgttcacacggaaaaatattgccgctatcgcatttcgcattcgaacgcctctcgatgttcagccaggcagacactcgttccgagcgggtcttgaggaaacgacggcgttgtcacagagtttcttggtcaccacagaacagatgagaaattgagcaccgagctgtcatctgcgatatataatatatgcctaggaaatgcttgtcgatgccactcggtacagcgtcgacacgcgtacaaataaagggcgcatgtagaactaactaatgattttttcaggggtgctgatgcttgtttttccggtagcagaaaaaacggcggaaagatgattgtctgagaaatcggaagtgagtagcacttcgaggattgtaaacttccatttgcgaaacgtcagaaaagtacaaggaacgatcgtgcttccatatcacacgttgtacgcaaaaagcgattcagccgcaattccacgttcgtcttctaagatatgatcaagctttgtgtgtgccatttctacattagattcagcttcattctcttgcgagagtttcgcgaggtttttaggataccgatagtgggcaacgagctctcgaataggattagcttctccaccctgtaatcaggatcgactgccggccgccgtaaacgtgtagatcgacgatgacccagcgctaccatctcacacatcgtcggctgtttacggaaaaaggatgcacggatttcgatggaacttggccgctgacgttgtaaatgggtcacgatgcaatccactggggttacttgtcgtgctccgatcacaactgaaacatctgcgttcccgatatggggcgtttttacatgaaaaggaaaggaatacatttgtaaaagggtcgttcgatgtgtcagcattgaaagaagctaatttaatcataataatggggaagagttgctttcacacaggcgcttgcgtgctcgaaacaagacgaaaaggaactgtttcgagtcgacaggttgccagagacgcagcagggtcaaatcgctagatcacatatccttctacttttgctgtgttcttgatgacggttcgagccctccgattgcgtttcacgttcttcatatccattggtggatccgtctcaaatgaagcacaaagttaatcccatttctgattcactgttgcacatagttgtaggggtctgtactaggtcatctcattttcccacttcagttaccaatacctcttctttgcggttagatggagagacgcaaacctgtctgtgaaggctcgtcagactggaacacttgttctttgtgcgaaaacatccaccaaagcactgctttccccatacgcgatcaaaagcataaagtgctgatcatccatagagccacgggcgtgtgcacccgttagaaatcatgttgtgtttccccccagggttttcatcctatcttatctctgcgtccaagcagcagatccgatgtcgactagaattcccttgctgcttctgtgtcacctttcgagtgcttccctcgtgcaacatatcgcaacctcagaaaaagaaaggtcaggtgcagcatacacgctcacagtcacacatttgccgactgaagaggcaacatatattataagtgtacagccaaaacacaaaactcaggagaggttcaatacaaatgtaacgtagttatcaaggtcgcgaaggagaaaactgttacaacgacccggcctgaagaatcaggagctgaaactcgacggtggaacatgacactgagagtctctcttttcagagtcgctgtcgtgttcacgcgaatgttttgaagcattcagcattttcatgtcctaccctcatgaacgtcttccgcgttcgtggagacgacagtgtggcgtccgatgctgagaaccatttgggatactgagtacctgaaaaataattcttcattgcatgatgtagatatgtacttggagacggcagctcgattttctaattttaggagttgtttgcagataacgggatctgagcattgaggtacttaaattcaattcgttgtagccaggggggcttggcgcactgtttacagtcaatgctcaagttgcgtttcctcaccttggaatgcgtggcgagtgcaccggctactgggacgttttctgattttttaggttcttcaactatggaattgatccatccaaactttgagtttttcacgtactgattgatcgctgtgcaaagagaattgtcttaaatatttttgtggtatcgatctcagtcgttttgcactgaacgtgggcaaagcgtgaaaaaatggaagaattcgtgcttctgtttgctttctaaaatctcaggtggttccttccggtccggcacctggaacaactgagtagaggctacactggggagatgctgaacaagttgtgatggaggaggcaacgtcatgttataatttgttatttcgtttgtgccttcacgcacctagtgtggtaaatcacgcattggattcatgcgaagtttactagcggaccccttccagctgtacctccttggtacatatgctctgacgccttagtccccctgtggcgttcaggtgtcgcaggcgggtgcacagcggcagaactctgctagccagtctgattacacgccaatatcagtttctcgacagagaaacgatcaacagatacctgctgccgtcaacccctgcggttttcgtggtctaacagccatcgaactcgctagtagtgtttttgctagaagtgtgtaatgcgcactcactcatttctcttccatgccacactagagccagaaacaagagagagccttctgagatcatttgtgctgcttacgcgacaagaaaatcggaactggacctcccgtgttctacgcccttgagctggccagtgggagacccgcagtttttttcccgcttgcgcggcttatcgtttcttaggggggaaaatgctgcatcaaaacatgcctttgattgtgtggtaccagggaagagtggaattgtgggtttgattggtagtgacggcgcttacgtcgcatggagcgacttaacaccagcagcgtgcgacctgacgtttcgtacaagcttcgatccgctaccagtcccgccgcagccaccgcccctgcacttgtcgcttgtcgggagggatgggctgtgggcaacctcgaggtctaagaaagagcacgaattcgcaggtacgttcgcttgaaaattgtttcgatttccagccacacaacaactaaacgatctttgttgctgatgtttcttcacacatccttccttggctttcttctgttcaacggcaacaacggcacctcctccttcaccttgcaagacaccgacagtca

SEQ ID NO: 2046 - DNA, 3567 bp, Toxoplasma gondii
  source 1..3567: mol_type = genomic DNA
tctctttgttctgcatcgctgttgttcgtctgccttcgttcgatgtctctgttctttccccgcgtcggtttttttcgttttgagttgcgttattctctcccttttctttccttccactgtcgctcgaactcttcgccagctgtcgagccgctttcgcccgcgcggcttttctcaccagcgtttctcctgttttttcttccttctcaggcacttgccactttgaccttctccccgaattctccacgcgccatatgtggcaatgagcgcagtttcctcgagttctctcgtctcgcctttctctccaggctcgtccaggttccctctgctgcggaagctccgagaaagaagagagataggagagaacagagaaaagagaagaacctggacgcaaacgtttgcaaagaactcgtgccctggagacctcgttttctgtcggccgcatccgatccagcttcaaaggagaacggggaaagccacagagagagagagcagcttgggtggaagtacatgtgggcttcgcgtggacttgaaagacgagatctgcgtatgcggggagcaaaaagttctttctttgtgtccggttcacttttcctcatcacggttgtgaaatccttgcttttccagcaactcacacaaaaggcgtctcaccaccatttctcgggccgctcccctgctgtctctcccgcatgcagctcgggtgtgtttgcgtctctgtcctacgaaaagaaggccctccttgctgggctgccttcagctcgctttgcctcttctgcaccagtgaaaaggagatctttcgaaggagagctcaggcgaagcagggaagctgcagatactgactgctgcatgcatttgagcctctcgggggtcgcgggcctgcgcgagcatcctgtacatttgaaagcctctgcagaggtgcagtcggtcactcagcgcttatgctgctctagaaaggttttcgaaaaaagacaggccagatgtgcgaggaaagaaaaaacgaggagacgaaaaggaaagcgaggagacagcgaagagaagtcgcggcatacacgcgagttctttgcgaagccgagctaccagagaatttcgagttttttgagagaacgcagaaaggctcgaggaaagacgctagtgatctagacgcaggaacgcagtaggcgaactcgagatagaaggaactttgtctttacgaggttttttagcaaagacacctttcgactcgtgacacgagcagaaatgtaagcatccgagccgcctcggtttcgcaggaccttcgttttcaaagagaccgagcgctcctgtagagacgccgggaagaggggcaaggaagatcaggagacaggaggccgacgcctgcagtgtgtgccagccagaaaacgcgaactcgcctctcacttgtaaataaactacggcaacgagcttagcgttgggagctcttgttctttctctgttgctgaatattcgcctccggtgtcgtcgagtttcagggacggtcttcaggccacggggcaggctgtggagtcaggctcccgctttggttggactcgcatgcacgaagagagcatgcagctctgtcttacgtacgtttcgaggttgatttttccaaacaagaaagcagtttctttgcgtttcacagcatggccctggagaggtagctttggccaaccacgcacgcgtgcgtgtctcgggcggtcggaagtttctcccgaaatcgtaaatgcggagtgcaacggaagtttacagacgattagcggagggcagaccctcagtctcgggtgcggtgtataaacgaccagaagagagaaggtggaggaaaagagaaaagagaggaagaggacgggccttctctgtgcttcgcagtcgtgagacacgcgacgaccagtttgggatagaatcacttgcaacaccgcatgatgcgctcgacaagaccattgaggcgcgctgtggcagcagcagagcctgcagcaagtacacgttacagcagttctactacaaaagcagagaaaggaaaaaactcttttcagtcgggactcacgcgcgaagagacttccaccggaaatgacacattggagcggaccgagagggaggggaaagagagaggaagaggcgaccgacggagaaaggaagaaagagagagatgaaacaagagagatagaagagggggaggaaaaagaaaggcggaaaagagtggcgagaaaggagacaacgagaaggagagaaacacagtaggaaagagagagagcggaagaggtgtattgtgactgcagtgtagtctttcaggagagagaacgctttccttctcttcattgaccctccagcaagtcgtcttccgcgctttgcatccccgaagtcttttgtgtcagcctttgaatctaactctcttgacctgcttctctcgtctcgtcgattgaagggtgtctctcagccacaggtgataaggatcgctagtgaaaagaagaaatcgacatctcaaaaccctgtgtgcctcgtgtgcttctgcttcctctttctcctacctatcccccttccctcatcatctttttctttccttttctctccgttttttctcttctctcaacctcctggacgttgcgacccattccagagaggcgacccaagcaacggacacacgaacttgttctccaacttctcttctctttcttgctttcctcgcactttctgtctgccgtgtctacttcccccttttcctccctctttcctccttctctccctttcttcctcttttctccgttttctctctaactctctcgctgtggtcggcgcctatcgggcagagcgccgctgggcgccgtctgcgcgagcgcggagaaagagctgtgggacctaagcggctttctgcgaggggcgcacaatcttttctcacgcgcgtttttgtgcggattcgcgagaaaagagcagggagacaaaccgtgcaccacacccttctgtttcagaaaaatatccaagaatctttttatttcttctctccacgctcttctctcgcagtcgatctgctccacgctcgttttggcgggacccgcgcgtctctctgcttccttcctttgttcctttcctccccatccacgtgtgtttctcttcgcaacttccctccctgcccaagtcttttcctctcttgttctctttatctttgtcgttctcgttccttctctctttgtctcgtcgcgcttgctcctccaaaacagcgcgctctgctgacacaccgcccatcttttcctgccatcgctgcctccgtgaggaacctccagtgagaaacagagttcgtccaagtccacgcttctggtctcgtcctcgaattctcctccttctctctcgagaggtctgtcgctttcttttcttccctagagctcggacgctagctctttctcttctctcgtctttttctccagccctgtctctgtctccttccttgacctcttctgcgtgctcttttccgtctacctgccctgcgtcctcctctgctccgcttgtctctctctttctctctatctttctctctttctgcgtctctctcgccgttcactctcggtcgcaagtgtccagtgtctctga

SEQ ID NO: 2047 - DNA, 1297 bp, Toxoplasma gondii
  source 1..1297: mol_type = genomic DNA
ttagcagcaaactctctcgcagtataaccgagtgcactactcctcgatcgtaggagcactctgacacttcgcaaagtcttggaagcattccaaaactcagacgaatagaccacgtcgaacttgttaatgaggggtcacttttgggtttgacttagattcagaaagaaagtcaagaggtcatctccgacgactctccctgcttcttcatgaagtcctcgagagcttcatcgtagagcgtatccagatgatcgcatatgctcgccaggtcgtcaaagctctctcgcaacagctgcattgctgattcgcctgcatgtaccggaaataacaatacatttctgcgcagtattttcagcgttgaagagccggtgcaaccgcgcagctgcctcatacgtaactacagttttcgtcgctatccttccagtggtattggcgaaaaacaattcatgttttcgtgtcggtggcactagcacagctatcaacatacctgttgtctggaggcggatattcatctccggttgtgttggatggggaacggaatagcctgcgaactccactccgggttttcgaacaaggatagatctgatggtgttacccaacgtatggtcttcgccagtaagggtaaaggtcaactgggaggccttgcaagcctcctgctcgtggacacccgctgtccacgcttttccagacggactggaggaagctccgcaagagcttcctcccgcaccgtcatccgccatgatagcgttgcctcagttttcctcaagctttcacgcgacaacgtttcacgtgtcgctggccgtcaccgagtctacgatccgactggagtaaagcagcagaaagcactcgctttaccaaattttcctgccgtcgactgttgttgctgtgtcgcagagtctgctgctgccacacgtatcttgctggagcttctcccactcctctctctcaccgcgtcagtcataacaccgggaagcaacaaaggtcccacttctacttaacaaaataatgggcagaggcgagagtacggagagtacttccaatatgaacggtgccgcagtatccgacgggctttgttaccgagcttcgcatgcgcatgcagagcacttggggcaaatcgacttggggcggatcgacatgtcacgacaccttagcataaaagaacacagaaacgcaaccggacggtgtagaaaaccagcaggctacactggtgtggacatacgcaaagaaaaaaaatttgcataccgcggcgctttgttcacgtttcacttcttcatacgtcccacagattgggaccttgcat

SEQ ID NO: 2048 - DNA, 1068 bp, Toxoplasma gondii
  source 1..1068: mol_type = genomic DNA
gtttggaagcgacgcacaagagcgagagaagccagaaggagacaaatgaggcacgccttgggaaagagaaggaagagacaaaaggcagaaacaaagtgtcttgccgaaagaccatcgcagcttccgcccagagaccacagtctttgtccggcagtcaccctgcatcgcaagcgctgctcggaagctttctatggcctctcaggcatgaaacagcggtgccttgtctgcgtgacctgcctcgctcctctcttcaccggactcttttccccgtccagttgggcatccaattgctaaaaggcgcgtgacaggttgaaaggcaggagacaccctcacccctgtcgccagctcttccaggctgacgcttgttcacaagcttgcatccccggtaacccacagacgaaaaatcacaaggagtagttgtgtctctctctatgatacttgaaagatcgagagtcaaaacgaggtagtccatcgagatcccgtactacggtttttcgtccttccgtcggtgactgttcagatctgcagattctccttcaggaatgtctcgaatgttcagacgacgacgttaacacaatcgtacatgaatacacatattgatggacagatatacagaaggatatagcctgattaagcagatagagatggacagacatacaagggtacacggctggttagatgggtagtgaaaggccgacgggagtgtaggttaacacagacgcacgatgtatcgagggaaattgagagggcaggagagaaagaaaaagaagtgatggactgccggagaagggggtttctgctgaagtcaaggggacgttcaaggcatcacaggtcttgtttgagcaacagatctctcgacgcgaatctgtcgcagctcgattgtacgagcggagacaccgcaggtctgagcgccgacaaagtcgagtaccggcaaaaggaggaaatttgaaagacaaccagattcttcgcctctcagaagggaaaatttccgtatcagttggcgttctggtgcagtaaacgttggcaatttccacgagaaaacactctgtgcattttcaccagcttgca

SEQ ID NO: 2049 - DNA, 1909 bp, Toxoplasma gondii
  source 1..1909: mol_type = genomic DNA
aagtcctgctgtttgtagatacacggctgctcgagtaccacatcgacagggcctgggggcttctcgcaggggatcgggccagagccggcgaacggcgagttcacagagcgcccagaaagcgaacgcgagaaagccgaggaggtgactggctggggcggaaccgaggcgagaggagacggtgggagcgcactggcccgaggcgcggcactgggacttgggggcgcgacagccgccgaaacagctgctgcgcgaatagctgctctcaaaccatcgctcttcgcggcctccgaacttcctcccgatgagacagcagacagtggagacacagggccgttccggcgagaccgggacttcttcgccggcaccgcgggcgaacacgatgcgtcggcgatgcgagacaaagaggccgcaggctcctcaggcgaagagacacccgcagagatcggcatcttgggcagccgcggaaacagttggccgggagaccaaggctgctgaaggcgtcgctcgatgcagcaggaaccgaactctcctcgaacgaaacaggctccgagagggcggagaacaacacaggcgagggggaggggcgatttgaaaaaagagggagagaagacgagaagagcgtggagacaggaaagagccgtcaggtctctgtcctgtgtgtgtcggattcggaatctgcttcaagactacagaatcgtcagggatgcgagttgaagcgaaacggaaaaaatggtgttccacgatactgaatgtcagtgaggaggacgaccacgaacttcgaaagagatgcaacatcagcgagttgcgtaagcgtccccgagcgaaaacaaagaacaccgggacactgctctgtacaggcgaactgaaaaatgcagagaaacgaaaactgaaagcaacatgcggcctcagaaaaggcatggcccctgacaacagacccggggaaagagcggtcacatcgccatgtaaggtcctcaaatgcccctcttcgtctgcgtttcttgtctggcttcttgtcaaacagaggaccagggggaccttctgacaactgacaactgtcaggttgctatcgcgcgagccgagagtagagggaataaaaaaggaggcattcttgactgcatcgccgtttccaccagggatcaagttttccgaccgtttctcgccccgcctggctggatgaattcgttcactgtacgcaaacttcaaacgctccacaagaagctgccgtcgatgtgcgctcgaagtcgaaaccgggaacgcaggcagtctatggcggagagcgcccgcgatggaccgatgaagatgggtcacacttcaggttttcccctcgcatatgtgcggctctttaaagacaaatacacccagtgaaaacccaagtagacacccattcgctgtccaagttgttcggagaaagtgaaacgtgatgcaaattcttgacggcagggactcctaccgctaccgactgggtacctacgaacaagcctggataggggatagctcaaattgttgtcgaacgcgagcggaaactccgccaaaatctcctaagaagcacaactgacagatgaaacagtccccgagaaaaaaataaattacactacactgcgtgagaacggatgaaccgagagaaagtcgcctccaggagctacctggaggtgagatacagaacccggcttccaggacacgcgcatgctgaaatgaggaacagaaaggggaaacacaacgacatatcgaaaagcacaaaacgcagcagtctgcctaaacaacctcgagcaaagtggacggaagtgggaagccgtaagttaaaggcgaccccgatgagtgtctgaggacagagaccagcggagcttagacgtgcctcggattggaacggctgcgggtgaagagaaaacagggtctctccgaacccggaaaa

SEQ ID NO: 2050 - DNA, 5011 bp, Toxoplasma gondii
  source 1..5011: mol_type = genomic DNA
aacaagtgcatgcatcagtgcacgtccaggtggaaaggaaaaagtcgagagcaattcagatattcgcatatatgtatttacagatacgcatacaagtttctgtgcaattagctgtttacgtccgaaggaagttcctgtcctaacggtagagctgtcagggacggctttgggtgtttcatttatgcacaagggatggaacttagttgaagtggatttctttcagcaaaagtcacgttctttgttttgccaaagcggggacgtgtcatcccatgtttaacccaagagcacgtttcgctttagatttttctccactgtagatgtcttagcccatgacgctttgcagagccctaaatgacactcgcgcttctacgcgtgtataaatctacgtagatatatatttgtatataagaatattttgtgtgtgttaatttctctttaaacagacatgtgcctcggtaggcaaaggcaccgtgcgtttgtccgggcgacaggaatggtaaaagggtcatcaaggttagagaggaacgccgtgtactcaggcagtttttaagagcaataggatttttgaaatgctgtacctctctctacagtgcctttcaatcacagcagtcgctctccgcgtttccccctcctggttctgtttccttgtgcctttgaaggaaactgagaaagccgggacagggcactattttatgcaacatgaagttccgccactgcttcttacttgcagggaaacacacgaccgccttaaaagatgaacttgtttcggtgcgaaaacgttcacagttctgtttgagtgacaacggagctccgtgtgaaatcgaagaagacgagctgaaactttccgtgcaaacgtctatttggcggctgggaaggcggcagtgcggtgttgtggaaaagtctgtcaaaatgtatctaggaaattcctcaggatacgggttctactctgcggtggctccccgtggtttgacgttgataaggaagagtcccgagttagggaaggtcaccaactctgcttcacaaggcgtttcgtttccagaacttggataaaggttatttcggagtgacagcgggtcattttctttaattgttcaacaaaaattgatcccgaaaaagccgtgaacgcgtcccacagtctgtgcatgaagccccgacttcgagggttcaccagggctgcctgacgtcggtcacgtaacttgaaagtcgttttctttgctttgtaaagtgaaatgcagggatcggcacacgcgggatagcgaggattgaagcaagcattggctgtgtgcttcttttgtctcgaaaggaaatgcagcagagcatctcgtcttcttactttgcgacaggaagcattccgcatgttgtgtgtgcataataatgatcccctacaaacaggaaacttacttgtttgcagaaaaaccaccgggcgactcgaccatgcccaatcgtgtggggaaatgaagtgggtcttttgccttacagaaccgaaacgcggcattttcgcccttttagaccggtagagacctcgaagtgatccaaggtgaaagagcactcttccagcgtttgcggtgagctgtttcaccggaaagtaacggatgtccaggctcgatatttgacattcactatcgttgcacactgctgtccaggcgaagtggacggtatacgggtttttcgagtcgtagcaaatggcaattgcgagaagaacattccgatcaatgatactacaagcttaggagccgttattaccacccgaggataaaaggcaactttaagcagagcgcggtacctagtttctccagggttgctagatccatttaaatgcaagttttattacataaaactacttctatgcagcttgcagaagaaaaaaggatggactgacacctttcagtggacacgcggatctcgaagtagttgcccggcaactctgccgatccctactctttgcggaatttgccttctttgctcgagatgaaaccgcagcctctctcgggttcttgcccggagggcggatgtttcacagccgaaactctgctgatgccgcaggagcttgcgctgattcggcaagtgtttgcggaattggatgatgatcgcgacgggtggctcagcccggaagaccttcgtcggagcatgctccgggacgggatccgcgtgaccaaggccgaggcggaagctttcctgtgggaagtggacgaagacggagatggcaggctggcactttcagacttcgctctgctgtacgcgtttgcgaagtgcgggatgcgccggcgcgaaccgcagaagttgtcaaactacttgatctaccgcttgatcgatttagatcgcgacggaaggctagatattgaccacgtctattcgtacctctgccacatcatggacaaagaggcggcgaaccgaaacatgaacaagatcttcggcttttacgcggtcgactctcccacgacagataaagtgaccccggcgcagtggcttaccatcctcgagacgtcgctctgggaacaagactgcccggtcgtggacaacgaaaaagccccctggcaaaccgacacgaattccgcagtcttcccgtttcttagagacaaggttagagtcagacccagagtagacgatcggctagacatccagaaactccgcgacacgaggaatcaagtcgtggcggaaaccgggacgattcctcgcgaaccctactcccgaggcaggcgttcgccgatctgtccgccgcaaagacggagcgccaaacggcgctagaactctctggcgaatgctgtttcacaaatgcagactcaagcactttctcgccgtgctgctctcccgtatcagggcgaagcagcaaaggtattttggcaaggtgcggaccacgctgtagccgcacgaaaatgcgggggaaagagggatgcgttggacagaaatgcagagaacgcaacgaacgtatttccaagacaccagttcagcagaggggggcatgggaacgaaggaagctttggggttttcgtgaacggagttagttccgagactatcttcagaatgaacacataccgaaatcgcgtacaaatggtgttttccgacgttggacgccatgcaaccgagggaattgatccagtgaggtgcctgggaattaagtgatttggggcagtctcgcaaatgcttcttgttttccgtttcggaacaggaaacttgcagagagggcaacagttcacatgtggctgccttttgtacgaacatacttcggtgtgaacaagtaaccatagtataggtaaataaatataagcatagagagggttgtatatttttgcaatgtattgaaggtacttttctgtgtttctcgcactttcggtggatagacgggacttggtagcagggatttcctgtcggcaatggtcagaggagcaggaaaacggatttcgcattagatgtgaatcccagggctggggctgtccttcacggctttttccagcacagcttcccacaagaccggaggtgtttcccctccgggcaaaatgcagtctctctaactcaaggatgagaggcaacatggaaatcttctaccttgttcagacttgaagtctggcgtacgcatgtctggagggacgccagaatgcagcgagttcctgaacgattacaggctgtaacgttgtattaatacagacaaactgagagagagatgcgcagtccaagtcttctgctgctgcttagatttacacgagttgcactgcagccgattcgagtgaaaagcttttgaagacttccttgaaaaattcactaagactccaccacctcggcgacaacttatcttctagaaaagaaaatctctggcatacacatatatatatatatatatatatatatatgaatatgccaatagctctggggcattacctctccctaccattacctccgactagataaaatgcagctacatatatgtatatatagctccatgagaggcgtagcaacagatgactttatcgatatatgtgtagggccactcactttgttctggaaagagagctttgatatcgctcgacgggttcgcgtctgtcgaggcaaagtgacaaggaagttacgcctgtattcttgatgctctcttcaccccgacgcgtgtttccccctggagttctctcgtgccctccttcacaacaattccgattaacaaccgaagaatacttgcagaaacaagttcctgcgccatgtcaccctgagaacccctgaaacgacctagaacattacagttgtggagcgaactgtcacgaattgttcgatatctgaagtaaaaaagcaactcgtgatcatcaaccccttgccccctgagtttgctggcctatttgaccgacaacttcctagaaaaaagattttctactgaaataagggaacacttccacgccgctctgttttcaagactctttcacagatccgcccctgtgtcgacggaaacctggtgcacagaaccggcgcgcaacgtccacatgaagtcatttgttcccattcttcctccgctcaaaaagccttgcctcgcgagcatttcctcgtcaaattggaagatccagaccctgtgtgtgtctgttggtaagcagaaaacgctggagagacgagagcgttcgcgcgttcgtgtctctcgcaagcatgcgaaacccagacgcatgcaagcggcagaaagaagactctgttttctctggcgaagacctcgccactgcgacagcgtctctgcctttttctcgcgtgcaaagctgcatttccccttccttttcctgcatgtcgcttcttatccgctggccaccgtcagtgtgctgcttgcttccttgagtgtaaacagacacctgccgacttgggcaaaatcgcacgcggagaaacccctcgactttagaaacaatcgtttcgcacgtttcgcgacgacgcattcgttttcgtttttctgccgaggtcttcttctctttcttctctgctcgactggcctacggagccttggatccgacgcgctgaaattccctcgttctccgcgtcttcctctgcaacacca

SEQ ID NO: 2051 - DNA, 4556 bp, Toxoplasma gondii
  source 1..4556: mol_type = genomic DNA
actcggacaactcgatcaattctcggaggaagaaagtgacgaagatttgatcccggagtggccgcgtccttcagatccccgaggcttagtgccagagggccctgggctgggagacgcacgtcacgactcgtacagaatgcagcctaagggaagagtggatgaggtcccgcagaggcgctggtccccggttttctcagaggagagagagtctatcgctgcgtccgagctgaagcgcgcgccgtcccggggggcgcccttcgtaggcatccgtggccgcaacccagtggggggcgttctaacagaaggtgccttcgggggtgcacgacaggggcgacacgagcgttttgcagctccagggatggtcttgccgaacactccgcattctaacggaggccggcccttcaatgagtgggagccgcagggtgtctatggagtcggagcgcagaggcggttccatgagaactacggaccggaagcgacacccaagcgactcgagttcagggtaccaacagtcaggcccggttttgtgcgcggcgaagtggcggacgcagaggctgtgaatcgggcgacagcgcatgcgttttgggctgcgcaaaaccctcagaatgccggggttgtccgaagagaacgcccttgggtcgatgagggtctgtccacacctaacaaggcgccgttctacgctcacgacaggagccacttcccagtcgaagaggaagaaagcgacagtgaaccgtcgaggcaaggggaaatggcgctgccagtcgccacccgagcgcccgagcgcactaacttcgagccccctgttcaacaaagagaggcagctccgcaggctctcgaaggggcagaacggccagggaaacacaggtcacggcagggggaaggcaacctcaaaggtcacgtgtgggggtggaagtaaggcggttaaaagaacagatccttcccaatctcggtggtgcctgaagcggcgccggagactccgaaaaggtggagtgagcagctgtagacgagtgcaagtggttccccgtcagacgctacagcagaagggctgtggttcttatttttgttgggacgtagtttacagtgatctacagagctcgtacgctgaattataaaacagtctatccccctacgcacgtgcggagggttcaccgagactgaccgcgtcctgtatttgtgaagtggattccttaacgtgcccaatggaggagggtgattcctgagtcccgattctatggaataggaatttttgttcccacaggcattttgggagtcgtgtgacatactggagttaatgcactatgagccgcccgtcgctccctattatcgaatgccgagccgatacgtaatctctgtcggccctgtacacttggggtgatacggtaaactaaagagaaggcattcttcatgctgagaacttttgctacaagctaaataggtaggcacactacagcagcgcatctgcgagagccgtacccgaatcgttccacactcgcggcttagtgatttaacttccacgtactagggttgtacagccacttctcacgaaaccagttccctcgcagtcaattgttcttgccaaagcacagagattggtgtccatggttcgatgcactagggccgacacgtcgtctcactttttggcgttcactagtttcccctgtgtagttctttgctcctggccttaattttaacaagataccgtcgggatatgccgccttctggccgtaccccgtatgactgaacgcttcgcatatggcatggcttgcgatatttcgctcgctatgtcagtccttagatgtaagtaattctgagggatcagcttggtggatgtagcggttcatgcactacggagctagggttgagcgacgattgtcggcgacctcaagaagaagtcggtgtgagttcgttatttttgtttattccggcttccgggatttcttgagttgtcgccctttcggtgacagccaagcaaaacaacgacctcggggaaaatgaatttaggataatagcaaacacttaccaaatacaatgcgacggacttcctagtgtaggcagcatagtgaaggagaaacgatacgtcaagaacagtccgttattttctaccgtttagaagtcatggcagcctgggaagtacggaagctcgctgctctgtgtaaccggttgtatgcacacgttttacggcaacaaagcgcctcatcgacaagaaactctgcacgtactccatttgaaagtaatatgccagcagaagtccgattcgacgtacaattaatctttcaggccttccttgctgtgcgtccaggatgtgcatttagccttgacccagtcacgccccattcaaatctcgtgtcttcctctagtcccggtaaatcgtgggtcttctcatctttcacccgtgcgccactcgttggaagaaaatgttgcgagaagagtcagaatgcatcacatagacgtagcagatgacttttaggtgagaatgcatctttgcatgtctacaacatcccagggatcaggtccctaatcgcttgcccctctaaatgttttgtcgtgtctagtattctcaccgacagttcggtgcattgtgccgtgtttcaataaagggaaaacagtttctccgatatttgctgaatcgcatctgtgttcagctaagatcatctgagtactgtgctggactacggactgttccgcatgccagattaggacgctatgagaggccatcgtgaatgctgtcgaagaggtcacacccgaggagacgagctctgtcgtatcgcctccacggattgaaaacagaattaatcagcgggcgacatagcagcttttcgaatcgcgattctatctcgaaatagttaaatgacagtgcagctagctgatacgcacatatctcgaggggcaacacagtgatccttgccggatggaaagctttggaacggatgcccattgccaacggctgtgttgtaaagaataacaatataccatcggagtcatttccttggtggtctgcggaatctgggacggttatgtcctctacgggcagatgaggtaccgcagcagtctcgtctttcttacagttttcaggcaaccctcagacatagtctctaccagccctgtcggtgagcattcttggcgcatttgcaatctacattgttaccacggctggcacgcagtagagggaagactcgttgcagatcgggtctttctcgatttcagctctcgaaggcgttctacctgccggggaggaacagggttcaggctaactataaaaagtttagttgaccagattggagagctgggagtcagtaggaatgaaatgggtttcgccagcggaatcttggttccattcaatgatgcggtggctggtcaaatagagaacgaaggagagcgcgacgaatgctgcaggcgtcctacacactgtctctcgcttcgcaaagacacccttgaaggagctgtcaccggcattttctggagttgccactatttaatgcaacacaccaagcgacggttttcagcttctgtgtactgtcaacgcgaaaacgaagtcctccgcgccttgcaagcccgtttgttgtggtgccttgaaacttttcggcaggaagccccccgacaaaggcgcgcagagtacaggtcctggcttactggagggcagtctcgtctgtgcatgtgttccgagcaagtgacagcagggacgcaggccaaacatctggagcagttgtgagagattgtgtgccacgtaggtagtcatctgaccttgtttaggcaactctatgacagggagacatttcgcgcaatagctaccagcgagcgataagtttgctcgtgtctgcatgaaaaagacgcaaccgggctgcttctacgctgcagcgtttgtgcttctgttgcagcaatccctgtggtgtgcatctgctctttggagcagcctggcaaataaaaatcggcagcgttacccttcttgaacacccgcgtttcgaaacgtccgttttcttggtcttttcttgaaaataggtgcttggcaaaagtccgtttggcgattttctgttccatttccgaaaaaccagcacccacgtgccatacactgactaccagtttcaccttcggagagcgtcttaccaaacaaacaaacaagatctacagtttttcaccgcactcatttctgttttcgttagatggcagagccactcttcaaagatgtgatattcgtccagggaacggcggacagcagcaagtgcttttcgaaaaagcttggatgcccacgaatctttgttggctggcatcggattggcgcaatagaccacagtgtctaaataacaaaaaaagagacgcgtgactgcctttgcggatgtgcgatgcagcgtcgcttgtagccaacacatcgacatacatccggatctgccaagatgtggctgttctgggcaacgtcctattgtggcccgcaccccggtttctttcagctgcgccttcacggtttcgaagaaatgaccgtgctgcatcgcagaagtccatcttgggaggctgtatatactttacttctctgaagtggtcacgcgtcactgtgtttgtgccga

SEQ ID NO: 2052 - DNA, 2880 bp, Toxoplasma gondii
  source 1..2880: mol_type = genomic DNA
catgcaggcgtgcgacaaaaccgtgatcgcgaggtattctgtgttacgggcggagcgtctgcggctgtccttcgaaggggaggcggcgtgacactctgagctaggtaccagacgaacgcagccatttgtgtccgtccgctctttcttgatcacgtgccattttattttacgttttccactggtgtatcttttccagcagcttatatataggctgccgcagcttcgtgtgtcacaagccgctgtagacagtaagcctactgcggcctccttgtggaaagccgttttccccagagtttcctgttttccttccctccgcgtgccatcttgtttttcgcccgcgcggatgtgttaatgcgataaataactaatgaagcaaggttatgaacagcttcgtgagctatattcccagcctccggcactgctttcctgttgtcaacaaagcggcgccacctggccttcggcccgctttaaatttaaaccgtaactaagcccacatgtggaaaccctatccacacaccatggcgtcctgagcgctctgcaagacttccttttccgaacaggggcggagaaagacgcactgaagctacttaacaccaaaacacgctctcgaacacattcaccgattaagtcaaacccggtgctacagatctgccgcaccccaccactcactaggagggggcacacccgcttcactgctgacggtgcccgcacagcaggtgcggcattgtgttgaaagccagttacatatatatggcttcctcgccgacggagagaagtgaaggaaggtgaggaatcagataggattcctggatacaggtggccgttctcgctacggcctccgtttcctgcgcagcaatgcacctactctagcaaagtccagaatggacggacgacttcgaggaaactctgttgtccgaaggttggaggaactttaatttataacagctcggttctgtcctaggcgtactacatggattactgttttcagtcgattgttcaaacatgcagtggatctcatttaagcgttgtgagtcagacagcgcccgagtctttacaggcgaatgccgtagtccgctgtcagcggtgcaggacctgctcctctctacgtgtttgctccgctgcgtgccgataagaagactctcaacgtgtgttaaacttcgtgactacacttaacgcaggaaaagcccaaggggagcttcattccgcatgcgtatgggtacgtgtgtatggaacgcaccgcccgttcggcagaatccttccgtcagaaggtacatttattttcgaccagtgctgtagcgattgaagctgacatgaatttgcttcggaccgccgaattggagagtgttgcctagaatgttcgcggttgaacacaagacttcgtagaacggtggccagcgggttgatcgcgcacccgcagggttctgtccaccggcatcgagccgctgttctacagcgagtgtgggtgggagagtttccttcctttcttccggttcgccgtccacagttcggcttgttgggctgccgggtttctgtttttccaatctctgagtggatttcccagagaatgactgtgttgcggccggtggcagtaaacccagtagattaggggttagtatggcggctgcaatcaaacgacgcaaactcgaaggggtaactgctggcctgcgctcgagagacaactgctgcaccacccaaaccaagacccgcgggcgagtcgcgttggacaggcgctgcggcgggaggggaatgcggcgcctaaggctcggcagggcaactctctcgatttctcgccacgcgtggttggtcgccccgttgtcacgggacaaacggttttggacaagggacacacagcgtaaagttcttcggaaccggagtttggctctccagaccagcggcaccacttgcagttcttcactggagaaccttgtccgtgtgttgcgtttgcttctcggcttcggtcaatgtacgcgttgcgtatcttgtagaccggccgagagttttacgctttgctgctgcttgcgcgaacggctggcaagtgtgtttgcagcccgtggagcaaaagcgtaagagccgtccttcctggaatttttccggctttacgctcgtttttgccgactgttccacacgcaatgctagaggaaagtttcaacaagggtcttgtggaccatcgtgaaaccagttggtcgctactgattctcagctacgtgggtcccaaagtgatgtgcttgacggctggaacgaagcactgtggactttcactgcttgtagctagagaccatggagagctacaatcttctttagaaccatacggctactttccttcctggacggactcttctcagaggggtatttcgcgttgcgagcgcttagcaccgcgttcaggatctagatgctggcaaacgactcccaccggtgttatcttccccgactttgtcgattctccgcgcctgctgccttccaactgacactgttcgcacgatacatctcaggacgtcattgcgtcttgcggtgtagcgccacagcgtcttgctggctcagagaccgtcaaaactgttcctctccgcaacggacgggtacaagcgccattttctcgactcatgcaaaccgcatttttgcggtctgtgagtgcaagggagttgccttcgctttacccagaacaggtggcttggttcttcagcacgaaccattccaatcccaccgggctggtggaagtacggcgcgctgggcacacatggagcaagcgcggcggcgctggtcctccgtgagcgtgtcagcctcctattgaccagcgatttgccagttgcacccttttcgttgagggcatctctgctaggtggtgcggcttcgtctctctctcgtcgctctctcctcaggccttca

SEQ ID NO: 2053 - DNA, 1870 bp, Toxoplasma gondii
  source 1..1870: mol_type = genomic DNA
aacgaagtatggttcttccgaaagagatgggcaacattgcgatgtggacaccacagtgtgcagtgctaatctactgtgtcccctgaggcgataggatggaagttgtcctcaccactatttctctgttgcggcagcagagagcctgcacgagcaaaggcaaggcgccttgctgaacacacagttgaacaggtattttccctgccgcagagaggacgacacgaatggaccttgtgcactgaagaaggagctcttcgttttccctctcaatgcaaggccactgatgtggggttgcacccccagaagattcgtgggcgtcgatcacatgaagcgatgacggtatctcgtcacaggtagcgctacactggtcagagttctgatttcgaatggggacaggcagaaacagtggactgggagaattcaaagaacgactcagtagagattgcatgaagtggagcaggcggccccagtcttcgggagatgctaacgctgccgggaggtctgatgctgaagcgtctgtagacagcgaacttgaagggcatgaagcagggcagtcgattgcgagcttctgacggaagaaacgagtgagctcctggagctcttcctcgacgaccgcgtcggttgagcgattggccccacaaaagacgctgcggcgtttctgcatgtggcagaatcctgtggacggctcccaaggagcctgattcgactccatggttctggaaaaaaactcgaaggtgcaccgagagaaacagatggattccgccgtccggagtggctctgccagtccggtctgccgcggcggtaaaatgtgtaccctgtctccggagcctactgggtatttctcgggaacaaggtgctgagcaaagaggatgacatttctcggagaagccagcaaaacatgcacgcgaaagttacacgccttatatctccattcgcggcttcggcgggtgatagctcgaccttcacttgaagggtcgaaggccaccgctaccacgtgtcaggagatccctgtttctctcgctcattgccaagaactcaagagagtatcatacacgaaacggtcaatcaccgcccacctggtgttcaagcagttgtcggaacggctctggaggcgaaatccgttggaactcttggtttatctttcctgcatgagaggatctgacgggaactagcgcatacgggcgacggacggatcggatcagggagttgaagtgcagcgctggggtgttacaatagatggacatccggtgcagctggcgtatgaaaagagacaaaagggtaagcattgagatatgaatgttcctgcattgttgttaaatggtaggggttcacatcaccgtggacgattgacatgggtttctctcggtaccggcgccgcccagggacggaccgaggcaccggggaaggagcggccgcttcaccgcagaaagtccaagcctggagtttaaaggatccccctctaatcaagccaggtaaaacgtgaccaattcgtcgcatatagacaaggaaagtcggtttaatgtaagtttggagtacagcagcgacgatggcgctcggcacagtttggtaagacatgcacaccacaggtggtacacggggccgacaagatagcccgcgacctctagaactgtgtgtggcatgttaagtgcctcttaggagcctgggtcagttgggaaacctgttgagtttccgctttaatgtgtaactgcttacagctagggcgttggaagaagagcaaggaaaatgagggtaaaacaggaaaagcaaatacgcgccgcgacacaattctgtcgaaccggtgtcgctgctgcatgcattcggaatcgagcctccgtgcccatctggggacgaggctaggggtgagaacggcgga

SEQ ID NO: 2054 - DNA, 1702 bp, Toxoplasma gondii
  source 1..1702: mol_type = genomic DNA
ggcaggtgttgccgagttatcgcacggttcaaagcatcgtctgctccggctaatgttggatctgacaaggtacgccaggtatgcgacaggatccgttgataatgctagagcctgtaactcatcagtagatggctttaatagccaataggaagaaggacgtgagacgaatatgggaggaatatggaagttacagaggatgctttccttactaagacctgcgcgaacgttggtatcctgtagctactactactagtattagcatcacggagtcgtcagagctatccgtcttttcatacttacagagttcgcgcttgacaaattttcagtttaacagtcgtttatagtaatggaggaacacggtgctaaagggtctgcatccgaatttcggacctgcttattgctgtgtggggaaactcccgaactccacattgctccaggactgtcgctcgttcacaaagcgacagagtttatttagaatcagcaggaaattgtgtcccgagaggaacaatgaagcaagatggtcacaagatgccttgttttctgtgctcgccagcatgccaaacccttaacctgcagagacaaaaccatagataacgagcgcgttgtagcttagtggaccaacaatcgcgttcagcatcagcgaagggcagctggtaacaaggatctaggtggaacggtggatagaggtcacaaatagaaaatgcatattgtttgagttaagccaaatcatcattcgcaactggtcagttcgcaacccatctggtgttgtatcagtagtgtcacacgccgccacttcaaggaaacagttaatgcgtcgcgctacacccactctgtcgcctcctccatcattaaagtgtcttttatcgttgaacgcagtaagaattgacagtgtccggtgcggtttgccggcctggtgaacctagcaacacatgaaacctgaactcgtagtcttgccggctctgtgcatgcgcgtctgtcaacatgcggcagcaattccgctgatttcttctctgttggtcgctgtcttttactctcgtgtaatcgccaccatgacaggtacgaagcccccagttttttattgctctcttcagtttctttctcctgtgtatgaaagtttgggttttctagccgttaactccttcattttgcgcttccttgtcgtggctgtcgagccccacatgcagcgatcgggctgttgtgactcggtatgtaacttcagcggttagtgactttttttcgatttgcttccaggctttcctgctcggggtctgtctaaaccactcctgaagtcattgtagctgtcgtgaccccggtggagacatctcgttccgagtttccgtttgtgacggctgacgcatgcaggggctgccatgctggggccgcgagctgcttacctgttgaacagcattttccccttctctgtaactcactccaacaacaactttcaccacattcttttcgattctttaggtggtttctcttccgggcaaaactcgcatcattcccttgtctgctgtaaggcgctccatcgttacccgttataacctagcggggcatatcttgtgtcagacccactcagggtcacgagcacttgagctttggtctttcagcggagaaaaagcgggaagaaaggtgactgcatactctgtttcaaatcataattcaactcccgcttttgtcgtcggtttctagctcatcgcga

SEQ ID NO: 2055 - DNA, 4032 bp, Toxoplasma gondii
  source 1..4032: mol_type = genomic DNA
gcaacaagtgcatctgcaggatcacgcgattagtgtagcactcactgttagccaagcagcaagcgcatatttgacttgttacctcacgagcgaggcccaggccgcggcgaccgggaaccgcgcagccttctctcagaagctgtgttacgctcaaaacgtgtacgcctttctgtttggtgtagatattccgttctgctgccatccgggtgcagtgctcctcgccagacaggctgtttcgccggtagcgcaacacgggtgttctgccgagagccgctgcgggcataaatcagacagcgctgcacgcactcatagcttttctgtagaaggcacttcaccgctttggagcgacgcacttcggccgggagccgccgccggcgcggcagccttttgcttgacacctcctcccgacgacggcgtccgtggcgcgatgcctcctgaaatactgattcgtttggccggcgctggcgagttgcggagcgtcgaagaagaggccgcggcagagtacgatctttgcctgaaggctggatctcgacaacggaaaatgtggacttttaagagaaagtacatggataacgcacagcacactgcgcactgggtagatgtggccatcgaggctgtcggcgccctcatggaaatgcccgaggccgtctggttcattccggacccggagacgaccgtgaacgagtatcgggcggtcattcaggagccgatgtggctgaagaaagtccaggcaaaattgaaggccgggctgtacaaactgccttatcacttcaagcaagacgtcgcgctcattttccggaacgcgcggaccttcaatcgaccggaagacagaccctaccgcgactgctgtgtcgtcgaacaaaagttcaaccggctttgggggtgcattaaccaggcttttcaacgggctgccgccaagtcgcgcagaactgcgacagacggggcacatgccaggcagtctccgccggtatcttcgagcgcacctggagaatcttcctcgacggtcagtgctgcaagctacttgcaaagtcaagtgtacgtacagccccagatgagctatgaacagcaacttttgtcaacactgccagctgcgggaatttcggtcggtggaatgggggcgcagccgacggcggagcgtctcgagcaagcggccagaggaaatgccacgcttggtgcgccggctgccttctacgagtccccaatcgattctcagggaacgggaccgtataacggacatcacgagtggaaggcaggggaggggatacaggctgggttcatgcctgcgatgcagcaagcacatcaaccaggaaacagagggcacatggagtaaaatgttgagtgtgtatcgagagtgcctctcatgttgtggcccatgtcagagtcgccgtgcctcttgtgcatccacttatgcatagtttcttcgatttcctcttgtccgttgtgtatggttgcgtcgcaacttgacttcttccggactaaagagcaggaaggcagtgaaattattaaactcccgttgtagcgaaggggcgctgcggctcgccttttagaaacaacagatttctggctcctcgcagcacgttcggtgggattgtactcgtgccagtttgacttggcgtctgccgtctcccgtcgcttttgcagtggtacgaggacttcctctgctcacactgcctcttttgagataccaggtcacgcaatgcgtggcttgagccggttgccggacagtgaagtagtttcttcaactgcactgctaccaccagaaaacgcagtccgtagtgacttacccactctagcatcccagagggacctgtcagctcacatacgacatggaacactgtcgacgtcttctaggcttcacagaagcacagcctctcggagccaccgatgggatatcatcaagcacctaacatctggacgggctcccatacgcgattcggcagagctcaccagaacaggaatgacgaactaaagtagcccttccctccagtggagaaatacaaccgacagctgcaggcccggagctcgcatatctgtcgggggtacaaatgagaactcaaagaagacacgaaggcgatggtggagcgaaatggaatagccgacattaattgaagcaagaactcaccaggtaaagcctcaacacagaaaaaatatctacgtggaggtgcccagtggtctctcaccaccacatcagtcacgaaggaaaatcattgcaacgacagaagtatggacaccgaggaacgacgagagggaaatctcgagatacgccccttcttcgtattggccagcgcattattcattttctgtgtcgctattgtgcgctcttttttttacgcaaccaccgtgagttgtatgacggcaaagggatgaagacaaagtcaccgacatggaacaaatgtgaaaactctgctcaaggttagataccggtggcgctgcggcattcgtttgtgctcgtgttcatcctcactgctatatttctgtttggaagcgagcctcggcagtcaagaactcctctgtttacactgtatctcccacttcctctcacctctgacagagaaaagccccccccccctacgccaactggaggatgtgaagttcacagacgcaatcggctactatggtcggaaaatgaggattttcaccgcgactgggttggcgcctatttgtgttgtagttcagagaagcgatttttgaggaaatatgttcaggcgcttgcaaaacgagcaacagctctcgcgctgtctgctgtgaccttgccgcggaccaggaccaactgcaattgataaagccattcgaatagacactgtccaactttatacacctactgtcgggtctttcagtttcaaagaaacttcttttccggtctagtttctatcttgtacccaacaaatggttcctgacccttttcttcgtcccaaagtataaagacagtggagtgctttacgttacattgtttggaactttcacttgcacagatgcccgaattcagaaaagctttttgcaaagatccatttttccgcaagtgccttagattaagtaatcgagctactagaacactgttgagggtccctgaatgtctgtggccaataaacaaagcccctatacgaggggaaaggcctcacagagagtggttgctcacctccggatggaagtgacaattgcctgtttggcttgacatgatctgttctatgaattgcaaccggacaccggtctcatagtgggaacattggcgatgcgatgtcaacaggggggccgggagtttgaggctccgttcacgcaggcatagttcctagtgtccatcaccagccacatccggagtccatatacaactactaacttcctttctctcagacactggagtctcacaaaaacgcgttttccaccagtcattttgtcgatactgcatggccccgtcctacctcacgccttgccacaaaggaggcttcgacggtcgtacatttcttcagtctgctgcgacgtgtttagtacctcaaccatgtagtaaattcaccctcttaaacagttgaggtatccgtgaaaggtcccttgagaaaacagagggtagatggttgttgtactaaagatcgaatactgattttgtccaatcagccgcagtgtctcttttccatgccagtcacgtcagcggtctagcagagaggggaggccgggtttgcatgcttcggtttatagacggggccgctattttctaagctgcatactgcggccagacgcggacgcgtcgtttccgttcctcagtcactttccttgattgaactgcttttcctgcgggcatcccatgtcctgatggcatcccgtttttatctattctgggcctgcaagtagcgtattccgtcgcgtgcaccgttccctcgttccgtctgcgccctgcggcgaaagtgtcctggccgttctggcccgttctggcctcggccaccgagtttttttctgccgaacaggcggttattctcaaggtaatttctcccaggagcacagctccagaatctcaggcaatttcttcctctgccggagccagaa

SEQ ID NO: 2056 - DNA, 1153 bp, Toxoplasma gondii
  source 1..1153: mol_type = genomic DNA
caagcgaggtcatcttggctcttctggcaccgatttctttaaaatttccagggagtccgcgatctccacttcagtggcgtcgatcctcctcgcctctcgtcttcttcatcctgtttttacctgctgtttcatctcccttctccgtttccagctgtcctcactctgctttttcctccctcttcctctctctctctctgtctgtgtgtctgtctctctccctgtctctcagtcgccctctctctctttttctctctctttctctcttgaattcttttctgcgtcacatctgacgctcggcgcgctcccgtctcgcgttctgtctggctgctgcctgcgcaacgggaggccttgccaggaagtcaagtgcagtgaactccaggaagtaaaacgcgcaggtggacgctgcacgcgcctgcagagaaaaaggcggcaacgggggcgagaagaaggacggctttcctgcgttctcagcgagttgcgaaacgctgcgggaacctctgcctctcaagctgctcctccctcttgaatatcctgaacctgtggcgcagtgcttcgctgtcctgcggtgtctctccttcctggctgagagctgcagcaggcgcgggggtctctcccgatgcgcggcgcccgtcgccgatcgaagaaaagctgaaagaagggcgaagtgacaagagaacgaacctggcagaagcaccaatggtgaagagaacaaaggaggagaggagaacgaaggtgtcaacagggagaagaccgcaaggcgctgcgagaaggtcggaaaaagcgagaagagccgcaggcgttggagacagaacgagagagacggggcgtctcgaaggagttgcagaggaacgacagacagcaggaagaaaggaaaggcgcgcagaagacaaaaaatgaaaatcagcagctttctttttgagtggaaagggaactaaaaaagtcaagatgagacagagaaacgcgtttgtccatctctgtttcacgctgtgaaaagaagcgacgaaaaggagacctgaaagccgcgaaaagcggcctctctcgcatgttgtctctcggctttctctctctcttgagcgcgtcctgaactgctgcgtttcactttctctttcttcctggaacgttttttccttagctctgtcggttttcattttca

SEQ ID NO: 2057 - DNA, 4164 bp, Toxoplasma gondii
  source 1..4164: mol_type = genomic DNA
atgttggacagttcgccaacgttacgggcacctcaaaggccatatactgctgcagaaggacgtcgtccgccatcatcttcttcagagcggcgaagacttcgctatccgctgccttattacctatgggaagtacatggaccttctccaaccatcgtttcttcactagctgcgaaggcggcgtcgaattctgagccccttctgcgtgcgtggagtcctcatttgcagaagcggagacgcctgcgtttaccgacattccctggtcaggttcaaccctgtttcgaagtggctgttcctcaccctccatcttgaagtcacctgttcggaattgcaggatccgggaaggtacggcggcgtggaagcaaaataccccgctccgatgacggtttcacgaggtgctacgtgaggctttcacgtatttgtttgtctcactttttcaactaatctgtggacgcaccgacgaaaaaacagcatgtgactgttaccgggtgacatgttcgtggaacagcggcacttgcagcaaaaaatcaaactggtgtctctgcctctgctgtgaagagaaactgggaaaataatcacgaagaggtcgaggattgagtctctccttgtttcctagagagatgcttttgtcttgcatcacgtaagagggatccgagctttgtgaatgtagcctgctttgtcgtagtaggtgcttgcatctgaaaggacatgccacttgaaagcgtcacggaagaaccaataaaaataaacaggcagtcccaaatgacggcaccgttcgagcattcgataagaagccgctagacccactcaaaaagggtgacccactgatactgatgcaccaacatggcagggatttaagcgcgatctgtttggcatgagacaagaatgaaataacacgtacactgtttagggggagaggatgtgactaggaggactctttttacttcgtaggtgacaaacactcagtaaatcttaagatgacacggcaacgacgcgcagcgtggctggctgctgccggccaaatcgaggtagaggaaaggcgcggtttgaatcattttcacaatagagagtgacaaaaaataaaaaaaacgatggcgccaccccccgtcactcagttgcttttcatctctggcgaatgaacgcatcgaaaacgaggaacgcaaccaggttctcacagctcaacaagcggcatgcgaaaaagctggacgccagacacgggcaaatcgcaacggcagtcattccgccacttttgtggtccagacctgcgcacatagagtgaccggtatggacaactacttattagagggtagggaaggaagaatttgccacatgggaaaacaaggcgaatgattgcgcctacacaacaaccaaacgaaactcgacactacgcacacaggatagacctcggtgggaggggggaacagcggtgacgtctctccagcgacagaatgttgtcttgtcgagaaatgcctccgcatttcgaaagagggactgagcacgaaccgaagaaagttcactcgcggaaaattatccactgaggacccagcgtgtttttttcgtgcttgctttcgattacggagcggtgtagccgagagcatactgacttcagcaaatgcgggaccgcctgtgtgatttaaaaccgtcggatacgcgaggagtacctcacttctcaacagacaagagtgcaaacaaacatctcttcacgacccaacgatgtggcagtggatattaatatgtctccgatgcacatacctgtcagagtaattaactgtcgaagaatgcgccttctaaacgctgtaatccaggcagtaaaacggctgctgggcgactccagagaacttagcagctaagattagcaagaaatgtctttaactcatttttcaatggaaaaccatgggaaacctgtagagaagcattttgctcggcactttctggtgtctcaggaggagtgttctgtcgcttctccatagcttccgtagaatcaggagtatggactgaactgtgagcggcaaacctgcacaattgctaatacccgcagccgtctgccacatctcgtgaacaagagaagtaccgcactccagcattctaccattcttacaagcacgtaattcgagacctctgacacggcaaaaggagttgccacctcgatagtggactaatggactgagctgtgtcaaacgacgcactcagcaattcttttatgtaaaaggcagccagcactccaccatctaattcaactcggttcctttactaaaaaatgaacacagcctaagcagaagaaaacagagttatcagagcccatcgagcgaatgtattttatgggatttctgtgttagtgcatagttcattgagctgaatggacacattttaaacaacagccgaactggagacgtgtcacagaattcatattgagaaccacccgagtctggggaagcagtcagccttgtctaccaaacgtagcaccagtttccagattggttacttcgcccgaaaagctgttacgcttgaccgtcgtcttatgccgtacacttatctcgacgctgatgatgccgatgtcgttgactcggactcgcgcaatctacgcggaggaggttttctgtgtctacgcgtgaactttacctaaagggccgctgatggtcgtgatcagtggcgtcattttctaacctaggcctgcaagttgcaggatatgcttcctttttgacgaaacgactgcccactgggagagaagttcaagaatgaactcacgctcattctttcttgcgagggttcactgtattgtaccagatcacgcattttgccctttcccctttgttcgcgataaaacaggaacggccgaaaatgaccctggcagccttggaaattgttcccttttagtcgcacaccacagaaacataaccgcgttccctctccatttcgatctcctgattttctaagaaaacggttcagttctgcaaagttcccggcacgagtgtgtccccggaactgttgcaactgccatgagggctggaggtaacctttcttcagaatatccatcgtttcgagggtggccgccttcgccagagctctggtagggtaccattcacccatgtctttccatcaaagtcatttcgataaatctcagcttcttgcgctgaagttcaatcctttcatttatccaaaaaactgctcatgtctgtatcccagacacccaagtgacggagggctgcctacttgccgccgctttcgcagtctggcgccggatatgggaggttgttataaagggattagagagcaggctcgtctcacacacggctacatagcctacagccagttctcttgggcattttgataagaaagaaaggttgttcatgagttgtggcgaccatattttcttgacggaagccttccagccacccgcctcgcggggtgcttgtagcgcgccgcgcatgcgttacgtcgagacacagtggcttgtttttaaggagaaagtcgctttaagtagctggcttaacccgggcttgttcttcatcatatcgatgagagctaccatttgcgccaaatgtagagaaaatggggcgtcacagatggcaaggctccatcaatgaggagcagcaaagactcgatgtgtttgtgagacactctcttcctggctctggagagacctggcggtgtaagtttcacagaacggcttgtcctggtttcgtttccgttttttttcgtgactataatttgaatcgcctctttttctcacaccattcccacgtttctagaggatcgtcgtctttctcccaggcaaagccacagtacaagcaaccgactgtggctacattctgctgcccagtagagtaggcaagaggccgactgttgttgctctaccaatcttttccgaagtatttccgcgcattatccaactcaggctgccactcaggcagttgttttgctgtgcgctggtcttcgtaaatatcgaggcactacgtggtctagtcttctacccggatagctggaaaacggcagttacagcttaagctgtctcccgagggtccacggagcccggcgtgtcgagacagtaccctgctgatggcgattgttatcgttcgttccttctctactcgtcggcttcaccggtttctttgtcgagatctcgaattttccccctttccagtaatagcttgcccccatctccaacca

SEQ ID NO: 2058 - DNA, 2542 bp, Toxoplasma gondii
  source 1..2542: mol_type = genomic DNA
cggcgacgtgaagaacattgcgtttcaggaaaaacagtctagaagaaagaagaggagaggcgtccggcaacgacgaaaaacagaggaggcatgcggtgcagggagagcggcggcgaagacgaggacaggaagaactggaggaaacggcgaagacggcaaggaaagatccgacagaaaaaaaacgcggggaggagcgagagacgccgaacagggggagagaacggagaagaaggacaggaagtagaggtcgaaggaagggagaaaaaagacgagagaagaagcgcgcgcaacggcacagccgaaaacgcacgcaagaaggctcacgcagaaaaatcctcgacgttggagagaagagacacagatcgaacgggagtccaagtcgatcgatacgcaagtattttttgggggggcctgcctaccctgtcgctacggctaaggcgaagaaattcacccgttacaacgcatgcatacgcgtatgtatgtaacatacatagtagaccgtatacatagacaaccttatatataaacgctatatgttatcaccagtactggcttacagaggcgaaagtgtttcgtcaacagtcatccggatctgatctatgtccgttccgtcagtctcgaatgccacgacattgtttcggaaatgaaacaaggcctccagatctgtctcgtgtggagagcctcgagcgtgaaaagaggtcgaagttgccatagacccaagcggagccgagactaccctctcaggcgacctgctttacgcctgcgaggggtatttacttccaccaaaagatccaagaaacatcgagaaaaacgggcagagttgcataccgaccgagtacaacttcgggggaaaactcacttcccttccttcccccgcagtcgcccagcgtccgcgccagcccccgcagcgaacttcatgtcttttccagcttctcaaaaaggcacaaaacactctttagctgcgaacgcgtgcagctggacacagaccagacccgacacgggtgctgaacggtaatgcaaactgtcgggaaaacctctccggcgcgaaaacagagatttacacaccgttgagatctgagtagcggaagtgcatgcgcatgtgtgtccacgagaaaggaagattttctttcgagaacgtttccctttgttcgcacattcctacgcgggctgcgtgccgcatgcatgtcgagaggactgcgttcgagtgctctttcgccgttgcagtgctggacattgcggcgtgggcaaaggatagaagtgacgacctctgacatggcagtgaaggtggcagagactcgcggaaaatccaaaaactctctgccgtttcggtcgaggaatcacctttctttttttcgtctctggacccgcctccgtggtgttcccttgcccttgcaagccgctgctatgtagctcgagggtcgggagagactcgtaaaatcgcagctcagctgcagcaaaaccgtctattatccggaaagctggacgaagaggggaaaaaagcggcggcgaaaacttcaccggtgaaaagggcagcgcctcagcggtgtgctctttctgccgcctttgtgagcagccggagaaacgcgaggacttgcgacttcccgcactgagacacatcagaagcaaatggggaagccgtgtcggaggaaaacgaagaagcagacacgaggaaagagagacgcgttgttcagctttgttgaaagcccagtttccttgccagatcggggttaaccgctcgactctggctgagcgttcccagactcgtcagcgtttttctgtttcacagaaagatcccgtttttcttgtcgagcaggggagagtgtggcgcagagtcctccgttccccgaactttctgactttctccgccggcgcttctgtctccgtgcctaccgacgctgatgtcgctccataggtgctcgttcgggagcaatttgcgtcttccccgggagtccccttgagtccatattttttccggtcctctcgagctgcgtgggggtagaggtgtgtctgtgtttcctttcgtcgaaaaacgtatccaggtttctttctccgtggtcggttggaaaatctcggcagcgcgggccgtgcatgtgaaacaggcaaatgaagctcaagggagacgcgacagtcgtcgacttgtgcagcgctttttcgtcttcatccacatttgagaagccgcgttcgattcgtttttaggcacttctgatttccggtaacttcacactctctccgttgtcgctgtagtcctctcttgttgcccgccccttcctgtgctcgtaacagtcgtagacttttctctccccctccaaagctgtttctccctcccttcttcctccttcaattcctttctgcctgcctctctcttgcctttctgcgccgttccctcgcaactttttctacacctctgtgcctttttcggtgctctttctttctgacgggttccttcatctccttcttccctgcagttttccccttccttgccgcatttcctccctttttgtacctctctctggctcttcgccgctcacctgtctcctcacca

SEQ ID NO: 2059 - DNA, 1497 bp, Toxoplasma gondii
  source 1..1497: mol_type = genomic DNA
atatacatatgcgtttaaatgcactagtagcatggcaagatgataaagcagctgcgtgagacctgcggtaagaaacgaagaggacgctccgttctcccgtatactgtttctcttcgtgagagcgagacttacttagggcagaggcctccctttgttgctttgttctgaccaccaaggactgaagggaaatgcacatactcgaggagcctcagaaaatcaattgaaagaacatgagagtaaatatcgtcgtgccagtagccgatttcccgtctgtccgtttttgcgttagcctcttgcgcaacgtacacagtaagatggtattccagtgcagttctgcaaggtgccatctcacataacgcaaactcgacaacctacacgcgggggaagtgtacccgaccatgttccagcagtacagcgaaacttgcctgctcccaccgttccctttctacaggttcaccatcgcgttggtgaaacaccgtggaacatcaccacggttcctccttcacggcggcacgcagccgcgccttttctaacgcagcttcagaagacgagccgcttgactttttttgctacttcgtcactatgcttgagctgagaaggttcgtcgccttcgacgcgttccccacaaacagcgtttgaacaacacggctctttgaggaagacaggtccgttgaagtcatcagtccactataaagtcacgttttgttggcttttcagttgtgagtctctcgatttgcaactgcgtctcttcatcctcggtgacgcgtgctctggaaaagaaacatgcgttcagttatccttttgctctgcggctgaagagagctgcgactgcgtccgcaactcgtcccgtcgcatgatgccgccctctggtccacctttctccaaactgggaacttacacttcttctctgtctcgagttcctcgcctcttctgcgagcttggttgatttcctgctctttggtcacgcccttctggcgctgcccagtcttattccagctcacgggcgtccagtcctggaacgacatcttgagtggagaaacggaggagaaagggccgacagaaaagggcaaaaaaacagagacgaacgctgcgcgctgcggaaccagacctgcgtcgcccggaagaaaggattctctgcagttgaatgctgcaggagcgcacaactcggaactcccgacacaccgagaacggcgggtgggaacaaaatgcgggagtgacgcgaaggcgaaggaggtgctgtctcgacagacgggtgtggggagagttccgcagaagcgtcctcaccaaattcgaacggacgaaaaataaccggaaaagaaacggaaattgtggcaaccgtcgctgcaaagtgaccgccggaaaaacgcggggcgtccccggtcgagggagttgcatcatttcgtgaagccggagctcttccgcgaaaagttgtctgcgggcggcctgcatgcgccagagcgccgatctcttgtaaacgctgaacttccggcagcgaaa

SEQ ID NO: 2060 - DNA, 2359 bp, Toxoplasma gondii
  source 1..2359: mol_type = genomic DNA
gagaacaacgagaacagcgggcaagagagaatgcagaagacaagacggcagcaggaggtgtgtggcacagcctcggcgcagtgagttgaagattcttttagaatcgagttaccgctgatagaaaatatgtgccagttgtgacagttcttgaaaacggtgtggaaactccgggcaactcggttcgacttgaactggcgaagcacacaacaaacgtatgtaggtcagccggtgaagaggcaggttccgcggatgtcacaagtctacaggaaagtggagactcgccagcgaaggcgacagagcatctgccgcgatgttcgagtccacctcgtggagaagcagaaaaggaagaacataggaggaaaaaggagagaccagcagcgagagaaaccagaggagcaccctccgcgttgcgtcctctcctctgtcagctgcttcaatggaccagagtcccttctagcccaagctcgcgtctttaccggtctctcttcttgtgcctgttgcgcatctcaccgtggacagtccggattcgtcgagaaactggaaaacagcagggtcaaggagaggaccggagacggaagtctcccgcgtgttctttgtgcgaggagacgcagacaaagagctctttgctcctcctcctgccggtggccgtcccgccttcttcgccatccttctcagaaagcgcagaaacagcaaagcgaacaacgaagaagacaaggagatggccgacggtaagaagtttcggcagaaatagtgcagtggggtctgatggcggtactcgctccaccggtcgtctcctctacaatgccgggggcctgtgtctcgaaaaaggagacaaaaaaactgagaaagagacgagacaaaagagacaaacgggacgaaggaggcgacagagacaagggagaactggagaagcgtgcaaggcgctgctaccgctgcatggtgaataagtcagcagcgaggcagaggcggaaaaaacgagatgaagagaagagaagaagcagttgagaaaaacacgggagacgcagggacgcggaacgaagggtgttggtcttcggcccaagggtgttggtcttcggcaagctgaagagccccagaggtccgggtcccgatctttccttcgatgaggagatggaatacgaaaggaaaacaaaggctgataaaatgcaagcaagggagatctgccgtcgagcaaaacggattcttctggtcgtgtgaagaagcctaggcagcgacgactttgcgacacctgccgcggcggcagagaaatccagcgggaggccttagtttgcgaagagacaaagataccaggggggtcttaaacccagcagaatgcggggaaaggaaaagttttgcacgaaagacagggaaaggaaggctccgcgcgcgaaggcccacaaaccacctactttgcgacagaaagagggaaaacacgaggcaggagaccaggagggtagagagaggaaatgcctctgaaaggaaaggtgttgaaaagtcgagaatctataacggggagggaaggtgaagatttttaaagaaaaagtgacaagacaaggtggtttttctgcaatcccacagtgaagaccgggacgccaaccagagaaggccctcctctcagtgtctcccttttctcgcgagaagcgcgagcgtaccgtggcgcgtccacagccgcgtttcggcctgaaaaagaggtgctccaaactctcttaaaacattttccatctggtctttcctctcttcttggcgcatgcatgcttctgcgcagcccctctctacgtgctgcggtcggtcctgggcgtcgttcaggcgacactccgttcgtttcacgccgatagagaaatgagagaaagaaactcggatcagcttcttctttcgtcagcttgttttctggagtatcctccctttccctgctgcataaaatacctttctgaggcgctctgttctgttgtttgtcgctacaggttccggtaaacatatcggatgtcctatgcctagcgcgcagaggtcctgcaacctgtcgccaccttctcttctcctccctgccaccttcttcttgctcggctcccgttcctgtcacttggttgttgcctctcgttattctgtggcgtctgtttctcccggcttttcggatcttcccctgcttctgcgtgtgtccggacggattttttggctgtcttgttcgtcggggccttctcctgagtccggattctgttgttgtttttctctaatgagaacggcacttcactcacagatgcagtgtgtgaagttttgtatataaaggtggatctctgtcttttttctctcccggtcaccctgcatgcgccgccgcaaggtcggcaccggcacacctcttccgtctaga

SEQ ID NO: 2061 - DNA, 1883 bp, Toxoplasma gondii
  source 1..1883: mol_type = genomic DNA
gacaggcttctcgagagagaaggaacgaggtagagacgacatttgtcgtcgcaggagccgagagcgacgagacggtctgcgcccagtcgcagtggagagacagagccggacacgatcgcgtcctctgcgccctcgcaaacggcttgcagacggcgcgcggcctcatcgaggagaaacggagaagacgcagaagcagaagggaggtccaagaactcgccttccggtgtttcgatcacccagcgacagcctggaggggcgtcaggaaatccggcgtcctcaccttcttcgtcttcgtccatcgatgcatcgtcgtcgtccattgacgcgtcgtcgtcgacctcgctggctgggaccgccagagcagcatcaacgcagtgttcaggatccagaaaagattcttcttccggcacgaggaccactgaatccagaggagaaacagcagaagaagaagaggaagaagaggaagaagaggaagaagaggaagaagaagaagaggaagaagaagaggaagaagaagaagaggaagatggaagaagaagggtgttggtgttcgccatcgttttgctaagaggtgagagcgctgaagcgagtgcagacgtccgggagtggagagagcggggagaccgcgaccttggaaggcagaaggaaagcgagcacaaagatacactcgcttgaacgcgtcagacacaggagcgtcgccctctgttgtttcgtcgtttgtctcctcttcgtctctcgccttttcgagtctcccgtctttctggaagaccgaggtgctcttctctctcgaggcgctgtcgcgcgtcaccctccttcgcgttccggcagcgacagcctctccgtctcttctctctgagcttctccagcctttcctcgagcggggatgcagaggagagaaaacggacggtgtctcgccttcgtaggccgcgggggggcgcgaagccaacgcgtgcatgcgaaaggaagctgcgggaactggaaccgtccctactggggagtctgccggcaacttgaagaggaaggcaggtggaacagaaaaaagacggaaaatacggagagaaaaaagattctggggggctgttttgcggggagacgagacacaaaccgcgccacagtgcatgcgccctcgagttctgtgtcccggggctgctgtctccgagaaaagaagacccgtgcatgcgcatgttttgtgtaactgtcttccgttcttgtgattttctgcactgcgcttgaccgttttccttctctccttcatctgttcgtctcttcctctcgtctccttgtgaacagcttccatgcagctgtactgagttccagagagtaactggagagacgcgtcttttctctacagagcaagtcgctggcgcccagtgccagagtgcagtcttctcgtcggcaaagcttttctctctcggctctcggaaactggtcaaatgtacacgagggtctcgacaggagacaagtttctcacgcgttcctctcggtgtctgaatcgtctcctctccctctctcctgaggccgcgttctctatccaccatttacctcgggcgtctctttctctctagtccgtcttcctcgcattccttctctcctcgctctcattgtctttctctttctcggtctccttctgtcgctgttccattctcttcttctctctcgcgttccttctcacctctcctctttctctttgcgtctcgttctctcttcttcttccttcccctctctctctcttcttttcctgtcatttcctgcgtctatgtgcgtgtaaggagttctcgggggagatctgtcaccctacctccgcagccttcgtagaggaaagcgcttcgttcactctgtctgcctcgtcctctctgtctgcctcgtcctctctgtctccgcaa

SEQ ID NO: 2062 - DNA, 2241 bp, Toxoplasma gondii
  source 1..2241: mol_type = genomic DNA
gtgcatttagatgaacgcagtttcttttgtggtgacagaaatgctgccacgtgtagctcacgcacatttgcagctggggtctgcagacagtcgggcaggtctgccgactcaggcctggctgtttgcccgccgtgcgtcgaggctgctgttttaggaagaagcgggttcctggaagttcgcgaaccaagggaaagaccgttggatctctctgctggtagagagctccgaatgtttttgaagaaatgcatgtgggcaatgggtgagccgagcggtttcacagagggaggctctcggcgcccgcggacatctggaaagaagttagggttactgtcacatgcacagaacgcgatgagtaacagaacgcgatgagtaacggcgcggaaaagtctgcccacggacgtagcgacggcagttctgtccggggatcgtggtccgcttttgaggctccgacttgcggactatagttttgcgcaactttccgtggaaagcgaaggaaaactcgacgcacgctcgccgaaaggctttttaacgattttgcactctggcgcttcgcatggtttgacgaactgtggtgaagtcgtcgctttccgtgctcctcgagtggaaagacgcccgagtctgctcacgctctcacacagaccgaaaacaagtgcgctggtcactgacctactacgctgaaacgaatcggattcctggggcttcgtcgccttgcgtgaatctgcggcaccttgaatttatgataccgcactttccctcgttcactgccgccgttgtgcaacttatagtcgccattttctgctttttagtacgcgagtataaactcgtatgcacagatgggcattattgctcttttctgacatcaccgttttagaacgcagagaaatctgcgatctgaccgccgaggcatctttcttggcagtaccagtgggcgagtgttaaggcgacgatctaacaatttcgataaagccaagccacatgggttggtttgttcgcttggaaatcctgtagaaaccactcagatccaagggcggacgaagctggggggccgccgcttggacgctgaagtgagtgacagtgttggttgagtaggagcacagaaccagtccgggaacattaaaagggaaactgccacaacgaatgccacaacaattgttaagctagtaaatcactgtgcatttcactccatgtccgccttacgactttataatcaaacataaaaccaagttttaggggaatccgggatccttcttggcacggcgttaaatcctcatacgcacatacctaagaagattaacatgatactggccaagaatagaacagacaaaaagagtacgctgacgattctgcatttacatctggaacagattcagggtatctccgaatatacgtgttttgacaaagtgtgcgacgcaaaacatgaaagagcgagcgtagctccgcgtctcgagctttcgtagcagctatcgtccagctgatttagcttccacggtcctcttcttgctatcaaagttgcgctagcagcctttcgagactaagatcccgaaggattaaacattgcgtgaagaaagcgtttgccaaagacagagacgcgacatgggagtgctgcgtccaaccaaagcgtttatcattctcaaagagagaaccggaattccatcggcactaagccttccgcagaatctacaaaagtagtcaccttcaatgaaggatctcttaaggctattgtatgtgtgtgtgttgtgacagattgtgttaggacgagatacggaaagaagacaaatctgtttgcagggggctttttcaaggggagcatttcgctcaaactcttcgttttcctgtgtatcgatggtgaagcgtgtcgcgtcgcatactgactagcggcgagtggcatgctccatctgtcgatctcgcgtacctgttcccccccgaattttacgcttgttactcagcagttgacggctgtcacggattgaaacacgggagtttgtgactcattcctgcttcgggggaatacttttttttctttggctccgacaggtgagctcgccgaacagcggcggtggttgctgtcaagatctttagggacgcgcttccagttgtggacctgtgttttcccaagccggaaagcgaccgtcgcagagtgagaggggacctgacctctgcgattcttttcagcgtgtcgttgcaaactgccggcgggatatctcggcaagaacaatcagctgtacggaacgcgtggcacaa

SEQ ID NO: 2063 - DNA, 1680 bp, Toxoplasma gondii
  source 1..1680: mol_type = genomic DNA
gtgtctgtacaccgcaaagtcacagagcgatcggagagagacatggaggcagatcacggaggcactgcgagcgaaacttctcgtcgtcgaccaggggaacgctgcagcgaaagaactttgcagactttctcgctgaagtggacggaccgacggcagtgttcgccctctccccaattcacagcctcagtgcggcgctgcgcgtcgctgtacagacacctgaacccatgcttcacgttccacagagacttgcagacatgcacaggtctctgtcgaagctgcatgcacacaggagtatctccaagaaaaacaaggaatggcctcccttctcagacacacaagaaatagtacccacacatacatacatttgtatatatatatatatatatgtatacaaatatatatatatatatatatatatagataaatatatataaatatatatatatatatgtatatatatgtgtatatatatgtatatatatatatatatatgtatatacgtgcgtgtatgcatacacgtttgcctatacaacgacacccgcgtagtacgatccatgaacgtttgcgcctcgatttacatgcatcaagatcgaaatgtttctatcgactggcagtgccttctaacctgaagaggatagatccttcatcgtggttgagagattcgaggatcaagttcatggcgcctgcgcctccatgttttttgatggaaaacagatgcgccattttcctcacgatgctcgtctcggggctgcacatcgcagcctcgagttccgccatcgtcggcaagttgaagtgattctctgcatccatcccctgctcctcttcgggagcctccctgtccacggatgcttcatcgcacttgcacattttcaaggctttataagcgaggtcgatcctttttctctggaagtccaagtgtaagtacaccatgcagcgcagagcgcagagcgtcgagagaaaggcgagtttttcggacgaaaaaggcaccacgagagtagccaagctgtcggtctgtcgaatttaaaaatagttcttggacttcatcttcctcctcgaaatatccgcggcgccgcgacgattcccgcccacgcactcgcctcgcgcttctccactcaaattgacgctgtgggagagacagcggctggtttgcgctttcgagtaagaaaagaaagtcgctgcaccggacagagacggcactttagcatggttttcagaaaagttaaaaacgtttctgacagtgttgcctccgcgaaagaaagacactgtcgcactcgctcttgcgcgctttgtccctttgctgcgctgagcgggcagatgaagagcagagaagagcgacgactttgcgtctcagtcgatctgtgtcgatctgtgcctgccgcttttcctgtctcgcaaaaatcgacagacccgccccgtgaaagcgcgaaaaacagccgccgaagcctcgggagtcgcgctgcatccccgccttgtgttttcgccgccatccacacacaaacatcctttctcccgatctgctctttccagggaattcgacttttcccgcctctctcgagaccgcgctgccgttttcttctgagtcgaagccgcgctcgcgccttttttcgctctcgcgctcgggtctctgatccgttggacggcgagctttctttggaaatctgctcttctttttgcacacaa

SEQ ID NO: 2064 - DNA, 2026 bp, Toxoplasma gondii
  source 1..2026: mol_type = genomic DNA
aacgacgtcgttcttggtgatagaagatgtttgtatttacaacggactgcatatctctggatggacatttacgaattcgactttttccttgcctgcaagaccctccagcccgaagatccccgcgacgctgccggcaacgactgcagccaggtgacggctgaggacaacaaataaacggaagaccgcatgcgcgagcggaggtgcgctcaaaataaaggtgcggtgagagaaagccacacgcatccatcgaaaaagaacaaggagggatgctatggtcggaggagacaaagggagaaacagaattaatggagaaaggaacgaggggtcggagaagagaggaggaagcaagacagttaaggaggaatcacacgaacggagacaggtttggtggcagctggagagaaggaggcaaggccttcggtctaaaatgtccagaagagataggaacctagacatgggtacccagaaaaagggtgaaagatgcgaatttttcctcagagatgatgacatcttacttcaccgtaagttggcggtagttgtgagagaccatcgaagggcgaatgggaggtgactccgcctcctttttctcggctcttcctccagctaaccgtggagaacatgtggccgaagggtcggaaacagaagaagcctcgtccccatatgtcacgtcgccttcggctgcgttgcgtgagggcgcagaggcaaggtctctcatttgcacacctgaaacaccggcaccttccattttgcggaaaagtggaaacgggagaaactgacaaagaaaagaactctctctcttgaccctttcgagtgaaaaaaacgtcgtagacaaggtgggccttcgaaagggtcccggatgctgagaaaagcaaagaatttgagtaactccttcgacagacaccggcgtcgttcatctgcccaggtcactcggccaccacttgaccccagcttgttctgagattcgagtcagcagctgagtgcggcggctaaagcggtgagttgcaaagcacttttctcaagaaaagaaagcagtttcaagaccggttatcagaggtgcaaggcagatggtgacgcaggcgtcgcgcggtgattcattttgcaggaaggtcctcgtctgtagtttgtgaagaattgaacggaaaacaggtttatgccctaggtgcaacgttggatgtgaaaagccgatttgagagtcagaagcaagacaaggagatgataagctgacttggtttcacggtctgaaaacggaacaatgaaactcggatgtgcaagaaaaaggcgctggaaatgcggacgtgcgaaacagacgcgatgcagaggatcggataagggaagttgggaaaaaaaggagaaagaggaaagggtgacaagggacaacccgaggaaaaaccgtgcaaaagttgtgtttcatgacgacgtgtacaaggcatgcctgtggcaacaacggaggctctccagggcgcgtgatcgagcggcatgtcttctgaacatgcgcaagtcgatgtagaacgcgggaaacacatgtcgagtatgtacacctttttgcttcattacagtgagaaattgcacttcccggagcattcgcgtctggacagcggtcgtttatgtggtgcggttcttctcccgtttcgcgagtcgggtttctgtgctgtctcccacgcgacgcaaagcccctacgcgctgaattcccgtctcgatgtctcctgaacagtcctgcgcccgaaacacgtagtttggcgtatgatttcacaggtacggaggcgagttttcgtgaggaagactcggcggtgttaatggcaacctcaggaacaaaatagagtcttctctggatagctgaaagctccgtctcagcaacctgtgcccggcgtccacagcgtttttgagtccatggcaacgccggaggattcacggggtcgagaagtatcctcgccaacttcaatttcctccgctttttcgtggctttgattgccgcctttccccaagatccacgccacttctccggtccgcggttccctcgttcctgcca

SEQ ID NO: 2065 - DNA, 2604 bp, Toxoplasma gondii
  source 1..2604: mol_type = genomic DNA
aaatgttcgtaccgaagtccagagaaagaagaagcgaggagagcctcgaaaggactggtcctctccgcagagggagccgaggaagcgagagcacggggagagagacgcgaagaggtgacagacgcgaaaggagattctgcgtcctccatctgcccgtccgcctccgggggaaccttcgtcttgtctctctgttctgagttttctgtttgctggctttctccggtcctcggaaggtccgcgttcggcgccttgtcctctcctgtgagagatcggtcgccctgcttgtctccttgagacataaacgcaagcaaatgctcgcctggaggcgccctttgccctcggcgttgtctctgcacagtggcggagaggccccagcctgtctcctggctcacgtcgaaaaggccgaggcgcttcgcctgtgtccgcgacagcttcaggccttctcgccgcttccgggaccttctctccgacgcagaaccaacggcttgttcagaactcttctgccgcaaagagtccaggcgcaatgcccggttcgacaacttgctctccaccagcgtcgccgctggcgtctgcagcggacagagctgaatcacaccgaccaaaaggagacaagggagacaagggagaaaagaaaggaaatgaagagaaatggagagagaaaagcagacaagggagacaaaggagaaacaggagacacacgagacgatgttgacagacgagagaggaacgaaactaaaggaagaagcaagggagagaagggagggaaaaaagagagctgggggacgccttcgagaagcagaagactttgttcagtgccgctccatcggagtgccgcgtgagacggggacataggtacgaaccgtaagcgcgagaagaagaaaagcgacactgagtggactgcagaagaggaagagccgagaagagagttccgcctttacctcgagaatttcttgaaggaaatttccatctgcggcgggggacgaacgagatacagcgtcttgtcgatacagacaagcatacagcggatgagagagactggcaagtcctgaactcgataatcgtgtcgcatacgctgccgcaagctgctcctgaacagaagaagaagaagaaggaggagaagaagaagaagaagaagaagaagaagagccgatttttttcgattgaacgccggcagatggcggagaggaagaagggggtacgggccaggaatgatggaagggagcagagagcgttttagccttcttcttccccatggctgcgagagtcttcaaggagcaacatgaaaagaagcggcggacaagaaaaagagagacctctggtgaggaaggagagggagcgaacgaggggaaattcggatgaaaaaagctcggaaaggcgcgggcgggtggaggaagcgagagaagcctcggaggcggaaaccggagtcaagtgaaaaggagaaaagggagcaccgaaccggaagctcgagagacgagaagaagagcgcggacgcgcggggcaagagaagaaggtgggggcgaaaaagagaaaaaacggagagtcaaaggagaaacgagaaaaaaaaagcgaacagcgaaaagcgaaaagcgaaaagaagagaagaatgggggcaagaatcctcggcgcgaagagacgtcaacgttgagagacagcggctcttttttctcccgcaaaaagctcgagctgaatgctgtgcacactggaagaaaccgaagctagctgaaagcgctatcttttgagttcctttcctgctgtcttccccggcttgaggaaaacgtggagagttgaagcatctttttttttcgctggttctggccctagctgtctagagacggggacggccttgcggagaggttgctcgcggcggcttcgtcgtgcgtgacgcgttctttctctcgccttcttctctccttctcttcgctttcttcttgagaagtgaactgcagacctggaaatgacaacgcgttttctaaaggcgtccagacatccttggctttccactccagccggtctcgcctgtctccgggacgcgtcgtcacttctcgcgctggaaagtctggttcctgggtcgtctttcctcgtcggcagagtccccggcgcaagttctctcaagcctctgtctcaaggctaaccattcacagacaaatccttttcttgcgtcgtcgccttttcatgcctagccttcgctcctcaagttctctcgtcttccctgcccgccctctcccccccctcccgcctgtctggcggcaagttgacgagcgcgccggcgtgagctcttcgagacgcagcaatctccactcgccgcgcctccctccctgcgtcttcttcgtttccagcggagaaggtccacgcgacggcgagttgcgccagtcagcgcttgaagagctcacgccgccgtacatttgctgggaatccctcaaccgctgcgtggtacacccaggcagcttcgccgtttgcttgcgttcctcttgacatctcgagccgaaccgattgctgcagcaggggggaggcaaggaagagagcgtctggtgaccgacacaacgtcacaactgtcgaatgcctcccccaaggacttccaacgcagtagaggccgaaagtccgcga

SEQ ID NO: 2066 - DNA, 3125 bp, Toxoplasma gondii
  source 1..3125: mol_type = genomic DNA
gtagttcttaccaagggcattaaaacctgcaactacaccgcatccttacatcccatagaaaccatactgaccaaaataaaacaaaatgcctagaaaacatgataaattttgccgccggaaacccaacggctcttggagcttctactggtagacgggactgtaaagatttgatcggtgtgtcgtggatgcggggagagtgagaggggaagagctttgcggcgcgaaatagcaggggggactcgcagagggtgatgagccctgaattactgttacagggtgagatggaacaaaatttggtttgttcatcagctgggagtgctgacagtacattgatgctctcatggcccggacgaggttctccttatcctcagtgaatgttcgaacacgtccagcgatgtctgcgaatgtttgctgaagaggacaacatgtataatacagagacgaatgggatgaaaacacaccaatattttcatcggtgttgtcgcatcctatgtcaatcaccatcaaatatatcacaccgagagctcttcttacttgcaatctgactttgtgtcccgggagccagcgaacctggttgaacttctcaatatcatccaaagactcggatgtcagcgtgcacagagtctccagctgagaacagtagtaagcagaggtcagaggtacaaggcaacacgatagaaagacgcaaatcacaaccaggtacgcaaaatgctcgaacgaacgactgctacctactgtgtcaaaacccgcgttcgtgaagtgggctgcaatttccgtgggaagtttctgcgctcggaaaaattcgacgacgccctgcctctccttctctaggtcggggtctgcacgcacaggaaggtgaacaggagacgacgatacacacaagacattccggtgttgagagtccacagcgtacgtgtctgcatgtgttgagagactgtctggatccgttggaaacaccactgttaattctacccgcacgagattcgccctggaagcacactgaagctgagagaacccgtcttgcctgcattccagattgccgcgaaacccgatagatgctcagggtaatgcttgcagaggaagtcaacgatgaagaaaatgacattcgctggtttctcgtcttcaatttcctgctcgcagccagacatgcacaaagaatccacgaagcattacactggtgtatgcaaccggatttcttagacgcacaaaaggacataattagttcttgtacgctttgtacaaataactacaccttccaaacaaacattaataccactaggagattgaaatccaacaccttcagctctgatgcggacaacccagtagagtctcgtgcagtggcgaagccacttggatcctcacttgctgcattcgagcgaagagctgctgaacttgggcgtggaccttgcttggcccgccgacaggttttccagcagacccctttggcttcgcctcgtctgttcctgttctgtcagacatcctggcacgcgttgggacgtcaactagaagactgacgcggtcaaataccgatgaagctggcgtctctagccattcaagaaaagtagggggtcaaccgcgtggtcagaaatcgctttggaaggaagatcgcacagaagaagtcgtatttacaaactcgtcaaccgacaattgcctttcccagtttctgggttgttgccggacgaaggtgtcagccgcaagctcgactcacccacgcgcaagccgccgatccacgtgtcgcgaagttacacaagagacacgttggtcttcgagttcaaaatatccccgaaaatattcacaccctctaacaagcgacacctcttcctcggcagactggactggtttttggactgattcatgtgctggtgcctggtgagagggatacggtctctgttgcacgctttcatcagcgctgaagctcgcggccagagggctagccaaacactcaggataagcaacccgacaagtgcgaagctcctcaaattgagcatccgtaaatttctccggtcccaggttttcctcgcgcatttccggacttcttgttgccacaatgaactcaaagttcgcctactctgcgcgtctttgctctgcgccggaacagacaatgtcttacgccggaatccaggctgcgctcgcggttcgttttctctcggtcttgccagttcgcgacgaggactcggagcacctcgtacttgggggtacacaggtgtcgaacgcgttagcgcgctggggcgttgtcaaaaatacctggtagaaaattaccttgattgtctcgaaaagcctcaaacgctcagcgtttattgcgtgcttcttccaggcgattgaattttttgcaacctcggaatcacagaaatttcacacgcacacgcacgctgctgcgaacacgagtcacagctttgtctgcatgcaaacattcacactcattccaagccatatttgccgatggacgcgcttgtcgccttcctattcacttagagcgtgtgcgtgactttcgcggcaagcgtggccgtttctggagcaggtttccactagaatctctttgccttctcgggaccctcatgaacagactgcaatttcaacggcatgctatacagggaaagcctgcttgcctcacggttccccagctcccacgagccctctcgctttgcattccgccacattttgttttcctaatacggtctagttctctcctccgcctagcgcctcgggacaatgctgcttgctgaccgttccgcagagagttcaccgtttctgttttcgccccggcgttcaggcctctcgcagggcaaaggtagacctccacagatctgggaaaaggcacgttagtttttggcgttccttcctccgtgtgggttctactgtgactcgtagtctcctcctgttccttactctccgctgagaagcaaaacgggaattcctggggacttcgcactgtgtgtcagcgttagatccgtccgcacactgaattggaacccgacgcacagaaaaacatacatacacacacatatgttggtatatatatatatatgtatgtatgtatatgaggtatgtgtgttgacatttccggtggagcaaacccgctgtcccagcgttttctttcgaggacacacagctctgtttcgcggcaa

SEQ ID NO: 2067 - DNA, 1770 bp, Toxoplasma gondii
  source 1..1770: mol_type = genomic DNA
gttatgccgctatgcgtttcaacttcaacttcaaagtcacagcgtcctctacagtgtggtgcatccacctatgcagaaagttattgtctgcgtgacgcaacacacataacaacggttttacagtcttgtcctgaatcggttgctctacattgtctgccgataggaaaaggcctaaagtgcggcggggtcacttcaaatctgccttttgtgtgcacgtcgtttcaggaccatcgatacactgtctgggcatgacgacggaagcgagaagggaatgccaacagacggaaagcatctctttcgctcccattctcaacacaaaaggaagagatgtatgcctgaacgcaagccctgtgttggcatgcgcagtggaccagcccttgatacacaatccagaatgcgggaaaactctggggcggaacggcgcgtcagatagtcacagtaatgatagagtagaggtagacgtatagaaaaaagcacagagaagcatcgtttcagaagattcattccacggagggggaagcggtgtccttgcggaagacaccacgtaccagtcctctgcggggaacgccccgcgtccttgggctcctccttgaagagccgttacatgctgtcgaaaccctttgtcgaccagctgaagagcgacactctcctcctcgccctgacaagattcaaagctgtgtttctccgaagtcacagggctgttggatgcctccacattgtgccgtcgcgcctgactgtttgctgtcatcgttacgagttagtgacacgattgacttctgaaatcgctacggattgaagattagagtaagcagaacacactgcaaaagcgattgctcgcgtgatggatttcttgctgaaacagaacactactggcactcaaacgaggcgggtggtgagtgtggcaaacaaccattccttatagaagatgaggaggctcgaaagtacgacgtcattcacgtctttgactcttcgtccgtctcctggcttcccgttcggttcattcgcgatcgattgtgatgtatttttcaccttggaaaaagcggcttgctatttcgcggacggggctggcggatggaggcctgtctccggtcccagtcaattttgacgaaaatagttaaatgcacaaatccgttcgcagagatcctgacgcaaaacttagaacgtggtagaaggttgtgaaagggatcgggaacactacagactcagaaaattgatgtgttgactgaaagaacacgaagtgtgctgagcgaagcctctgtggaagacgacatgcgtgtagtcgctggtgtccgaactgtgcagtacgtcgattcgttcactaagccagtccagcaacaaacacacgaacccctctattaaacgcaatggaacaattttcaaacaccgattcactcaaagaaaaacacgagacacgacggtgaggtgatggggggtgcgatgtctccggcgcgaagtgttcaagaaactgactcctgttgttgcactctgaccctttttctcaaactgggggggggggtggggatggaaagacctgaaacggggagacagcgaagccagaagtggataccggttttcagtgcgtactgagagtggctcttgaacttttcagaactttcttggtgtttttcccttctctttaccaaaagttcattctgcctcagccgtcggcagtttaaaggttgccgtttgaagctcgtttcctgttgtttgtcctttctttcgtttcagtccccgcatcttggtgagcctttgcgatatctccattcatca

SEQ ID NO: 2068 - DNA, 1676 bp, Toxoplasma gondii
  source 1..1676: mol_type = genomic DNA
gagagcgaggagggacaaggaccggagaacaatgacaagagtcctcagcgcgacggcaccggtcagatgaggacgatgaggaaaaaccagcaggtgtgagagatgaagacgaagaagtcacgcgcaggaaagaaagcgaagagaaggaagagtggggaagacacgagtgaaaagctgaaggagacgagagcgaagaggacggagaagaaggcgacgcgacaggagcttgtttgcttgctctctcctgattcgcggcgatagaaactggcgggaaagggagacgagagaaatctccaaatcgcctgtgtggaactgaacagcatacggttttgcagaagagaaggttctctctgcatgcgatccggcgtactctcgccatctctctgtcggcctctctctgacgcagaaccgcgtgctgtacagaggcagaagctacgctgaagcaaccacagcgaagagcgcgaagaaagaggcgcagagaggcgagcaagcgaagagaataaactgcacaaaagagcggaaggggagggaggaagacacagagagaacgagcgcagtctgagaaaagaactgagggaagagcgaccaagagaagaaggagaagaaagagaagaagaacgagaagcaggagaagaagaacgagaagcagaagaagaagcagaagaagagatgggagatggcgaagaagtcgaggtgcaacacaagggagagtaagacgtagaggtggaggaaaaagaagaagatggagaagaagaacgagcagaagacgctccaacgtcagcgcctctgacggattacatctcaagagacacgaacattccccgagctcgtgtggagagcgtagcccgaggtttgggaacaagaagagaaaaactgtgactctttcttcttcgaaaaactggaagcgaagagtttctttcggggaaattcctgaaaaaagtcctctctcggcgcctcttacgtgtgttctttgcgcggttctcagcagtctccaggaggaagaatacagcgtctctctcagctcttagtccagtcccgatggagacagatgtcctgcatgcggctgcagcgattcgttttcgcgacttttctttctcttgaagaggttatctgtttgaggcaacatggcatttttctccctgagacgacgacctccagttttttaaaggcatttccctcgccgagagtcgtcaagaagcagacttgctgcggcagtgcctgccttctctcagatgatgcagccgggccgttggtgtgtgaaaacatttctcggtccgcaagactcttttcgccccgccgcatgccttttcttttttttttctttttcttctgaatattcaaaggatagaaagcgtctgtagagcgcgccagaaactccttcgtctctctgcccccaggcaccgtccacacacaccgaggtcacgagggagggagaagagagcggagaaggtaaagaaaaggagacacagaaagagaggacagaaggggaaagagacggaagaaacggagagaaaaagaggaaggagagagagaagaagtgacagagtggagggagaaggaaagagagagagaaagaggggaaaagagataaaagagaagagagggaggagaggcgagaggaaaaagacagagaagaagagaggtgaagagaaactaggaaaagccaccggcagtga

SEQ ID NO: 2069 - DNA, 760 bp, Toxoplasma gondii
  source 1..760: mol_type = genomic DNA
gcaaagagttttgaatatcgaaccactcaactctgcaccacgttgttcctgtggtcttcatattcggccgttttcttcataggttgtgtatcttcttcataccacctacgttgtttttcttcaaaggtcgtatttccaagaactggaaggcgagttcctggtgtctcgtaccacgcttcttgtgaagacacaactcagttctcaggtctcgttcagataaggggttttccatcgctttgtacggcggggtggttcaactagagatgaaagaaacgaaagcaaaggtatttgtttgccgcgatctctgctccagctatgaaacatctgggcaggctttggaagacacgttgcattgcaagagtagaaagaacctgacttcggagttccctcgctactttcacaaacaggaattataggtactttaactcgcgcttaattttactagcagcaactctctcctttcgccggtgtcgcgacgcggaagcaagcatcaaggaaacatgcggattttccaggtttccggcagatctctctggaagaaggcgttctctcagacgaaccgccctcgacgagacagctcgacatgcggtcgccaagattcctcagagaaacagcatggacatctgcaacagcatcttaaacctgcattcacacttcgcggcgaaggcggtttatcggatcaccgagcttatcgagtcaaccgggagacgtggaacactgtagtgtgaatccgtaccagcactacgcggaagtgagcaga

SEQ ID NO: 2070 - DNA, 1806 bp, Toxoplasma gondii
  source 1..1806: mol_type = genomic DNA
acgtccacgaatccgtggatcggtaactcaccagcgaaacgctgtttctcagacgcgggtgcgacaccactgctcgcagttcgccgcaaacgcttcctcgaatcctcagacggtcccgcggagttccctctgccggtcttcgcgttcgctttctcgagacctgggtcagcccgtcgctcgtgcagacggcccgcagacgcatgcagccgcctctctcgtgattcttcgctctctccgagacgcgccgaacacccagaagacgcagcagttcgagcacgcaaagaagaagaacaagaagcagacgcacaggcgaacggtgaagagagagaagcggcaggcgttgcctgcgagttcccagtgagtggcaacctggataccgactcgtctgcggcctcgtctgcggcgcatgcctgacccttgagtgcatttgcagcgtttcgttgcgactctctgtctgggcagtagacctctccaagatcttcttcaacggaggagaagccggttgcgcttcgcgaggaaaccgcacttggcgaactcgccattcgccgtttctctgcagaaaactctgcactcgaagactctactcccgaccgcgctgcctcttgaccgccgttcaagtggcgactggtgcgttccgccttgggtttccttcctcgctttctctctgctcggagtcgttcgctctccgcaagcagaaagtcgctgacgagcgtcgccatggtgaaggaacggcaagaaggcaaacggataaagcctccgtcctagcgcatgcatgccgacgcatgcagagggccgtttctgcttgatccggaaaacgttcgcgagcttgcaaaagtgtgttccccttttcaagatccggatgtttgagaagtgctccctgagaaacgggttgctgtcgatcgacttcttcgtggaatggcgtccggcgaggaggcctcctcgttcttttcactttgaaggttgaccgtaacgttgattcaacaacgacagaacgctgtgtgaagttaacactgtgctcgttgagcagtggtcgagcgacagggttccggttctctctccgctgcgtctccgtctctctgaggaagctcgtcaaggtaaaaactggagggaactgcaaagacggagaaacgaggaaaaagcgaaaaaagctctcatctagcgacattgaggccgctttgccgggcgcattcttctgggagggacatcggagaaagtaatctcgagttcttcagaggaaattggaaaagacggcacaaggacaaaccagatggctttaactgtaaggaacaatggcgaaagaaacgaagaagagaaaatgaatgcgcgcgcatgcaaatgttgagagactcaaaacgttctccgcaagccggaggcactcgggtagctcgattccccccaggcaggaacgagtttttctccgccttggatcagaaaaaggagtcttttctttccagaatttccttgagaatcagagtggagttgagaaagtgaattcaaattcaagaaagaaacgcatgcagatctgactgaacagctttatcgtgtgggtccggcgttgcatgcgccactctcgacagctgcaaagacaccctttttcgcgaaacatgtatattcaaagtgaagcacgcctgtaaagcgacgccgactccccaaattcacgtgacacttctccgtagtcctccactgcctcgtttctgtctctggtgtcccggctgactggccctattctctcactcttccgtgtttgtctacacgcgagctgtcttgcgagcacggtgtttctctcgtgctccttcccctgaatca

SEQ ID NO: 2071 - DNA, 2434 bp, Toxoplasma gondii
  source 1..2434: mol_type = genomic DNA
gtctgcttcccgctgttggtatttagaaatacatgcggaacacacgagaaaccgtagcagagccctttcgggatccgacgtaccccctagttcacgcatgttatggactctgacggtagcatgtttcttctccttcaacgatccgaaacatcacacatgcagacctgtctacatacacatgtcttctagatcaagtcttttgtccagtagcacttcttcacatgcttcatacccccgagcttccccacagatgtgcacaggagtgcggatgtattgaagtggccgagtataaacaaacatgcagcccttttagattcctcttttaatttcctccagttctgtgcatacaccagaggcatttcgtttgtacgcctaatctcaggagaaacatatgcggaaacgtttggtggtttttacacacgaaaatagagatgttcccagagaaacacatagatagctgtgcacgtacgacacttccatctttgtaggtccacacacatatgttgatgttccctctatctattttcgtgcatctgtcttgttttgttccttcgctagaaaaatgcattgtttcgccaagttccattttctcggcagcttcatcttcaactaaggtctcggtgtccttgacactagcatccctctgccatagttttgcattcaaagtgaacagatatgtggatgccgtgcatttatgtaatgatactgacatatatatatgtatacatatatatatgtatatgtaaatgtgcgccattatacgctatggcgcaaaacacacgtatagcgcatccgcggacctggaactccataaaaccggcagaccttgctcttctacccttctgacggcgtcacatgccagtggcagtaacgcaactgaacaccgtaatgaacgtgcagagcaccgcaattacatggatagaccaactactcgcccgtaaccacactcactcaataccgcatttctcccctgcttcaaactactggacagttttctcccctaatgcctcggtctctgccgggttgttccagcgtcctctgcaactgtgcatccacttcttccgttcgggctcgcgtctcttcattccccgtcacagaatgccaactaacacgtatccccgtagagttgaacgctacctgagcacgtactcggcctcatcagtatcaaatgtcccttttcggggactcatgcctgaccttcctaatcgctgaagagcggaacgctaactgcgtgccaaagggctgagagaagtagcctctttttgcggaactgaaaacgccacgaaaccaactactatagccggtctgccgagcagcagtgaactcgttggcggctcaacgcaccacgttacgaggattctgtgtgccttgattcaccatgtatagccgcagcctttgggaccatcttcggaagaagtttaggtgatcatagagccctccttctcttggtgaaagggctggagacattgactattacagtcagaaaagcttgctttttggtgcggtggacgggaggcacagcagtggcccatccgagtttccgcaggagacagaaacacgcttagaccaaaatatggatttcgcctctccacagcgtcaagccttttcaccctttggccagagttactcctcctttctgttcccaagtttccttcggtccctctaattctgcctcgcacaatttaacatatcatcgccgcttgacaacatctgtgctgtaagcgacgctgcacgtgcggtgtacatacaacagaggcggttgacagctctggcctcatcgacactcacgagcatacagtaccggagtttttgcggcttttcttaactgttcctctctagaattaagttagctattacaccctgtatgtgcgagagattctcttcggtcctgggttgagcgggtccgcgagaagtttcggttgcaaagaacccttggggaaacagcgaagagccaaggctggctggacgacgttctgcgatactccggcttttttccagattttggtccgcggaaagctaacgaggctgaaatattgaatactgcatcgctacgttttcttgtcattttttccttcttcatgtctcgtcaggcgagacacagtctagctccgttactaaccgctgtttgtgtgttctgtgtctcagtccctggacggaggaaatgacacgctagagtccttgttttttgtcataactgttttcccgttctcccctttattcactcttcgtacacctccgcgtgagcaaaaaataggagacgacaagtggaacgaggtccgtttgttactcgtcgcggccgatgcgaagtcttcatcatggagagttcgtcgtcgacttggaacttctcactatcatcttcctgtacgcaaagttgaggaattcatctcttgttcgttgtcgctgcgctaacgttttcctctttgagctggaatta

SEQ ID NO: 2072 - DNA, 1939 bp, Toxoplasma gondii
  source 1..1939: mol_type = genomic DNA
aggctagacgtcaatacacttggacacagatctcttacatacttcgcttcacttgtgagattgcatgcagccaagtgtgaaaaagtatgcttgggaaccagcctgttacgaagttgtatgtatctgtactttcgcctgcgtcgttccacgtagatctgcggattcgatcttccatgtctcggttgtcacgttgagttgttgaacgagtgtcgaaccaacaactcgttctccagtcgaagcgaagttctacaccgaaagagcagctcgtaaacctatcacgggctcctcgccagtcgcacacggagccacaatgagtgcatgcagccgcaggaaggcgctggctacacccacgcatactatcggtctcttgatgagttaaccgtgtttagaaacgaaacttgatgccatgtttgctggattcgtttcccttttagatcggtgaccagacggttttgagccagatctctgctctggcgtccgaggtgcagagaagtcacctccctattcaggccattgcagataaacttgccgcctgctttgtgcctgtggtgttggcgattgtcaccctcacgctcgtagcgtggtcgacggctgtcttttatccgttctcgacgaacctgcgttctcttcaacatactttccccggggacgacgcgaattcgccgactcgcgcgacgacacaacagtctcctctggggaacgagaaaacgttttttctctggagctccccgcgcggagacttcagcgggagggcccaacgcactctgacccagaaccgacagaacgggcaactcagtttccgtgcgagcgacgacccctgtgaagaggcgggggacgaaagctccggcaatttccaaacggcttgttcccttttcgctgacactaaaaggcacatgcaaacagagaacgaacgcaaaaactcgacgacggattcgactgtcggcagccgacaccctgggagtgcgagtggtgtagtacccgtggacgcgccgtccgtcggcattctgttccctgaattgtctgcgagtccaccaggagaaacctggaacgaaacaagcgacttcctcgttcctttcgaagacgacgcaagtaccacgaagggcgagttacccgtaggccttctttttccgtcgtttcttgaaaagaacgcaggtttcgcggtggaaaatgctgctgatgccagagccgcggaaacgcaagttgggctcttagacccgacttctcccgaagacagtctccactggaaactgtggatcttcctagtcaagtcactttttgttcttagattcgtcatcgccgtctgcagcattgcctgtccatgcgctatgggcctcgcggtgcccgtcgccttggcagccgccgccggacgcgcagccgagtggggcatcctcatcaaaaatggcacggcttttgaggctgcagggaagactcagattgttgtttttgacaaaaccggaacactgactacaggcagaacggaagtgaggcagccacatacacaaacgaaactgcagcaatttcctgagcacccatacttacacgctcatcgatgtgcacaggtgtgcaagagtagactcctatgcccgagtgtctttctctccaaatagatgaatatcgataaatctgtcgggtcccacaggtgagtatgaaatacatgaaatgcgcatacgtagacagcagagacgtgagtccagaagactaccaatgttcaaggatgggcactttctgagaggcgtcaaggtatgcatgcatgtatagcatatatagactatgcacagactgggcgtccgtatttccatttgtaggtaggtggttctatgagcctttcgtctctagatatcgtggattcgtcgatcgcacgatagcggctcacgtagagaataatagggaagtctggggattcaagtacttttcacacgagaaatcaatgtcagaagta

SEQ ID NO: 2073 - DNA, 1881 bp, Toxoplasma gondii
  source 1..1881: mol_type = genomic DNA
tcgtctttttcttttccctgcgagtcgcgcaagcctttcgacgatttctcgccgtctttgtctgagacgacaagaccatcctccgccaccctctccgcacctgcctcagcagactcgcgaagcgaatctgaagcggagggagaagaagagcgaggaaaagaaggagagggagaagaaggagagggagaagaaggagagggagaagaaggagagggagaagaaggagagggagaaggatgttgggggtagaggagagcaagagtttgcccggcgacgacaaaggcaccaggctgcaccatccatttgagagtgaggggaagcgacagagcggtcctgcgagggaggaagacgcgttcgagtttttcttgctctctacaggcttccagcgcattcgaagaaggttttttatcggggacgagggcatgcacccgcggggagaaggcagaggaagaagatgcggcgacggcagaagcagaggaggcgaaaaagttttgacacgggggtctcgacgactgcaccatgtaggttgccgaggacgtctccgttcgaatggaagggaggagcgcaggtttcttctccgctttcatctcctcaacagaccggaatcgtttcttatcgcttcgctccacctccccaagcaggcggctcgcgccccccgagacgccgtccgtctccatggctgctctgccctcgcctggaggtcgtggagacgaacggaagagcgtcttgcctccctggatgtctgtgcagatgcaagcacacagaacctctgcatgcgctccgcgaaacagtcataattacacatccgcaggtttgtgtccttccatcgaggaagggcagacgaaatgacggtgtctggcgctgtcgccttcgggaacgaacggcgagaagaagcgaggaagccaccgacgcaccagtatccttgcttcggaggcgcgcttccgtcgaggcaagcaggaggcctcgcgcgagaagaaaaggaatggagcgaaaacggggacaagagaaaagacaagaagcggcacagcgcagcggcgacaagagaagcgaagacggatgtcagccagagagagctgcgtgagagaaacgaacagaagacgagagagaaggagaacaatgccagctttctctccggcagaaagagcggggaaaaggaaaacagtaccgtggacaaaaaaaaagaagcgcctgtcgtcaccgaggcgctggcgtcgccagagtgtatgtacacatgcaaacgaaactgcatgcgcgcgggtgtttcaactggagcgtttttagcgtttcagcgagaaagtcccgcctttaagatccaggagaaaagagaagagagacattccccatcttttctgtgcacactgtattccactacaaacagccttcttcgcgctctttttttgtgcagcagaatctgctgagttcttctctccttctctcgctttctgtctctttctctctgtttctctcgctttttctcgctttctctctcttactcttttttctcaccgtttttccttctctctttccctctctctctgtttccctagccgcctcgctgcgactgtcttcgtctctccggctctgcatgcgactgtttcttggcttctgtctcgggtgtcgtggcttttccctcgctgcgtttttgcgactcatgcagccttccgtctccgttgctctttcgcttttccatcgagttcctcgttttcctcagtttctgttgccctcctcctggcgtctgtcttctccgttgtttctctcgcatctgtttcctctctctgcgcctcgacggctcggcctctggccggaagagactccagtgctgaaacagaagcgaagtcaagaggcaagatctccccaatatacagaacgaaaagatcgcaa

SEQ ID NO: 2074 - DNA, 2385 bp, Toxoplasma gondii
  source 1..2385: mol_type = genomic DNA
gctcatcttattataagcaagtgtctttattcaccaaaattgccggtcgcatgccttttctacgccgaccgagcttgagatgaacttattgacaggagcagctacctgccgtaattcccattctctgggtagcatcagtgttcacgcttgggaagcagcccgcaagtttgccagcgcctgtgctggtatacacataagagcgttctaccaagaacaggtgcccatttgtgtccggtgtgagttaagagttcttgatttaggatcatctgtaaggagacaatctctacctacaatgtgataattcgaatacattggtccagctctcatcttcatgatcttggtgtcggctttgtacagagggtatggttttggtcatggtgtatcagtcgcttcactagcataggtcacatgagtgtcctgaagttgtggtgtcgaagagactggcaagtgagtgggtttgtgatgcttcttacccgtcacagtgtgcagagtttcgcgctatcgcggagggcgcttcgttttcgcattcctagatatcgcgttttcgtcacgggaacaatgtaggcgactgtgtaacccatgctacagagatcacagcgttttagtcatatcatgtgaaacattgtttctccactagtttaataagtcatgctgctacactgcagcggcctcctctgggcgggaaaagcgccgttcaaagcctacgacgccgaatctgcgtgtcgttgtgtacgcatggatctccaagatccctggttgtcgtgcactgaagcccctttttagtgtggaagaaaacaaagtgaggctacagtgactgggaaaagagaaaatttgaagctatactcataatgtggtttgttttagcataggacgtggcttctcccgcgcctccccccgttaacagcgggaaattgtcttcaggcgcgtgtcactcccctcgtcttgtcttgagctttcctttgtcttacattgcgcaaactacctgggatacatatgtcgttgctgagattacgctcatgggctagaaatgttaggattgacattaaaagagctcgcgatacacggttaaacgacgagacaaaaagtgacttgttcttcgaaaacagctctcggcaaaaattcacgttgcttttctccgcttgaccagtgccacctcgctttgagggccaacgcgtttcccctttgccacgtcttttgacaactacgcgaagccattctccctacgggttcgtgggcacgatgcaaacacgcggtcaaatagctattacagttgacttgcggttgcaaacgtaaagttttgaatgtcttgttcttgactcggaagtgcagtggctcattcttttcttccaccgcccctccccccttctttacgcggttctcgggcggaccttacgctggtggacagagccccccctttttcgcagccgcctgttaccccttggacaaggcaaaacccgccgctttcctcagaaaagggaaacagtttgctatgaatagcgcatccttcttctggagaagagtccatcttttcgttcacagcatctcaggagaaacgtttttccctcttctatgtaactagactcatgtttttgcgcgtctacttgcgcgtcttctctgcatctgacagtgacctgtggccggtttctctccggtcttccttttccgcggagcaaaagcgcccatccttttggggttttcggaacgcattttcgggccgcgactcgctgttttctattctcaaagaaactgccagaacaccgaaaggatagattgcctgagggggcagactcggctgcaacccttcttcccgtcttgtggacccgaggtttgttgccgtggtcacctttcgggaaacgtgtgtacaaattgttcgcttaacacgtttcacgacttgcaattgctttggcgttttcttctgtgtcgctcgggccgaaagtttttccacgtgttgcgctttttttcttgtcttcgtcggcggctgtccctcttctttgggcacgaagtccacattccatcctactcgagtgctttctagtctgtctggatactcgtaagtctgttttttcgctttcggtgctgttccgccgcctattcttcggtagaagccgactttttaagataacatcggagcgaggtggccgtatcccgagtgggacgggcgcaagcagacaggccgcattctcactgtatctcctgtcttgaattataagcttctgcacgggctatgtatgcatatctcttcacgcagttcttgaagggtttcactggttctttataactgcagccggcagcacagaccgtcactgaggcacagctcgagccgactcagactgcatgcaagccgcgtacacttcattccccgtttttccttaccgttgtccacca

SEQ ID NO: 2075 - DNA, 2524 bp, Toxoplasma gondii
  source 1..2524: mol_type = genomic DNA
acaagcttccgcttatcctggccatcgaaaacacccaacgttttccaggtgcgcctgtggggattctcgagtgcggcggcagtgcgagtagttgcgaacgagactggaatgtcagtcagtgacacccgtagttccttcttgattcctggacagacacatgaacaaagatggcgtacaagccagacgcactactttcacagtgcagtggtcttcagaaaaaatagtttattgcagaaatcctggtcattcgctgacaacatctgtttctggggccttcttggaccttggtgcaatgacgaacagccgatctgaccggttccagaccaaaaacctacgtgcaagaaatatatcacatagcccctgttttggcgtgatcttttaccccacaccgtgtgtacaagcagtgaaacgagctggcaacagagttcgattcaatcagcattcagcaagaactgatatcccgcgtgaaaacaataaaagacgatatcgggaaaaggttccgctagactcgaagcaatggtgaaatagatgcaaaacacggttgtactgagttttcgtaggtcggttgtgacacggatagtctacagtagtgtctgaaaggcaaaagaaacgtacccccttgagtgctcaagaatgacttgtagtccttgagttcttcgcggagattcgaagtgtttgtatttgggcttggggagccgcagttgctaacatctccgggtacagctggagacaagtagaacgtcctggagccagagtacacaaaattggaggaacagtttcctggagatggacgagtaaagtcgaacgcatacatgaacagcgtagaatacgccaaggatcgacatcctgcattattcgctagcacaaaacggacccttgctctccaaacaacgttggagctgcgtccagccgtgttcgaataatcaatgtttcttggcgatgtttccttttgagttctgccagctctcttcgagaggcagacgcctgaatatgttcccccttcacagaaaactggttacgagttcacagtcagacgaactcctctcccttttcgatgtcgccaaccagctggttcgtatgctgccacggactgcgtgggtttctcagctggtcacggcacgaaacgtgagccttaccagtctcccttgatgtcatgtaccgtggcgtgaatgggaagatccgcttttacgccaatcgaacccagaaaaacaaggaaccccgcgacgagcggtagtgcagcgcaccgcctgcgcagcgaccccataccctccattgcagactcgcgccagaagaaatactagagataacggaacggtaacaaatcaagggaaatcaaaaatccatgtactgctaatagaaacgggaagctacaaggtacgaaacatgcggtccgtgcaccatgtttctagtggcccatcaccaacgtatcccaaaacgcccgctcaggaggaagactacatatatgaagaatgtgtagtgaagtgagagagaagaaaccaggcgacctccctccctagtgttcagtgacgttcagaacacatttctgctgccaagtccacggcgtttttcccccgcaatcacttccctggccgccagtcagctcgggaccaagccgagggcacgtgagagaatcgacgcggttcgtctcaagcgacgcgactctgctatacccaaaatggagatacagcacattcgcttagctcgctgtcgcgggaataagtgaaggaaacagatgaatgtcaaacaaatggactgagaaggcgccgctcatcggagctagcccgtagcgcaccccctcagggtccaggtggtcgaaacgctacctcacctgctgcgtatcgctgaatggaacaatcgacaccttcgatggcgctgccatgggcggtgccttccggtaggggaaacgagacgctacaaggttcttcgggtgacaccgtccaccgacatgcaggcatgtattcagcttcatggctcttgcttttccaatttgtgggtccagggccatcgttgtcagtctagaagtttccacaggtacgggaatgagtattttattttgagactctgcaacgcagcgagagtaggttgagtgtgatctttttttttgacacacgcgggaggttcgtgcgtcgagtcacctgctcgttttttttacgctgccagagatatggcaagtcagggtacggcatgtgcagcgtataagctgtgactgaatggcaactgtgaggacctgtttcgtaaactcgggtaactcttcgttctgcgcgagtgctgtactatgcaatcttgaggttatagcatgttccgcctcgtgagaacaacagcgtcattggtctcgtttagcatggcatgagtggatccagcttcttccttcgtgatgtagatcaggtggtggagtttagctggtgaaaattgcgcaccgttgtctgtcttcatcaccgcaaggcacttgatctcggtactgacgtacgggtacaatgcaaggcagtagtcaatttgcgtgcgtcgcgttttctacaggagttga

SEQ ID NO: 2076 - DNA, 2151 bp, Toxoplasma gondii
  source 1..2151: mol_type = genomic DNA
tccacagattttgaggttctcggaccaacgtttctttgcccacttacaaatgtagccttcccagcctttgatcatgttcccgacgtccgcggtggctgcgaggtagtcgccctccatttcgtagattttggcttcgatgtgttgaatgtcgctttccagtttctcctggagagaaatcatctcatttaaaacgggcattctgtgctgaaactggctcttgagtgccttctcccgcgaagagtggccagccttcctcccggatcctctatcccgctccgccccgcctgcagacggtccacgggttgcctcgaaggcaggcattttggtaagtagcgaaccgagagcggttcaacttcttgttccgaaactgaagggatgacccaccgaaatggtggtcttctgaagggctggtcgcgggtcttttccgatgtcgagaaaaagagtctctctgggtttgggtgagacacggatgatcaacaagaacagaccccgcagtccaagcatacaacctccagagggtttcaggtttctgcggaatcgatgagaaaaacagattgtgagttagtgagacgaagatcacgttctggcacgaattacggcatatgatctagacacgcattccagcgcgacatgatagccaagaacacctctgcacctcctctcctcacactttctgtgatacacatgcatgaccatgcttacaaatatacgcgtgtaaggatgaagtatatgatatgatgtggacaaacagggatatccagaagaacgcaacttgaaatattacgtgctgcaaaggctatacacgtacatatatgcggtggaagcccgagctggaaggccccgaaagaggaatggacggaccgaaacgcctctgccctccttcggcggcaggcagccccctgtcattcgcctccattagacaccaagaaatagagaaatgggaatgagatgctttctgacgggcgaagacagagacaagattccgtttgctgcgaaactggagagccagaaacgcgggtgcttctttaccgcatgctcgagggagacagaagcaggtccggattcgaattaagtgaaaattcgccgccgtttcagctttcgagagggcacgtgtctctgcttcacaagtagtcgcctattcaggcacacagcaagagcatgcaccgacaagtttgccttttctcgtgtcgcgaaaaagtgctgagaagcaagagagacaatactgcagagcttgccgtattccgagttgtgactagaaatggttgtcaaccttgtcaaccaatgcatcaattctcttctcaaacaagcagagaacatgagaaggaaacagcaatgctgccttgtatttctcataaagaacccggttgcttgtttccccggagtcagtttcgcagctggtcagcccagcctccacacttccgccgtgtgttaaagctggcctgcaggacatgcgaaaaaagtaggaacgacactattgttgcttttccttattcttctgtgactgtatgcggatagccatgatgaagaaagccaaactgatatttctagactaactctgtcaatctgtgtaactgtttgtgtttgttggagctgtgtggcgcctcctcggtcggtttggtgtcctgtgtctcgagcgtccgcatggtgaggcaggcgggccggagttctttttcttccccaggcgatggtttctattgtttcctgagactcttcacggtccagcatgccgatacacgccctgtgttgattgttcccgcgaggcagtcttccggtgttacagaatgtcacaagcatcgggcagcggccctgcaaacgctcttacccccttcgaatcattttaccctgttcgtgagacagaaacgaaatctggttgaagccacttgtatcattcttttggaagaaactcttgcacatccgcaatttaagtaggtggaggcagttcgctgagccaactcaccatttccgttctcccaaggtatcaacgtcgtagtgttaatctcaagtacctccgccttcgccacagcctcccatccgttcagtcccgcaactcttcatccgcggcaacgctgttccgagcccgtttttcctgcatgccttattaggagggtagttggctgaagtgtttttacatccatgacctgttcggcagca

SEQ ID NO: 2077 - DNA, 1823 bp, Toxoplasma gondii
  source 1..1823: mol_type = genomic DNA
cagcagagagtaaaatgaataatcacaaactctatagaagcgagtcatcacgcttatacggataaacgagcaagtgtggttgtaaggtggtggtggtgcgtcccggacaccgctggtagtattgtttggcattaggctaccgtgatgtagtgcgatccgaagttgtgggtcgtgacatcggtcacttcgtcagcacaagaaggcagctgtgctaagagcatgccgagaacttactttgtgtagaccaagattgtgcaaaatttatggcaacgttgcatgctttaattcaaagcatgtagctgctactgctttgaccgaaggcgctcttgcaagtttcagttcgcatgctctggaacatgcacatgaatggatgcatacagctaataaatgcctgtgcatagggtgacgttgagatgcagcagtttttgaagtccacctcgagtgtgagctgctgaatctacagtcgcaactggtccaacagaatagcgtctgttctcagggagctcaggctgatttgatggtgagaaaggggggggtgggcgtttgtgtgtcctctatgggagtatcgctccccaccgctgaataccgtcgagtaataacgggtgatgaaaagtcactttatgtactctggaatagcataggagtactgctgttctcagacagtctagacgggaagttcaacatatgagagtgcgttatgttccttctgctcttctgctaactctcgcccgtttagtacactgactggatttcctagcatgaatcgaacacgagttctgtgacgtcgctgctccagttacagaacccaccccatcgctagccgctagttgcagactagtcacttcaagcacgctgttccgatttccagggatctgtggcaacaccaacagaactatagcacaaaagaatacctccctcgcatacgcgtgttcaatctcaattacgtgcaccggatctcgcaatcgggaaacataccggcaatgaagccttgctcgtaggctataagaccacaccttctctgttgtggcccttcaccggtgcggacgaccacgctggctccatgcgccacgaaggctgcatggtcgatttctgtgttcaaaggctgcgcaaggaaaactgtaaaatttgttccctgttgactgatgttgcgcactaaaggtcacccgttgtgtggcttaccagtatgaaggctccctgccagagaccgactaaacggacgcgacgcggaaaagaagcgaaacaatttcttcgcattaggtccagggatgaaagtggctggagatttatcgaattatgtttaacgcaaacttccctttcggtgcctagtcaattcagcgcctgccatccgtagcgcagatataccagcgcatgcagtactggaaagcgagcaactctggcgggcgggcacgcacagactacgcataggttttcttctcccagttggcacgttcgtcttcctcgcatgttgtgcagaccgacctgcacaagtcgcatggaatgtcatattatcacgaaaacttgtggcacgcattgctgcttgagcacaaacatatctacacgctctctaagttgcctttttgaccgtggcagctgtcgaccggtggagccagcgatttttttttcgatcagctctgcttttctttccatgttgttgctcgtatcatcggggccttctaattcctaactgccgcaactccctttgattccggtagacacgctctttttgcttctttccgtcggttcctttggtggtctgcgccccggagaattcccctgccgctcgctcggtcttcgagaaaaggtgttccctcccgttgtgaaaa

SEQ ID NO: 2078 - DNA, 1996 bp, Toxoplasma gondii
  source 1..1996: mol_type = genomic DNA
aattcacttgagttttcatgacaggtacacacaggcctgggctctgctgttctttttgtcccatgcaggcgctgccgctggcactgtcgcggctcgaggtccctacgctggctgcagcggtgttggacagtctgctcagtgaccaggcgccagcagctgtcagtcagttgtcgattcacgaactgtcaaaccttgcttatgcaatcgcatgcgtctccaccaattcccaagttactgtagacacgcatccgtcctctgcggactcaggctcttgtcatgagcagaggccggagcgtttcgaggttggttcatcggaaaaggagtgtcagtctgggatgaagatgcaactgcatccggagcatagaagcgtacgcgagcaatataatgcatctgaagttgatccgggagaaaacagcgccacgggtggaggagttggagacccttttctcggaaacaagagggagaataatacttcatttaaggttcttgaatcccggtctgtatgcacacccgaggaattgaggcgtcggtcgactctgttaacgaccatcttacgcactctgtctcgcagttccctgaggcgccatccacttaactcgccgttcgaacgcgcgtggagacagctgaaaattatcgacctgtatcttcagttcaatgtaggacctctgcgtgtagatgatgaggaagcgcttcagtttctgtctcttgctcggacgaagaagctattgaacctggttcatgtgtcccaggtacagaagcgtgttgggcgcttgcttttcgatgaaggactgatgtctgaaatagacgttgagtacccactggggccttacgtcttagactttgcaataccgtctcgcaagcttgttgtagaagttgatggggaagcccatttcttctttggtacaacggtgccaactgctcagacgcgaatgaagcgcgaactgcttgccgctatggggtggcgcgtggtcgtcgttccgcaggaactttggagaaataaaaggaaagggaaaattaaagaattcgtggcgagaaaggtgcgagagggactcgagatcgacaacagtgacagatagaagccatgggagaaagacggtttgaagcagaaggaaaacgcggggtgtcatgcatttccagaagaccacaatgaagttttaggggaaacaaagtttcttgcacatgtacattttgtattgtctggtggagcgggtaggctcagtcggggaagggagaataaaacagattgtgtttccactctaaggtgcttgtattctttttcctggagagacccgtacagttgtgaaaactcgacaaaccaccgtcccttgcgcttcaccggcaccgatacatttatcaggccctgcagagctgcttttctaagttgttcatggaagctcttcaaagaaaaagatagaccatatgacagtttgctgcagcaagttccagccacagaattttgctttaccgtgagtagaagtgcatcaaacagaactgctgaatgagactcgcagtacatccttggtcatgtcaattagcaggttggacttcaatcaggagcaagcgaccttgttaaacgctggaattcagtaaggtcaatcctttgaagaccgattttaggtgcagtcctcgttcctccttcccatttgaggacgttctggctttatacgcctggggactctttaatgaatatcagttcgggtttcgtgactcgccagaatcccgccagaagtctggatgtacagatagatcgaggcattcaggtggtggacaagtattttcgaaggttttcctcggtgaacgcttcaacaacaaaccgactatcgaaggcagaacatcggacctgctgcggagcaacatgcgtcgttgcaacaggggggaaagccataagtaaagcaactcctgccgtaaactccaaaggaaacacacaccatttgagcgattcatttatcccatctacgagaatcctgtagaacatttcggatggtctcgtactaca

SEQ ID NO: 2079 - DNA, 2707 bp, Toxoplasma gondii
  source 1..2707: mol_type = genomic DNA
ttctctggtttgctgtgcgttcgtcaggttctccctgggttctcttcctgcgctcgttctattcgcactcgctctcgctagtcttcttctctcgtctctctcctctgccccgcctctccctttctctccaccatcttcctccaccctgaagttttctccacgatgtgtctgctcgctttctgtctcgtctctctgcctcctcgcctttctctcccccgcctgcttccctccgaaagccgacgtacgcatgcccccgtaggcacgctcttccgtcgcgactctggagtttggcgtttcggggaaagcgggcggcttcacgcgtttgggaaaatgcaagagaagaagcgacaactgtctgcaccgtaggtacacctggcgcactcggttggccacgccagtgtctcccaacttcttccagaaacaccacaacggaaacccgcacccgatctcctcgccttgcgacggccgcaatacgaagggctcttccaccacggaaggcatcgacggcgatgaagaggcaacagcaaaggtcggtgtcggcggtaagtgccccagcgaaagaagaagtgggacggcgtcttgtcggcaaaaaaatgcaacgggagacgccgggtcgcccaaccctgtgagaaacgcacacgcgctccacgtcagcgagtccgccaggcccattccggcgcacaggacctgaaacggcttctcctacaaagcacaagagggaaagagacgcgcagatgcacaccatcaaaccaaagagaacccataaaaaacggcacgcgttcaaatgggtcctgctgttgtggaaacaaatccgtctgtccgaacccacctgtctgcacatgcacggaaatgcgaatttatatatatatatatatatatatatgcatatagatggagacaagcaatgtgtatatagttgcacacataatatattcatacacgtgagtggcgtgggaagcatacgtagcaaccaaacgagcgggtagaggaaaaaagctatggaactgtatacacccgaatagagcaaacatcttatttgcagaaaccagatacggcttactctagggaagatgaacgagccaccgacgaggccatcgacgtgcagccacgatcccgtttcatgcgcaagctggcgaagagcaaggaaatcatcaaatccacctagagttccgcttcggcccgccgaggcaacaatgacgaacgaatatctccgttttccctcttcgtcacctctctcttcgtgcgtacccttgtcggctgcctttctctcctgcccttcctctctctctgtctctctcgttgctgcgttttccttatctcgtgcttcgcgcacttctctctcgctctcttgcacgtctctcatcttcgctctcaagcattccacgctcatcactccggagtctgggttctgatggaccgcgacaatgcgcccggtgtccgcgaacccagccaccgtgaaggcttcctggagagcccgaatatagggcgatccgctgcagacgaagatgtagacccttcgctcaccagaagagcagcgagcacaccccgtcacaggggttgaaaaggaccaagagcccggagacgaacaagcggggaagaaggacggagagacgaggccttcgcatttcagtcttcgctgtgtgtggtcgtccacggcggggtggggaaacgcgtccgagggaggacgcttgaagtggcgagcaagatgaatggcttgaaggaaggcccacacctcggagtgcatccagaatccacacagcggggcacggtgcctttgctgttgtcttgtctcttctgacgattctgctccgcgttctcccgcttgttttccatgtcgtcctcccggcttgtgtcctggctctctgtcctgtttctcgcgtttgtttctctcgtcgtctggctcggccgagccccgcccgctctcttcttctgcctcgcggtgtttctccttcccaccctcgtggacttcttcatctcccgcgccatcttcgtctccttggctgcacagtgtgctctggcaggctgttgtttcatccaggggagaccgcgagtggagaggtgagagacgggaggagaaagatggagacgcggagctgaacagatcggccagcagcttttcgtctaacttctggaggcagtctttcgtcctcgttagctctgtccgtttgccgtcctccgcacacgcgtctcccccgccctcttcctcggcttcttctccacctccacctccggcttcttgcatgcgataataagcgctgtcagaggcacaccgccgggacgcgcacagagcagcgaaagcggacgagacagtctctcccgcattcaacgcctccagaagcacttctgagtcttcttcattttcgcggagaaagtgaaccacatgcgtgagaattgcagcgtccaggtgagagaaaaccgtgcacgccgtgctgtggctgaggactgagaaaggcagagaaagcgaaaaagagcacgaagcaggcgaacacgaagacggcggacaggctggcaggagcggcgcgtgaagtacaagagaagatagagaagataacgaggcagctctcgtcgcatcgcgaggttccttggagagaagcacgtggcagagaagctgcgcaactctcgacagctgcgacccgtggcgccatccatcccaaacgcgaaaggccgagtctctgctatctgcacagatctcgtcttcctctgaaga

SEQ ID NO: 2080 - DNA, 4741 bp, Toxoplasma gondii
  source 1..4741: mol_type = genomic DNA
ttgtcgtcacggcgcagacagtttgtgtgtggccattgtcggaaataccagatgtgtcaaaaccatgtgaccatgtgatctaccggatctactccatgtctcatggtaaactgcccgtcatgtcgcgcgctttacctgcagggactgtcaccacggcctctccacaggagggagttgaagcaaaggaagagcccccggcagccacaggtgtcccctctgccccctcatcaccagctagaagacgtgccttcttccgttcccgaggttagttttcagccttctatcttcagttgtgaagtacttttcttcgaaacataccgcagcgaagtgactcaaaaaggtaacacacccaaaactgcggacggcaggaatctcttgcaagccagaggtttccgcttaccaaggaatacgagactttctggtcactttagttttcatgtaagcgagtgcgctcttccatggtgatatgcgtcttccgcaacagcggggtggtggaagaagcacgctgctcatgaggggggcggggaaaaggcaccagacgaacacgaagcatttgccgtgtttgatgcctgtcatgttccttttcagggacaaggacgattactgtgaacgtgaggcacttctttcctaacggtgtgccaatcgtcgttgtacgccctcagcggcgtagttttctcttgaggcggttctgaaggatcccaataaaatgacacgtatttacgagtcggctattctgaatgcctaagtcaacaagaaggtgcagcaagaacctagaagagacgaacttcagttggaggggcaacatttttttccaccttcctcgtcccgccccggtgaaaaccagccttcagcagtgagctgccacgtcctgtgctgcagcgaaagcaaacgtaactgttgccgccaagcaatgtttttttttctcctgagtaatgcgtgttcatttctactgccccatcgtgctcattcacacaactcgaacactttgtgtgcccatttacaatcggcttcattttcttttaacttggacgacaggaacagacacagcatttcgacacgaagcgtgcctggctgcggctgccctcactgttgttcgcagtgggactacgaaaataaacagatttgcaacactcccatatgtcatgtcacatctttttggctcgatcgtctctccctcatctctccccgcatgtaggtgctttcgctaatagcatcagtgttttcgtgatagtgcagcttacttttcacttgttagcttcttcccaactgcctccaggaacgtgctaaatgtgagaaaggaaactgacataatagttttggaagacttgcggtctcacaagaactcaccttacgtgagcgtgtcagtatcttgaaatttcgccatcattggaaaattcgacacgacttccctgcggagctaactattccagagtcaggccgtagaggcgattaattcgcgattcgccatcaccaaatacgttggggtattacgtcgacaacaaacgagactgatccatctgatatgctggcaaatgctgctctattctaacccaaagcggatagtcagagacagcccatcaaatttccacaattttctgcagcgttggccgtatccgatgtgaagccgcaagccgggctgccataatgtcaactgaccaatttgcggcaaaaatagagaggtcagaggcgacagaatctctgttacaggatctggagccacagtgggatggttttttcctatcatcggaatgagagcttgtaatctgcatatcaaggtcactcaactctcgctttcttgcgacccgcaccgtgcgccaaaagccggcggtgggctgcgcattttcaggttttgttacaaagtcaatctccttatcattctcaggaaaccaacagagaggggtgacaacgttttaagaaaggggcccgtgctttgccatagtctggtccgggtcaagcccgaagcgtccgggctgagctcggtgtcgcctgtagacattctccgtggccggcctctgtgcagtggagacggttccttttgtttcaacctgttacgaatatttttgcttggtgatttccaaaaacagagtgtgacgtggtgtgcggcttgtgtctccgactcggccagatgggttccattagaagtctctgtgacggaacgcgtacgagactgtttcgttggaatcgttcctcgagtgcgagcagtccgatgttacggctcccacgaggcaacagaggggccaggcctccaactgttgccgtcccgacccaccaccccgtcctgctgatataaacgcgggaaaatgacgcattcacctatctacgtgtgagtcgcttagacaaaaagtggcctgcagcacaaagaacaaacggtgagtcgctttgctgtttcccactttcgtgctccactgggagtggtatgacgggttctgccccgtagcaatcgttcagtttcagcgctcccggcgtcagtgcctttctttcggaaaactttcttcacatcctgctgtccaaccactttgaagttctgcccagagagtgtcgaactatggggctgcggcggaatctttagccactgcgtggcgactccgctgttttcctcgcggtgagtgattgtatggtggagcttcgtaactcgtgaattcttgcgttcttcatttgttgtttccaacgcgctccactctgcaccttaccttcatgctcagcttttcctcttcgccttccatccgcttcttccttctgcgttagaaccggtgggcgccagaagctaaaatggcgcggagccggtggtgtgcttcggcagcagttctgctgtacatttgcctggcttttctggcggcatacgacagccccgttgccaatgcacaagggagcgaagcggctttgtctcatttcctctttgacgagtggatgagtgatgttgtgccggagttggtcgtcccagcatccgaccacgaatccgaacagcccgtccgcctcagaagagattatgacaaattccgggggcagagcgcggcgtccgcgctaaaacagaaccgtcagattcgcactgagatctcgagaatactgagggcagtcgagggaatcgaagctaggcagaatgacagtgcggaaagacggatacacgagctggtactcgaggagatgagggaggcaaaactcaaagagaaggccaggcgaaaaccattgaaggggcggcacaaaaaaaaggcccgccctcgcgacagaacgcgtagaaaagccaaggcgctcatgggaaagaaacgtcaaggcaggaaggtgcccagggggacacggaggcgtaaagggacgatgatgtggcgaccctgggacgcctgggcgaaacgtcaggggaggaaggagaagctgcggaagaacgctggtggaaggcgagtggcgcacaagaagggcttcaatttgaggcggaaactctactttttggctgcgattgttgcatgtgtggtccttggcgtattcgcaggtctcatgtcgaggcacattttgacttttcggacgaagtttcgtgtctaactgcttcttccgtctaagacccttttgcctgccgccccctcacgaaacggtcgatccccaacaaatagctacgcagtcttgtagccaccatccttgatgtgtacacggtggctaccccagtctcgcctcgcctccggaactgtttagcagaacatcgaatccaaaggtcgggctccgaggagtgggaccaggcatttcgctgctgttggtgcagttcgtccaactggtgtcgcgccaggagcaatgcgtgggtctgagccagcgaacccgctcactgacatctggtttctgagcctccggtagaggactgacaaactctgggagagttcagagtccccacggtagcactgaaaagccatcgcagtggtgtggctcggcgcttcactggagaaagagcgtccgatttacgagtcagtggggtaggtaggcgcagacgaaagtcccgccccaccggcttccgtagactctggcgagacaccctggatttttaactgcgggccggtgcgacagccaccagccgattcggtttcacgaatctagggcattctgattacaccggtgggcagagctagtgcgcgtgaacggccgagggagaccggccggcccgtggccacagtggctcctcgatattaaagcaagaggcgacatctgcttttcgttggaatttccaaccgggtaaacaaccggcttgtcgtcggaaattgagactgtatctcgctccaggcccaacagcgacatgctgtaaatggtgctgttggtgaagtggattatgcgagagtcagggcaatacggatatcagtgtaaattatacagcttgcaatcgtaactcttcgaatgcatcgacgaatacctaaagcaagtttctaacggaccatgatgccgcggaagtggtgttgccacaaatctgtgtcaggaagggaagagccgtactgaacgagcgacgcggactgcgtgtgggcgccactgtcggagttgtgagcagaatagaacacaaacttgtgttgccaattgaaacagttggttgagtgaaagacgtggaaaaaatttgtctaagcgtcttcacattggtacgggcaaggtggggctaggatgcgaagacagcggttcgcgaaggcaagcaaagatcatagaataaagcacgtgctcttcgtccccctcgtacggtaatcgtgatccgcttgaacatttacaggtacccaggttacctgctgaa

SEQ ID NO: 2081 - DNA, 2574 bp, Toxoplasma gondii
  source 1..2574: mol_type = genomic DNA
cacgttcgcaagcacgaacgcgacttcgacttttacagcttctaagctggcagataccacctcgcagaggcgcctttgtttctctctttacatacgtgacatgcattctctcgtctttcgtgaacaaaaaagattcgagttctaggtgcctacgtgcacagactgtgaaatatttcgagtgattcaacagactctctgccgccgaattgcaagtctagtcgtttatcaacggtgcgggccgcgaccagcgaaaagccacacacaaacctcgcctttttctgtatgacaaagtttcaaaaggatgaaaagagccacaggatgtgacaacaggcgctttgggtgcccagtttgcacttgcataaatcagctcagagctttaaacatgcatgtatagttccgaggaaaagcaaggtggatttcggttgccaacgatactcgggttcttccacatcggtttttctaggggtagaagatggattcctctgatcactcgcgtcaacaccgggagaaacgactcccccggtgttggcattttgttgagcaccgtcgccgtgggagtgataatctctgaatctcatctcagagacatttattccaacggtttacatcgagggttctccgcacggcggaaactgtgcgtgggaagagaggagcccaaccttttgtagttacctagtggaaggagtgaaggtgcacggcaaaaacctaggggacgaaaccagcgtgcaagtggatttagagttgttcttcaggaaggaaagcaatgcaaccgcagacgggcgagagacctcgcgacagagaaagggcattctgcaagtgaacgtgtcttcgacttgtccacaaaggctgtgcagtaacgtgcggattagggtgggacagcaggaacgaaatagcttattggttgatccgtcacatgcggcagcaaccccggcagtctgtttttgagttccggatgaacgatagagagcctgtcgtgcacctcaagtccctcccaactgtgcggcggagaaagaaaactttaatcgattggttgcattggtcacaagtttttgccgacgcctcagtcttgagtagaaagcaaggccatttgagaaagtggaaatactactgacagagtgtgtttcgtttagtgccctgaaggcatcgtcgctaaacactaaccttgtgtagtcgatggacgcaactcaactttttctgaatggacgggacaagggccatggaaccagttgttttgcggaaaccggaccggtaggagcacttgatttcttcggctctcacgaagacatgacaaggacatttttgcaaggtgctgacaacgactggttatctggtaggtgctgagcgggaattttcattttctcaatcctacggccgtgaaaataaatgcagttaccgacattttaggtttccttctgcttttgaagacgagattgaacagaggcgaactgtcacggttgcttcaactccgaatctctgaacacttgtggcgctccatcagtgatgtccagaaaaagaaattgtaactgtctgtaactcactgtaaggtaccgcgctagcgcgacctggccgcattataggactggtgctcactcggcgtgtttgctatgcttgctgaagggtcttgatcatccacgatgtgggcatgcatcagtcaaagagaacacttccactagagcgatagaaacatgtggagcagactgttaattggagatcttgataaacaacagcgagcctaaaaagaaggcacaggaaaaagtgtaggccgagcaggattcgaacccacgaccacccggtccgtagccgggcattctatccaactgaactatcggcccaattacgggcggaagaagcggcaacgcgttcgtcgaagaggaaatgaaagttcatgaaaacaatgcactcttctcaagtaaacaaccaagtgaagatcccgataatccacatacagacgaaaagagcaaggtataaatttagactgaccacgacttgtgtccagattcgcttccaaacccttacttgggaacaataaggtacttcatggagtaaaccaccagctgacagtcaccataacgaacaaaagttcacgcaatccctgtcttttcacagaaaaaagtgtaggccgagcaggattcgaacccacgaccacccggtccgtagccgggcattctatccaactgaactatcggcccgtctccacacattctcgagggtaccattgctgccgcctctccaaaggtttttagaatgccactgctctattactccttttcccgtatctacagttcactctctctccaaagcaatctcctgtgagcaggcacttcaacattctcgaaaacgaatggcatgccccatgccagtagcgctgcagcatcctgtgctgcagagagcggttgcgtgcaccacctgcagatcccccccacctcatttcggcttgcattgatattcgaacatacagttttttcagacctgaaggcaagcagaagtacaccatttcttgcatgaatttgaaagagtgtggctgacagaatagcatctcacacgatagggcaactggtccgtcaccgactttcg

SEQ ID NO: 2082 - DNA, 1571 bp, Toxoplasma gondii
  source 1..1571: mol_type = genomic DNA
agttaattaatagagggtccaactgtgggttagtttcaattcctagggcggagcactggattggagacctaggtaagtgtgctcctattagtaaagatcataataaaagtcaccaggcatgcaataccaatcagataacacctgaagctagaccccctgttacatattataaaatgggattcctaggtttatataaactaccgcctgcagggggcgcctgacaggacggccattaggtggcttgtttgcaccttcagccttttcgaacacttcctcactgcccaatcgaaagcaaggaatccaaatcaataaacgggaatgcgtccctgtctaatgacagaggccactctcaatcacaaaccctcacccggtgcaggagccagcagggacgtaacgggaatggcgacgggttcgggggtttgagccggaccgacaagaatgttgggaacagtattgtctgcctcttcttctcggttgaactcgtcttcctgtaacttttcagcgtctaactcgacggggagggggacctctggggtaggaaacccgtcaatatcaacagcgttgagttgtacatctggctgatcggtgggatcgccgttcgtgggtggggcgttacggtctgtcgggatgtcgtccacttcatcttcttgagcttctttggcttcttgaatcgccttctcctcaagctccgcatccagctttgaagccgactccgacacggggccctcatcggtggagaatagctgcgcctttggagccacactaagggctgtcgtgtgtgtaagctctccggctagtaaaaaacatgataaataagcaacaaggaaaacacaaggaagaacgcgtgccatgttcgtttaagggaggaccgcgaggaaggggctgcaacggttgacggccgttacgctactaaaaacgggtgtgacttcttaggctcggcaaagcgttcgacagtgtcaccggaatttgctgcctcaaaaagacgtcgaattttagaagcccactttctgcgagaagacaacagcatatcatgcgagcgaaactgagacggcacaaagacacactgccagaattcttccacagctcgtcaggactcaacggcctcaagggtcgtggcaatcatcaggcgaaccaacggtatcgccgttggaatgcgctcctgcctttacacaacttcgcagaagttcggcacgataaaaaagcgaaaaggtgtgcttcagaaatcagtaaatagctctgtcttttgtagccgatacggcagtcccaccatgtctcactcgaccttgccagccgcagcttcctgcgaggattcagttgcgttgtggtcgctaggccgcttgaaacggcatcctcatgagggctgagtttagtgtttgctggcgggttcttgacggttctgaccaccggggacttggcaaagagtgctgaaatatgtcgtcatttttaaccggattcacactggagaccatcgccgtggttgcaccatttgcgggaaccacggctgtcctgtccgttgtcaagttgctgctggtgaggtagctcggcacgtggctcacaaagagcgaacagca

SEQ ID NO: 2083 - DNA, 4129 bp, Toxoplasma gondii
  source 1..4129: mol_type = genomic DNA
atattgcaattcatcgtgtagctatggtgttcatgttcttaaggtctgctttttgtacggagaacatggacacgtctgtgtgcccctagcatgatcagtcctctctccggaggaatcatctctgagacagcattgcttccagattcccttcggtaatctccgtctcaacgctagtctgcaaggatacacggatcgtgctttcgagaacatcgagttttctgttcacaattcgaacgacggactccagattacctgagcggcctagcggttgttgcagcgcatttctcacaaatctacatagtttctagaagttagtgtacagattcattccagtgtagtttccgaactcacgtgtccgcgttccgctttcaaagtgcagtagaacctctgaaaaaagctgccagaattgacaagcgaatatatatatatatatatatgtttatctaagggagcgttgtttgtgatgtctgtgagctagcaaagagctaaggcaatcagtttgaaattccgtttctggacgtcaacacagcattcgcacgaattgtagtggctgtcagttcgctcttcttgtctaccatatagacagttctatagggcaatattccatgttgtctggtaggtttgcgactccttgctaattttccgttgagctggcgagtcagtttcacatttgccttagtgaaataggtgctggttccgacactgcatgttaagtctccgttctggtgacgaactgcgccctctcttcgcaactgtccggatgcttgaagcagccccgctccgtgtacccggtttttttccgctaatcatccacgaattccgacttgaaagcacaattcgggacagcaatggagacaagggggaaaaaacaacgacgtttagggtgcaaataagctcagcgtgacctctctacgatggagtagggtgtatgcagtcgcctccggagagtagaaataagcctctcttagagattatttttttccacctgtaccatggaatgggtcatacaagcatctgattaatcgctctctctcgaaagtggttgctgactatcgaagttcagggactgcaaagggcagatccgatctgcaagcatgcctccccattctagagtgaaatgcgtaggcgttagttcgtttgtttttctccggagctcgcgttgtgactttggagtagcggcagtcaagttttctaataaatagccccccttcaaacagattagctgcgctaaattcatcccttcccactacgatattgtccaccttttccctgtttcgtttaagccactcacccgaggtagtgcctgcaaatcaatgaaacaaactttttttcgcctctgtgctcgttttggcgttgaaatatagacacgtacttctgaacatcagaaatacatgtgtttccatatcgaagctgtgaaactgcaaagtggttttcctctgtgatcggtccgcaaaaagacccccgatgaccgatctagagcgccagagtccgaagaaaaaataaaaagcgagatgttctcctctcaattagccacaagttttgctccctttgtaactttttcgcctgaagattctactgccacttgaggaggtcggtaataatcactcttatcgactaaagtcgactacacggactgttgtgggctgcatcagccaagaacggttctggggcttgacaggagcaaacaggaaaagctacagaactgacacggcagtcgatgttcgccgtcctcgattgtcgcttgcctgggacagagtcgatttctgaacgggtcgagtacgaatgaaaatgtgcctgtctcaatctggaaagtcaggcgaagaaagattgcgggagatcgccgtctcacaatttagccgttttcagtcggtgtgggatttcgatgagctctttccatcatttgggcagagtatgagagtcgttctgcgcaggaagatccataacaggaagaaacccatgtttgttgtctatcgcaagcttctcttcttaaagtgatcgcagtacacgaaaaacgtcggagccgaacgtatcgggtttaggacgacttcctctggtgtgcaaaagaccaccctccccgattttagtcttctttttccggaaacaaaaacgtgttttttccacaagctccatagtcttctgtattagaaagtcttcagctgttcccacggacgacctcgcagaacgcggctcttcgttgcatgtacaggtaaacagaaccgtgtgtaaaagcagacacactcgtatttccttttcctagtttgttgctgaagtgtattccgcaggttttctggttgggcgaggtaggcagttgtcacaacagaaaaagcaggctttcttgttttggcttctttatctgctggtgcgagatacggggggggtccccgttcccctgaaaacatagaaagaacgctgccccagaggcgtgctctactcgcttcgctctctccagccaaatgccacggtgcagagaaagctgatgtctgaagatacggctcagagctggttcagccaggaatttctcgaagtctcaggtgactctgtagaaacaggatgagagagctggcttttttctcgtgcgaatgaaagtcgagtcgccaggcccgtgaaacatttcctgtgtcactgtgtttcccaacggcgtgagaagaccagatggaagttttctcattttcttgtccggtctagcttttccttgtttgaccccggagggaacgtcatcttaaaggcaccacacatttgaacagctcttgatacctcgacagtcttcgcacgtgtgattctgttggtcggaagtttcgtatggcctgcgttttcgcttgctctcaatatctagtcggctttggtgtgggctctcatgctcccctgtcgctgcctctttccactcatgaggaaggaaggcagcgtcatcggtcgtgaacgcgaaagagtaaagggtcctcaatcgaattttccagatgtccttgtccatggaggcccgcagaagaggtggcggcccggttccgagacaccgagcagcagtgacgcgcgaaaacataccggaagagttcgattgtttgtctgtcggaaacttccagaagttccacgaacagcgaaaggtcctccaccggctcgaggagcgcggtacaggggctcgtcacaatgacgaagacgcgggaacagaagcggaggggaagagtaaaggttctgcctcttttgcatttgcgtgcggagctggagatttgaccgaacccctcgatgaaaaaagccgccaagacaccggcgacgagggcgtaggaaagcgtgaagaggagctgcaagtcgcaagaccgtcggggacaagccgattcggtgcttcagacgcgttttgcctgaccgcgacgcacaaaataatccggcaccgttacggtgaaaagtttccgcatggaaacaaaccatacgggactgagaacgaggaaataccagacgacgagcagtttcggaagtttcagagaggtcgaacgctcttggaggaaaagagcggaatggttgccagcgacgccggtacaacacagaacaactcaaaggattctttcccggtcgacagacacgcctcagaagcacttgcgattgcgagtaggggaaacaccgcaggaaagaatctgcagacaactgcaagtcacgtcttgaaacagcacggaaaacaacagcatgctcaagcgaaactggacggagaaaaagcgttgtagaagctaggaacatgatgaaaaccgcaacaacatgtaccgcaaacagccatttggcgacccctgaaaaagtagcaaccgcaattcagtcttcaagtcgtgaaatattcgcccacgttctctgtcccccaaacctagagtcgttctgtgtgctttctcgaacttccttttacttctgttagcataacaatccgtatatatttataagcatacattagatatttgcgtatttttgcgtgttgagtcactggatcattctcccgtcaacttttaaagagatacggtgtaaatctcaggaatccgcgtagctgctagagcgagcacaggcatcgccgcgtagggggaaacaattgcgagtaactatgatttacggtttagtcgtcctggatgaattcgacattccgccttcggcatccgttagtcattta

SEQ ID NO: 2084 - DNA, 2074 bp, Toxoplasma gondii
  source 1..2074: mol_type = genomic DNA
ctgtcactcatcttcttcctccgcatatatttctttcatgagcttaacttgttggaattcacagtagtgctgtttccgcttcaattcgaactcgtggcgccgtttttgttccagttcttcctcgtttagcgcttgccctctatcattcaccgctaagtgttccaggcacgcctgaagggccgaagcggaaacagcttcgccaggctgcggacatgagggacaacacgccaggggaagttggacatggcaatgaccttcctttagacagataacaccgtaattttgtcccgatcaatttacctacgatactctcgtacaaaaaacagcaaatcaagatacttgccccctccgccagcggatgattgatagatgcagccacgctcttacctgcggcgaattcttctcattatcgccgtgggcgtcctaaaaggaaaaagtatcatatgtggagagccactggaattgcgagggacttcgatattatttgcgactttaacgagttcacgctcgtgaaaaatggtgcatcccatacaaggaagaggaagtagttattcctctgtcggcacataacctactgcgaagactgacctggtttctccgcaaatccctacctctcccgctgaacatctcccagcctgacgttcacgctgctcctgaagagtatatttactccctcacagataccagtgctagtgggaatcgcgttttctgaaagagcgacccccgtatctgcctgccaagactgtactctcactagaagcgccttaccgatcctcgcctgtgatacggtgtcggcggttcatcaattttcatgcgggtcccacgttccaagtcgtgctccgcaatggcctgctcatcccacgtgagatgcttgctgagattcacgcacacacaatcacgtaccagtgttgaggggtcatttcactgttggcagagcccctgtttagcaaggcagcgctgttgcccgccgtcgctatgaggtcttttcgtcgccatgccgaaatccgtagtagcgcaagatgcaagcagcgtctacgaaacaggtttcctgtaattactgtagcatgatcgcgcgagtccatcggctctgatggacttactgctcttccggagatccatgtgtgcttctccttagcgcactatgggtcggctgtccgctggaaccgtttggttggtctttccctatcacctgcattctcagtgttataatgcagatctggcagttttggtcttcgagagggactcttcgggatctgcgattatgcagaaggaattcagtgcaaagtttgcagcccagacggctttgccgtctggctccttcagtttgtcgggcttatccgcaaaacaaggcaggatagcttagccttaaaggcaaattatgcaacatcaacgtgaaaccattccgaagaattatctttttgagaaaaatatgcgtacactgcgttgatgaacgatggcgaacccgtaggtgaggtcatcagccgcggtgtccagctacgctaccgttgaacgcaacgcatgcagactgcaaacattccctcaagcgacgccgtgcatgcacctcatcagcaaagtgacgcaaaattagagacctttaactgtgctcattaatcgttgttgtctgctgcacactcatccgaccatatatgttcatcttacccaatcctctcgatggagcctaccgtcttcaccccttcgcttcgaggaggggttggaaacaaaagttgatgagaatggttccctgaagcgccagccccaacgccagcaaagagcggggcgtacaacagcatcgtaacgcgggtacacagtcattcaccgacagcatatagagtttttttcatcgtgcaactcggagaatatggacgctttggtcatttcgtggcatcggtagtagaagggtttacggcggaccgcctccgtgtacttggggacttttgtttcagcgggtcatccatgatcgcgccgccgtgagcactgtcatggttcatgttcaacaggaccttcggttgtattttatcgtgaattgtacaacacagtttctcagaactctcttcctggagtggtcatgcagcaa

SEQ ID NO: 2085 - DNA, 2351 bp, Toxoplasma gondii
  source 1..2351: mol_type = genomic DNA
ttaccgttcttcccaggtccatgcttgggtttccgaaggaagaaaataaaacattacctttctcggaattctgcagtcggtcgttcagctcgcggacgatagccaatagtggatcaaacttggtgataaggaacgtctggagctccgcagagtacggcgtgggattggatggggttcttgaagccgccatttctaaagagtacactcccttggtagagttcctcttttcgttgcaggctccgtactgttgttgcgccggtggtagacctccgtccgaaacagcgcttcacgtggaactgctttatgctatagatctactggtgagagtgaggatgggcgaaattgcatccatgaaccaagtgtcacatctacataaaaacccgtcaaaatcatcgcagactcgcggttttttactctcaagtggaattttcatgaaatgtgatgagcgcatggtgcatgaccagtacccgtggcaaccacctgaaatggaaatggactacacagacacgctttaaacacgagacgagccgcgcagaaagcacatcaagcagaagcaatgcacgaaggccgagaaacgggggaaacagaacgtgctctgacagcgaccaggacgatattcacagctgaccctggttgacagattttgtgactttatgaggactggagcaacgcgcaaatgagggaaacagaaggggcgttacgttggcgccagaagtcgagagaaatcatagacttaaacaatgaaggtacgtacacggaacgccgttctcgcgcaccgacttagaaaatcaaacgcgagacaaggacgaggagagagtaaagcagctccgaagatgtgaaacgaacgccgatagagggcaatagtcactctaggcgtggagagacaagaaggaaagcagttacttgagaagagggttcctcttccgacgtagaggcgcggacagcttgaccagtgagaggagcggtgcagttactttcaccacagcaggtgatatagcggctcgccgtttcctcgtgcaatagtgaaaaaaaagccgcgattgcaagctagggaagtgtgtggtttcctcccacatcacactgtttttgcaaaccgcgaaaaaaaatacaggcattcgcttggttaagtctgtgcagctgggttccagacacttaacactctcggcaacatacgtcgggcaacgaaagagacagtcacccactgcagtgacagagactgggtagggaagaagcagtaatgatcgatggtcgagaacacctggaagatacgctttcttgcagcgtccggccgtgcgaattctctttcacgcgcgtcttccactgccttaggctgcagagccggcagggacgtgatacagcaaaatcgttgcgctgtgtctctttctgtttgcgaggagattcactttgtatcttatacaactttttggtaagagttcctgtctttctgtatgtcgtctttcctgaaatcgtaaccttcccttgtcgtagctagtcggccgcccgcccgccgctccgaacgacgcggtaagggcgctcgtgccaccgcctgaagaatgagatgacccggtgttgtataggggcacctgaagcagatgagtgtttctcaataagaacagggccccatcccacctgtaccggagtctagaaaaatgtttgtcttcctatgtaccagtgttgaaaagttcaagacaagtaaatagtcaggacgtcgcgcgacacggcagcattccccccaagcatccctccgcgttttgccaggacgctaccgccggctggctctgcctcgattgcaaaaaaatcttcacaacaagttcgtctgctttacctctaggacattctgcggtgattcgctgaagtatcttcgtttgcagttgttagaagtaacttggttgtttctagaatccaagaggagaagccttgaagtcattctgggattgggttgtcttggcggaacctccagatgacacaggtcttggcagaactggagacattgaggctcaaagctagccgtaaagacacttactcactgccgacatttccgagtattttcaatgcaggatctcgctttcgggaggtaaatccgtgatttggagtgtacaactgtgtgtctcttattggcaaagggcaagttaactctcgaaagagcagcggcacccatatagcacgtggcttgtcaggcgggtcgtaccttcgctctcgggcttttcatttgtcgagtgggggatcctctttttaaattattgagcgccttgattcggatctttgaatcctccgtcgcaggaggccgttgcgggaatcaccgcgtgtcctcccgtggccgggaagtccttcctcttccacgccctttcgga

SEQ ID NO: 2086 - DNA, 1493 bp, Toxoplasma gondii
  source 1..1493: mol_type = genomic DNA
ttgatggaagtcgtgtgaaagggtgacagcgtggaatgcagccgaggacggaggcgaagacgcgcagagatccagtggcccgaaggcaggggcgtaccacacagcggcggcgtcgaggcggttcgttcgcaggaggaaaaggaggaggagacaaagaagagaaggaacgacgtctgcatttccccgtgtgctgacagccgcggccacggggaagatggtccagcagagcgcaggaagaagaaaggcgctgacggcgggcgttgccgacgcttgtgcggagcagggagaagaaggtcgcggggacggcggagaagacgacggcggagaggagagtgaagaagacgagggtggcgaagagagtgaagaagacgacggtggcgaagagagcgaagaagacgagggcgactgcagcgaggagagcagcagactggccgcgttcgcggaggaggcgagaggagaggctctgagggcaacgggtttctcgccaggctcctcgcgagggatctgctctgaggcgaggagcagcaggagcttctccgtcaacagcgagagaagcaggtctgcagccgcgaacaggatcttcccgcatgcagagtggagcacgacgttgcctacgcagagaaacgcaatgagtggtgtgtatcgataggtatggcgtctgtagggcgactcgaactccacaacatgtcgcgcggcgtcgctgtacaccttgtagtcgatgtcggtgaacttcacacgcaggttccggtcctgccactcgccgtagacaatcaacgccgcccggagaagcgccgcgtacgcgtacacgtacagccggagccgcgacgccggcgcctccctgaggtgtacgcacacccggtggaacggggcggcgaggcgctgagcgacgccgggggcggccgacgaactcgcagagccaggcttctctttttttgcgtctggacgcggcgccatctcctctgctgtcgacacgagagaagtttcgagaaacgcagccacgcggctgccggcggactcccaaacagcgcgggtcgtccgacacaaacacagaaaaaggcgcgtgcagtcgaggaggtccgtggagagggactgcgcggtattttttcaccaggtcagcggcgcatgcgcgcttgagacttgagagaagacaacgcagcgatgcggatatgtatatgtgtgtgtgtatgttgtcgcatgcagggcgactcgaagagccacagcgagcgagaagggaagaaggggagaagcacggagttgcggcgaggtggagaaaaaatgggtgcagacgcagcagaaattggagctcagtgatgactggaaagggcggagctcgagggggcaacctggcaggcggaggggagccaggctccgcacagcgactttcggtatctttcagagaggtcgaaaagcgcgaggtgaagtcggcaccgcaggtgtgactgcatagacaaggatcgagaaaaagagaggatcggaaacggaacgcggaggaa

SEQ ID NO: 2087 - DNA, 1823 bp, Toxoplasma gondii
  source 1..1823: mol_type = genomic DNA
gaagaacaaaaagcaacaaaggtcacgggattggaaagggataaactgctcgctgccccctcgatgagtttgtcccttctctgctgttatgttcccctgcatctttacccagcacaaggacggtgtgcactgccatggatcgggagtggatgcctcggggttctctgccaactgcattttttagtgagaggggttctgcagggttttcaaaaaagtgaatctcgacaagacagcgatgctctaacttccgatatcaaaggttcttttcctctgttggccgccgctctctcttatcgagagaccgtcaaacaacatgtgagaggccatgacgcagcatcagctccaccctgtcggcgtcactgatggggatgaaggctggggaaatgtaagaattaaaacgggaactcggtcatttcgagatgacacgcaatttatataaaatatgtctgtccgcgactgtcgggacagcctcttcaggcacgattttgtactaagcatgtgtgttaagatgcacgacggtctttgtcgaatggagtaactggatccacgcctccttctcccaaagaacgcagaggaagtggaagactttgctggtgcgctggggggtctgacagagaagtcttgaagacaagggggaaaactgaggaaggacgcatgccgttagctgcctcctgtctgtcgaccacaaacggcaggtgaccctgctgacgaaggaacggggacgagcgcgagcgaaaagaaaggcaaaggacgaaaggaacaggacagctaagaactgaagttcaattggaaagcgaggcgttcactcactggtcgccaaaaacaggtgagaggagaaattcggtggtcctgaactgctgcggagcggaacagttccgcatttctgcccgttcttctcagggaaaacaggaactcctgtagaaaacagatctatcgaagagaagggtaaatccctttcaggaatgttctagcttatggaaaccccgtgaagcgccgtcttctctgcgtgctttatggccccacgtctccgattatcgatgcgtatcggcggatgcacatatagagaacgaatatgccggagacgggcgaatgtgaacaagacaatcccagagaatgtctgtcaagcttctgggccatatccaaggcagcaatgaagcgcatgacgaactaagtgtctagagggtgtgaaagcctttcgggtcaaaaaacaagaagcagaagtcccttgaagtgcattgcaaggctccatttttgtgagaggagagcgggggtgctaaacgaacaagcgacctgcgtttgctaacatgtcaaccttgcctccaccttctgggcagcgctgctgcatgcatgctcatcttatctctttttctggtggacgaggcttttggaagtctctccttgcgattgtagcggaaagtgaagtgtgattattttctgaagcacaaaatctgtgacaagtctgagtctggaaggggatccgtcgcgctttagcacctcttgacggactgtagctcacgtaatgtaactacgaaatcagggcgagtcactcgggtctattatgccaagtgtgcgaggagagagtctcgtgttggtgtcgaatttggattcgacgaagaatctgaaagcaatttttaacatatcagtaagttgcgaataagaataggacatctcttgtgtgtgctgaccaactccaggcctcactgcatgcaaacacgcacaactctagctccacatccgcgtgttgctggccttttcattggagatgccatcttcaatggcatattttttctcgctagccccaggttccacgtcttcgtgaacca

SEQ ID NO: 2088 - DNA, 1562 bp, Toxoplasma gondii
  source 1..1562: mol_type = genomic DNA
tcttgttgttttctcttgttttgtccacacgatgcgtacctcgacttctatcgcgcgctggagaagctgcttcgcctcctcgagctggccttcctcggagagcatctctgcggtgcggacgaggagcgagacgtcgctggggtgcacagacactccgcgtttgaggaacttgagggccagggcaaagtcaggtggaaacgcgttgagaagactctcggctttctgcaggaagaaggacggcgggagcgaagagctgtctgcagacgaagcctcggacgcgcctgccttctggagctctgcagcggcggccgagcgcgccgagagagctgcctgtggagtgagagtctgccgcttgctctgcttcttcttcttcatcgtgagccaaggaggccggatgcactgagtcgacgcgcgcgcgggagatagtgagaagaaacgcgaattcaagaagtccgggcaggcgacgaacagaccagagggactacgtcacctctgaggaaggaaaggcggcaacagagcgtcagcagggagaacaagacagagaacgagacagacgacgcaacagaggacggccgagaagaacaagaaaaagagagaaagcagaagggggagagtacgagagagaagagaataagagaagagagatacaagacttgagggaagaagggatgacggcgaggattccaaagaaggacaaataaggtttaagaagcaacaaggaggaagcgcagacatgcgaaggttctttcctccctgtctgcgttttttgaccgtagcgcatgcggacaaaaatacgtcacggaaaaggctcctgtgcgtcctcccccttgtctgaggaagaatgcgaagaaacctcaagaatgcgaggaaacctcaagagatggaaagggaaaaataaagttgagcagctctgcaggagagagggccgccctgcccccgcgaggaggccgtgacagagaggttcagagagaatgactcaggagagaggaaaaaacgacaaaaaatgaaagcaaaaaaagaaagagaagagagcagtgcgtaggtttgtagacgctttttcggtgtcggaaaatgtccgagtctcccgcaaaatcgcactctctcgggtgcatgcacaggaagagctaaaaacaagcgaagagcgcgagtggtgtaaggcgtcgtctctctgttgcctgtctcgtctacaacggtcaagacaacggacttgctttgtctttgccgcgtcaagaaaaaacatttgtctctgaagagaaacgccctccatcgagcattgttcgtccccgtccgcttcttgctttcagacgcttttccgttttttcaattcctggcgtcacacgctgtctccaggaccttgctggctggcgtcgcgtttccagtggttctccttcttgggtgtcgactttaaagaacattccagaatttttagacagcgcgcgcgttttctcgcagttctcttcagcacaaacaagtcgaaggcgtcacacctgcctgccgcagttgcagtcgcagtgctcagaaggtcttctcctctccccccgctctaaaaagttacaggtcga

SEQ ID NO: 2089 - DNA, 3143 bp, Toxoplasma gondii
  source 1..3143: mol_type = genomic DNA
gaaattcaaagtctcgaaggcgcaaagttttcactttactgccgccgggaacggaccgtctgcttccgggtcgccttcatgtgcatctgagaggggctgacgatgatgccagactctctgtttacacaactctagaaagcaaagagaacgggcacccggccaacgacccgtcgcttcattcacttcacgagatttctgttttctaaaagtggggaagatcctcaacgttctcttccgaaattgtgtacctgtgagatgcactcgtctctccatgagcgcgtaccacgcccgcggtgtgactgtcctcgacgccaacacaagcgtggactcttccttactgaaaagggcggtgaaatggagccagtttcagcgcacagccatttcctgacattccccacgtactcgagtgtccaattgcgaggagcaaggtttcagaacaatgagcgtcaagatagctgagtctcggagacaagtgttgatataaacttgaaagtttgtgtgtatggcacacctccatgtacaaagaacgaattcagatcttcgcgttttttcagcagttgccgatggggagaccgtggaacaccgacggttgttgcagaaacagcgaatttcttgatacaacacttttccgcactaaaaaagccatgtcacacgtcccatgagtgtactagcgagactgagagagaacagggagatgtgtcttcacacgtgtagagatactctgtcacatttaacgaaaatagaggtcgacagactcactggagaccgtgcctgcttttgagtcttgtcaagaagtcactaacagacggacttgacgtcttcaaatttgctgtttcgtctcgcgagtggaaaatggctgcgcattcgttagctttttctcctcaaaaaagggaggggccgggagcaaagtaattcaaattccggaaaaaagtcgataaacccggaagaaatcttactgtatcgaggcggagcacgaccctcttccgagtctctacactgcctgaattgtgtttgtgtaatccgtacatgataacctgatgttggcgtgtttcgcgcttacctctgagatgtgttcacaaatcttttggaacgcacacgatccggtgaaaatatgagattccttactttgtgcgaagccgtggaagaaatcaatctccttgttctacatggctttgtgggccacctgctacgagggaaagaaacagtgtctcagcgtgtcgttcgacggtcatagtttcttggtttttcaaatcgatccttgatgccgtggcttctgagacgagtgcttggctctctgttttctttacacttaagacaagaaattcgttagtgtctccgaatctgctagcaacaaaacacgcacgcagccccagatgtacgctttttctgttgtttgttgctgttcgcttttccagttttcttttgccccacagccgccatgcaattccttggagaaagtaaacgcgcggacgccagcaaagaacgggcacaatgcggcttttgtttttaccgttcttcacttcagcggcagcttctccatttctgcatgcgggtcaacgacatacggggcagaagagtaaatctgtgttccccaaatggtgttctgtgctgttggtcgctggtctgatcttctgcgttctgtttcccgcaaacgcgtagtagcttctttcgcggtctctcttgtctccactttcgtctagaaggtcagcgcgactttccttccgcttggcattggttcgcaacgaaaatccttcgcctgatgcaagtgtcctggaaacgaatgttcctttctctttgtttgcttgcgtcgtccctacgaaaccctgtaaaactgaattcaacgtggtgacgctctttagctaagacaaaccggcctgaaggaaaggacggaaacgccgaagccagaccgatgaagacttgaggacgcacacagctcggacgtttttagcggacgagaaaaacagtgtcggaaaaaaggtggcttcaaagcttcggtcgcatctatcagctactcccatactctctcgcttcctgctcttgagatatttcttcttttgttgacactcaccgagtgccatccgcacatcggacgctggcaacccggtcgtgtttcctcatatgcggcaaagatttaaagaacgctccttacagcctaaaaccgtgttcagcgtgtctctcattctccacgttccttatgcggatgagccaaacgcagaacggctctctgtgtcggtcaatagacaccagcaggtccatgcaaagcctctcttttgctgtcctttacagtgaactcaggaagaagtgcagctaactgggacacaaggatcccagatcgtgtctgcttttgaaagcctttcgtttttatctgcccccctaacacggtagggattttgtttgcctccatcgacctagagcgatatcaacttacatctgcgtcatcgctaaactgttttctgccaacgtcgtgatcagacttctgctcgctcttagccgacatcaacgacataacgatcatagctagaccggttatcgtagtcatcgtaagcggatgctgttaccatatcatccgtacaagtctagtaaggcacaagtaaatattgcctttgtacaagtgatccgcgatccagaagtgaatcacccaaatcgaaatacaccggttctccacctgcgtactgctttgtagccagtgcgttgttcgctctatcatcaaccagacggtctcgcggtgtttgcgctgtcccaaatggagagaatgcgttggcgtcacatctaaatttttgtacccgcaaactggagctcagcacgtgtttcttccttgtgtccgtctctaagaaaatctgctttctatgagtcaaaccgaaccctcaagttcccctacgaacaaggactgacgctgtcatcgccatggtgttttcttggccgcgattcgcgtgtctgtgtggcatctccctctggaccgcgaggtagagcgtttttgcttcctccgggttagtcctccgcaaaaagcactctccatcttacccgaaaaagaactacgaaaggttgagaaactcctctggtgtctcccagtctctgcggaactgaacaaagaagtaatcgtcaatgtggatggacaaaacacaagaaaacacccgtgcaaagca

SEQ ID NO: 2090 - DNA, 4477 bp, Toxoplasma gondii
  source 1..4477: mol_type = genomic DNA
cgttgacgtgaagccgttttgtgttgccgccttccagtgcatgaacagcgacagcggaaaacgccttctagccgcgaaaagtcgatcaagcgcaagcgccttctcccctacctgagcattgtcgtccgcagcgccgatactggcttcgcgaagaagaagatcggacatgcgaactggagcaatgagctcctgtccagtctgcggcgctattccgtcgcctttcgtttctccccgacaaggattagagtcgctctctgtaccacgacaaagacgaacttgaacaaaagaagggtcgccacctgcctccggtgaattcgactcccccgtcttcgcactcttgtgccgcagccggggatccacctcggcgtggggtgtgcgtacaccaaagccgcgaacagcgtgagctgcgacgacctcggcagggtaaaacgggtgctcagaagcgcggaagtctggctgactgcggtcggcgtttcccaggagtctcagggattggtcgcgagcctggtcctcacagagcagccgctttcgactcgttttgttcctgtcggaactaggcgtttcctctgccgaactcgacggctggagcagcgcgggcggagacgcagttgccgcgcagccacccgaagacgacggtggatctctacaggcttgcggactcgcaactcgacgcagagatcgcgcgagaaacggaaagctctcttcgccgttggaagccgagacgggggcagaattcgctcctttgatcgctgtggcgctgcggtctggaacgagacaccgcgctggaacccacaccagagtgccaggcggcagcggtgacggagctgcacagagaccggccgccggcaaccgagccggggagtggaggtgaggcgactgcggcgggggctccagaacgggcgaggaaagagcacggacggattgctggctcgcgcagagtggagagcgcaagtgtggtcgacgttcgagaagaagtccaggaagcgaggggcctctagagagtctccgagacaccgaagactgaatctctgaacgcacagtctccacacatgacgtgggggcactgacagaaattggaatgtcggacgacgacggagaacggggaactcgagctgaaccagttccagactgcaggcagcgacgggaacgaatgtggtcgctctctgtcgagtctgtggcttccgtgaaggagttggtgtctgccaagagttgggtctccggcggttgttgcaggtttggtctgcctggggcagaagaacgcacaggaaaatccattttttcctggtgcaaagcagaagtgccggtggaaaggaccgtgtaaacccgagtcgcgaaacacgcggcagaggacacccggggaaagaggcgacacagcgtcccgaggcagatggctcttcggaacgaatgaaggcgtaacccgtccgatatcgtccagatgcaagagtttctcaaaagagtaagtacaacgatgtgcggaatattctgcacgagtttcctgcaagtgtgtatcgagcaaagactcgacaaacgaaaagcaggaccgagactcccaattagccgctgctgctttagaggcgaccagtccggaacgcagcggtacgtggtcaagagagcagtctgcgagaaagtggcacacgagagaccggtccttttccatgtcagaaaagaaggagctttttttgtgcatttgctctcggacggcccttgtctgccgctcggtctgtgtctgctgaccacacgcttttccccgctttgtcgtgctggagggcggcgcgaaaagagctcggcaactgtgtcacctcccagaaagccgccgccccccgatgccgcactcaagctcgatatcagctggcagctgcggtgacttgcaacgcagttgctgctttttgcttattcgtatcccttgttttgaagaaattggatatcttcgcgtgtgtgctgccgcgaggggagacgagcaacatgcaagagtggctagtctcccgtggcggggagggaacgcactgtgtctcccgagtctacgcgtctcaaccagtaggattaaagcttaccggaaaagcatcactcttgttctgtcaaattgcatgtgcttcgttttgtcaacaatcggcaaaacggtgccgaaaatgaaaaaggtctaggtttcctaaacttcaagtgagctggacctgaaagggtgcggggggggcggggggggggggggcacggacactttgtaggaggcgcgcacagacctaagaattgtacaacaaggaaatcgcgggagtctaggtggttcaggtcctctacaatctactcttcgttcccgcggagcgatcaggagtttcactggagcggcatataagcgctagtgccatgtgcgaagaatcgaagagttgtaaccacgaacccaagcgactgctccccattgtaaaccttgcacatgcgagaaacaagaatctcgtagttttggggggtttttaatcgctctcgcatacatggttcctggtaatgcagtagagctaggataggatacagtgaagacagatattcaagatctcaatcagtagtccaacacgtgtagttcagcaaaacctaggaatgccatttttacactgtgtaaaacagagtctagcttcagtcgcgtcaaacaagaatatggggtgacgtgaacgctgctcggggtggcgaggatggtagtcgtgtaccacagacaactgaggcacgggattcgtaatagagaagcctatgcagcactgacggagagaatcagtgccagctgcactgcggtaatgcaggataataaaaccttagtcgagatctaaagatagtctggacttcggcatacgaggaatgtttctgttgttttctccgaggacgctcgggtggcttgtggaagaggcaactctcccccctctgtctgggaagtttcttaccaaagagatgccccaagcaccgatttggagtctctagtcccaccatgtctgatacgctttcggaatcaattgaactcagaatgtcgactacgaattgtgtgaaaacggagtgagtagatccatttcaagctccggtcaaacacactaacgcacaccccggtacgtcggttactaattgtgtctacagccagctgagacggacgacgcgtacgatgcgtccaacgagttgctaaacatgctcagtcgaacagcaagactgctgtgacacatcggattcgctggcaaagtgaatcccctggcatatgttctacgaataggatacagccgttccggtgacacacgtgctggtagtctgcaacgtggccggcacgtcaacctccctgctgcccattcgacacagtaacacagactattcaaggcatagaaatcgacgtgacagaatacgccgaccgtctactacctggggaggcggtgcagcagggtccgttagacaggtgatgccgattgtttcgttgctacagtgcacgaaaagaaacgaagttgcgacattttgcgctccctacgccttctgtacaggagatctcccactctaaattacacgaaggcactctacgaaggacactctctagcgcggtgtcggatataaactgtgtttggattcgatcctggacttgggatgctgaatttaaccgtagtatactggcagttttcatgagcgcactcctttctggaacccttcacgttactggggcttccgtttcgatcgccgtgcaccgaactgcgaactagccagagaggtaccggctgcgtttttaccgacagatgcgaccgtgaaacgtatgaatttggacaggcaatcggggacacacgaaacagaagatgtgacagtggttttcaaagggagtggagaaagcaatgtgttgaggatggggttccacctggaccttcgcgtgtctcactggccaggcgctcgaaccgggaagtgctcttgcgcacacagcatcgctggatttcctccaggtgtgtgctccacctttaaatcacattcccaacctttctcacgttttggagatttctcgtgaacacacactctgttgtcggacatccattctccccctggctcaaagaacgaaagcgaaaaccgccacccgcagggaaaagcgacgagggcgggagcgagcagagagagtacgtcgaggaggggcagcgaagtcaacagccgagttccactgtgcaacacgggagctgacacatctttccgtgaacatctttaacactaagcttatcttccactaaatcatcatttaccaatcgttccattctcgttctttcttccgggctctcggtcctgccgctgtatcgagcggcgtctacctcctgtctgagatggggagtcccaggcgaccggtgtgtcttgcagttaacggagaacttttccagaacggcgtgagcccgatccgtacgcttttctagccattctcttttgtcctagtatgtctaacggttcttttcttttttgcactcgaaagagttcccgaaaaacgaaggtggtccgtcgaaca

SEQ ID NO: 2091 - DNA, 4749 bp, Toxoplasma gondii
  source 1..4749: mol_type = genomic DNA
tctaggaaagcaccgtctcagaggttcgcatgtccaaccgaaaaaaggtgtctaaaaacgaagagaacaacctcaggagtcttcgctatgatacggtcattatagatacaaatatatatatatatatatatatatatatatgtatatataagtcgacgaatgtatcagtgttgtgtttgacagcaagggtacacttgctgggtcttttcggcgagtatgtgtgctgtgcaggttgtacatgttttgtacggacgagcacagaccgagtcctcgctccacctggacgaactgtgggcagaggaaagttgttgagcgtttctccatcgttaagtgcagtagtgaagtgcgaacatgcttttgcgtggcgtcaacgaacgacgaaaaagagacagcgtgcgagagaacgaaggaacagtgaacggaggaacagatgcaaatccttacactgccatacgccgtctgagtttggtgacgccgatctgcagccttacagagaccgagccagtgattccctaagatcgtcgtaaagaaaaacgggcaggtgaaaggtcaatcccaaagcatttcttttcatctcaactcgggctccgaactttgacctatatggcgggaccgcagaaagtcaccaaagagcgaaagcgaaactgcaggcgtttgccgccttggtcacctgccgagaatcggtgcctacatgcctcgtcgtggacgagatatctttgtcgtgcgttcgtttccaactatacagacgcaactcaacatgagtatgtaaaaagatcaaagacaagtgacgcaaaggaattagcgacgcctcttcccagttctttatttctgattactaattatatatgtgtgtaatggagcagagaacggcgcgacgactgatggattcgcgacacacgcaccggcctcgaaagagaattcgcagaacaaaccgtcagaagtccggaacccgtaacctgcctcgagttcgccgatgaagtgaatctgacaccaagaaaaagtacacacagctgagcatgagaaacaagcggttagacaggcctctggaaaactttatctgtctccaggggtccacattctcgcctcagacgttgtttggcatgtggttcttgtcgccttatgtagttctttgcgtcacgaatttccacagaagcacctgagagttgttggtggcaaacgaatggagtttttagagcctgacgttgacttgtccctttccctctgtctgttggtgattcaagaatccatagggatttctgaattaaacgtttttctaattgtgaaatattagtgtgcctttccaagtaaataaatataactaagactgtaacaacattcttgagtgccgacagccacatggcaaaaatgtctctactaggaattagaaatagaactctgccaaacccactgcgactgattgtcgttaatataggcaggcagacctacgtctcgcatacagagcagcagccggcagcagagcagcagagcggggaccatggggaagtgcattctttcgtacctcggcttctgtgctgccctgattgacaaggaaaggctggcgggcgttttgatgaagggcggagagcaggagacccggggcaagagggcctgtgttcgtttcactcaagcgactcggccatctctccaacttaggagccgacgcttccactttttgccttcgatcttcagcgtttcccgtttcttccagggtaggctggaatcgtgccgcactcggtacgggtgaactgtgattcactcccagaggactggaagctgggtaggtatgttctggtgccctcgctgcgtcgtcttccccgtttcccctgtttgttgccggaaatttcgcgtcgaactctgccgatctgcggctctgctgacgagaagcttctgcaattttacttttttcaagcgcacaagctggggaaggcgcggcagcagctgcagacgcttgtgcgtcagcacccgccggtatgtcgacgcggtcctgccgtttcgtgtcactcgttcgctttgctttttttcgcttccctgtcacagacgacgaaggggcttcgccttcgctgtatccagaaatgggcggaatcagggagctgggtgggtctgtattcccaggtggattgctgtgtgcggtgttggaaggtgccatgtcgaccggaatcttggtgaaaaggaaggcatagaaagcagaaggagaaacggggggaagtgacagtgaggtgctccacagaagtgacaaagatacagacaatgaatcggctattcagaggtggtcaggcgcacgtgacgtttgctttttccagttttctgttaagatgcgctgccaaccctagactgggaaggggcgaactagtcagcaaccagatgcagggttggacgaatcgcgtttctctccatgctataactcgggtggtttgggttatgtcacgtgaccggggaagaatgtggttcttccacacggtgcgggagtggggggaagccgtagcggaacttagcacgtaaacctgaggaactacaagaaacttcgtggacgagcagaactgctggatgatattgttgacacaaagaagcaaaatggaattcgcggtgaaaccgttggttccttctcagagagccgtcttagttttctagcttccgtgaatgttcgcttccaaagagtccactgttatttggcgcgcgcttcagtggagcctcggataggccgcaccaggtgtttgtcagtataccctagctttcgttccagctattcgaaaggtgaatttctctataaacgttggcagcggtctagagctgacaggcactcggacgtcgcacgacacgtcggcgatcaaaactttgggggtcgtcgggcaaagccgtttaacatgcacttatgggctgtcctcgatcgaagaaaccacgtgtttgctccgcttgcaaaaaccctcaggtcgaaccaatgagtcccacttccaacacttgggataaaaggaagagactaaaagcgatacgctggatcgggttatctgacgcctcccataaggtgaacctgaaacagtgcaggactacgcccctgaatggacatcacgtaaaaacggtgcctacagtatcttatcgctgaaactcagcgacgcctcatactagctttttggaggcaccacgttttcgtgtcggaaaggaggttcattcaaagtccatgaggcatcgaagactaaggaaaataagccgaggttcttttccctcgagtcgctcgaaaggtagtatattctttgaagctcactcccggactccaaccagtgaagaataatggcgacaagaacatccctcttcgcttcttgagggctctttgacaagcaagcgtgtcctatagtacacgccgctctacgttcgtagattcgccacggttccagagaaaatggtagcggtctagctaacaaagaatgcctccagacgaggtaaagacgctctggaaagacagcgtcgcagacggatctccatcacaatacgtgagatattcttcagaaaggcgtgaaatagaatagccatgataggccaggtaaagagtccctctcttgcgcagattccgagaatccagcaagagcacttttctccgctacacgcatgcacgcgcccgctccgatgtttgtgattctggctaacacttccgttccttcctacacaaaactcgatttaggaaggaaagattgaccatagaaaaaaaaagcttgcaaccgaccacgatcggaacataacacgatgtccacacacaaaccgccattgctagacgtctatttggtctctcgggcaatctcatatgattatccgccaacttaacacgcatgtgcgtgccggcaaaacatactccaagcgcttttttctcaatcgtaagctgctgtgaggctcatttcagtgccggcacgagtctcctccactgcaagcacggagtaagatcctgaacttgcaaaggacgccagcgatctacggatagatgactgaacagtcaaagttagactagatacgtaacgcagtcgtgcgcggtagttcactagcacctcggtgttgaaacacgtctctggtgatttttggatgattcgcatgacatgcgaacagagaacaggaaacttattcgaggtcggcaaaatggaacgatacacgctggatgctcttggaacatgtccggacccttcatgaaaacgagactttgtcgaggattgtggaagataggagaagtggacgctgatgttgtgttgcatagggtcactcgtttaatttgattgcaacccaataacgcagttaactcgagcgctgggatcgaccggggtgtaaagaaggcaggagcgctgacaaagaactgccagcgtgcttccacaagcgtattcgaatgccacgccacgaatggcgcagtaacttctgtcgacgttgttctgggcagtagccagacggcagagaccatagcacttcttctagcactgtaaaattgcgcctggccggagttcctttagacgaaatagcacatgatacctgatctacgctttgtctgcactagatctgtgatggcataaagccttacggcgttcgtctgcttcttgcgtgttttcgagccatggagtgttcgcgaataacagccgggcattattcaaagctcgtatctcagacagttgtccaagacgacgtcacggatgtggtaaataccgacaaaccaccggtttaggatcgaattacttttcacaccgatttgtccaaatcaccttcagcagttccttcctgtcacaa

SEQ ID NO: 2092 - DNA, 1785 bp, Toxoplasma gondii
  source 1..1785: mol_type = genomic DNA
ggacaccgagcaaacatgtgtgcaggtcagatgggtggttctcgtgcctccgtttggccatggaaaatatacattttaacgcgatttaaaccacgcaagatgtaaacgttcctccgaaggggacattcccactcgacctttcgtctgtgacaaacaacgaagacttcttcccgctcccaggaggcaatcgcacccgtcgcgctgtcctgtggtggaggttttcccctaccatttcgacgatagaccgtttatcttttatgttgtatggacactcttcctcaacgcagtgtggagtgagtgcagcagagagtcgacacggaaagtcatgacttgatgtggggtccgtgtctgagctggaagggtttcggtatttgcagcagagttttgaccagcgtgtaggtggcgctgtattcacacaagctacactcatgcagagctcagcttgaacaagccgaacgttttccggaaggggttttgtcttggcttagcaactttcccgtttgctctattgtattcgaggaaaaaacgaatggcgtgttgagaaccaccaccagaaccacgtggtccaagaccgcctacacctcgcagactccctttgcagaaacgctcaaacatccaacgctgaagtcgaaccgccaaaatgccagactttctgcaaaactaagctgtgaaactccccggctgctctggtccgcacttctgcagccgtggcggcttttgttaaacatggatggacgtgtgcaggcgaaaaaaaaagtgcccgaccgtctaatgctgcagctgactaggaaagtggggaaacagagctgggcactgaatgccagttttttttctgctacttcctgaatttcgcagcatcatctgcacgggcacgggagctcaaataggagcccttttttggtgggtgggttcctctttgcggtaatggttttctccgagcggcaattgcatgttttctgcgtagaaaggcaccgcgagaaccgtggtatttcctttgcaaagacagccaagcgggacgcaaaaggcacatcacaccgcattcccaactctgcttgtgtgcactggtgctccgcagcgttgtggatcgatttgagatttgaacacttcaaaagctgccttccatgagattcgaggaaacacaagaagtacgaaacaatgctctgggcttgctggagaaaaagcaactcgtctttgtgagtcagaacacaggcgatccgttcagtgaagcacgcagccggtgtcgggaaacaagcgtaactggaagtcggttctgaaaaagtgttggaaactaggcagatgtaactgagtcgtgctttgcgaaagcgcaggagaaaaacagaacgacgtttcctcctcctttactagactatcaaacaggggaaacttctacccatgattcctcttttcgaggagtctttgcagctcccgttttggagctctccaggactggttgtttcaccgcagcatgccccaaacacaaactctcattgaaagggcacgttgaggaaatgatgctgaggaagcggcagagcacgtggacgtaaaaatcgagtgttgttggcaaagaagtctgccccctcttcaggtgcgaggcatgcctggtacagcgcagactccaatcctgccagcacgtcctataattcggaccgcaggaatttatcgatttcatggccgatcgatgatggccatctgcgctactccctcctgtgaaaatcgcgtcgaaacgaggccctgaatacatagaaacgcgaaccatagtcctaagatttcaccttagttctaccg

SEQ ID NO: 2093 - DNA, 4844 bp, Toxoplasma gondii
  source 1..4844: mol_type = genomic DNA
caaccaaaatttgattcgcgaaaagcgcagacggagctcttcgaccccagaaggcgtacacggcgcgtagctgccgagcacctggaaggcaaaaacgggcaaaaacgttcagtgcggcaaaagaggccaagtgactgagcgctcgctcatgcgcgcaagaaaagattgcgcaagattctccggaaaggtttgaatctttttgcagggtgtctccgctccgggccaagggcagcgtggatggaagtgaaccactctgaaacacgagaagggggacgactctagaaagagaaaaaagaagaagaagagaagctcgaaaaaagaagaagaagagaagctcgaaaaaagaagaagaagagaagaacatgaggacgagaaagcgacaaaaaaggagggacagcaacgcacggacagagaggagttgaagggtcgccaaggagagaacgagaaaaacggtacacgggatggaaagccgagaacagaaatggcagacagaagacgaaggcgagaatggttcactgcagagaaaaacaggttcgctgcacagacgaacaagttctttgcaaataaaaaacgagagaaaactcttcaagtgaagaaacggggagattcgtttacctccatgtgctttccgtctcgagggtctctctgattggcagcgacgatcttgtaaaaccgctttcctttcactcccgcaacttgcatgcgaatgcgcgggggtcctcgctctttcgagtagaacggcagaaacatgtgcctcaccatctctgaaaaagtaaagaacaagacgagaggaactcgggcaggcagagccagccgcgcggaccccgcggcagacggaggaacgggaagaacgaacagcgacagacgaccggagagaagacagagagaaagagagagaaggagagaaaaagagaaagaaagagagagacacaacgatagatcgacagacggagagagctggaaaaaagagaaaaaggagaggcgcttgagtaggagaagagggcgagggaggaaaggagcagatggagagactgtggagaagaaaattccagcagaaacggaaacaagacgtcttcgcggaaagcgtcagccgttgaaaaacgtagcgaataaaattgcgagagcggttgacggcgccgaggagagaccgagacagcaagaagcctgggaggccagacgaaaaaacgacggaggaggacgcgaagcgaaaatagggaggaatattaccgaagaactggagcgtttgcaccgacagccgttgttttcgcgctaaaaatcgttttcaaatgactgcatgcgcttcacggttcgaggtctgtgaagagacggcagatgtgtgctatgaaaacgctgcagcgaaccgggtggacaggcacggcactgtttggcgtgatcgttccctgagaaaggacgcttgtaagaagattagtccaattaattgggatagacgcactcaacatgtttcggcaacaagtgaacaaatgagaaaaggcacctcgagcacggcatctatgtcgcccggcttcctccacagaaaatctcggtcgttcgccgcggacgactcagttaattggtttcagctttgatattttgtaccaagtgctctgaagtcgtcgcacccgctgatcggacggtttctttagtgtgggaagttcgcagtgcgcactggcaagaattttcttcgaggcaggggcgctagagccgttgaaatgtgaagacactgcttacgtctacaaatcgaaatgctcaggggcagagctgtctggggtgtccgcattgtgcacatcgtaaaacagaggtttgaaggaattgcgatctcatggagacacggaagcctgcctctgcgtcagctgctcgtctctacaggaggaatgatttttcctggggagtgtgtgctgcgagttcgactgctgcctgagaccgtcaaggtcttactagatccacgtcgagcgcgcgcttttcatgggcgtgtgaactgcataaaatacagtgctatcgagcgcctggttgaacagcgtccatctcgtgatctgcgctaccagcatcgaaaagcatatcgcgaccatctgtgctcttccagccaatcatacggctttgtgtctctggaaacagaaagaaatagaggtgtcgccgactggaaagaaatgcgtctgcctttggctgcccgctcgcgagcaaggtttccataccggagctagactgcctctcgcgcgagtgcgtatgtgccgttcctcggtctacacatacgctctttctgtggcgaatctctgctacgaaatagagagcagacagaggggaggaaaagccttgaggacaagtcaaagacgtgcaccagacaaggaaaatggatcggttctggaagtgcatgtggcaagttttcttgatgaaaggcagggacaggtgtcgcctggtcagaaaacactgtggtcggtgaaacaagaactgggatcttctccgagtaacggaagcaggaacaaacaccaaacggtttttttttccccagttcttctttatcactttgaaaggttaccaacgaccagaagggaagtgtgttctgaagaaagaaagatgatgtttcgaggtcagatgaaaagaaccggtctctcgagcgtaggaagagaaaaacgatgcaggcagacccagtgatcctaaaactgtatcaagaaacctgggcagtgcagactagcataagagctgcaaagattgattaaagaagcccaagataggaccgacaataacatgactgaaatgtaaaccagtaatcataaatagaccattaccaattccatcaaatagagcttaactaattggactgtgcagtgaatactcgaattccattcgaaaacactcttgctttcatgctgaatttaaaccaacgattcttcgtttagaagctgaaagcgagttctcgcaggggttcacggtcgcgcgtccggagcgtcgtaggctgtcaatctggaagcggaggcgtccataatactcaccgagtggtggtgtttctctagcttcttaccttccacttctttctatctcgcttctcctgtttacaacttgaggttctacacagtgttcacgagagggatagaaaacacttgaagaagagtcgatttcaaaagccgagcaagatctggaccgcatgtccataggcgcggacgagaatggacccttgactgaaatttatgccagtaagtgggagaataccgccaccaaatccgcagctgttctgtacagactaacatgaggaaggcgactacccaaacctgaatgtgaaaatccacgaacacacacttccacggggcatgcccctgccaagggcaaccacacactgcagctgccgccgtggttttcccgccccttcactccgctgattacgacacctttatgcgaccgttttcaattcgtttttctctttacacccaccagaagacagcgtttcgatgtatggatgtgtagctgcctgaaccgtcggcttagaggtcccctctcctccaaccggcagccggggttcttgaatgtggaacctgactcgaaaaagttcccgacaagcacacgatttcttcagcccaaatcaacaaacagtcccgcgtgcgttctgcactcttgaaggtctctttttgcgttggacgttcgccgtttggactgtactgtcggcgaatcgcgtccgatgcaccacatctccgtcggtggaaagctcgaccctctcggctgtccgcctcccaaagtgtcgctgcccgtcccgaggctctttctgcattctcgtggcttttgctgctgttactgagaaagggtcctcagtacccagttgtctttgtttttgacagttgggggggaacttccgaactactgatgtagattagtacagaggactcgccgtttcccacgtacaaaggcggcaccacacgaactgcgctccctttcataagaatccgtgctgtcagaagagcttctcactgagctgctcaagagagctcaagaagtgatgccgccggaaactcgggtgtgtgtgtacctagcgtgagttttaggcttcgaagcaccggacagagaaacaggagagtccaacgcgcgtcccacccctttcgcggaacagaaaactgtgaacaagttctcccgagtttacatgtttccccctctgagagatccgcatcacgattcggccttgtctgcgtcttggtctttcgacagtcgtgtcgtcgcatgtctgtgtgatcccacacgggaacctggatcttagtacttacgctgtttccgctgatataagcccctagtttccacgcgtcagctctcactttacccttcatgaaaaggggagaggccttcacgaaaagattgtgacatagctaacgacgaggtggcgaatctgtgtcgaaaacaaaacgttcgtctgtttgctacctccgcagctcgagatccgggcgactgccttggcgtgtgtgtcgagtttttcgttccggtgagtacacacacacacacacttgctgcttgcactgttgaaggcgtagaatatgtttttgactcttctttggcggccagccgacgttttcgcgccgagacgacttctgcgaccccacatcgaaaaccgcctttcgccgaaggtcggccgaccgacacagatcaggcgtcctcccttttggccggggacgtctccacgctctgaccggcaagcgactgagagaagcccgcagttagattttaagaaatcagaaaaccaaggagagaaacgtaggtggggtgtctgagaaacggcgtctgtcaataggtccttcgggtgcgggcgggaagaagagcggcagctgcgccgcgccgtgcatgcgagaccgcgaggcagggtgcgattttcctga

SEQ ID NO: 2094 - DNA, 2771 bp, Toxoplasma gondii
  source 1..2771: mol_type = genomic DNA
tttttctcgctttgcgtttcctctgcttttcgtccttctcctaggctctcgaggagagtctgtcgtgcctgagtccgggcgacagtgggaatgttggagttgtctaggaggtctctttcttcgtgtctctttttctctttgtctctcctgacagccctgatttctcacgtccgtgtcttccttgactgcatgtggtggtgtgcactcaaacttctccgattgaggtcgtccgtgtatttgtcgccaaagctcaccgagcctctctcgcgctttgatgccgcgcgcagaccaatggttgtctgcgagaatatttttctctgtacccacacgcattcttcgacttaggacggtacagacgcccttgtacaacctccctccaccgtcgtgtattgccaacactcgtgcgtagcccggaaaaagaaaatcagagaatttcttagaaagccatcattcgggttgcctcgctcacaacacaggttcgctaaagggcatgcttcacagccgtcgttttcccgttcgcgcgaattcctctctcgcttcagtcgcggttgtagagtgccggaaactctaaagcctaggaccccctgaccccttgtctgtgccatcgcttcgcttagcttccctcgcatgacatcgaggcaattgacatcaggtatttgccagaaaccaggtgttgttcttattttacgattttccggctaaccgttgactcactgaaccatcctgatatgggtggtaagattgatcgtggactaccttatgaaacaatatgcctcaactgtaaacgtctttatttaaccaatttaggattcgcgcgaccgcctaaaccgtaaacggagatggtcgcaggcctgctcaacatccagcctgtgcatcggtgaaaatgaagtgcgccacgcgcgtgcacatctccgtgccaggatagaagcgatagggagtgacctgaatccattaggtatcctcctatacggtgaggaagacagttgacaaaggacctggtcgacggacactttgagggatgaagctgaggaaatggcttgtcataaccgttcaattcgggtgcgaatcccactacttgctaacgcctggttcctcctcctcctccaagaggatagtcccaaaatgtcgactgttgctcgtagggtgcgtttgtgtatgcgagtttcctatacgtacgcgaggagttgtaggcccgtcataattgactgaaagagagcacatcccgtacccagagcagcggtttggatacctgtgagttggaggcaagatgttacagaggtgcaactacttcgacggaaccgtcgttttttctgattcctcgcattctgtgttgcaacgagacttttgaaacagggaaaccttgatgaaagacacactatttcagtgtagaaggaatccgctgcccggcgttctgtgttagctgccaggtcagcttcccccggaacattcctgactagagtcaaataaacatatcgattcttggagtgttgagttcccaatgccaagttgcaatggattgggtaggacgtaacctttctgttcaggaactagaggccgtggcgctctgactttgccttgcggacacggtgtcagattgtcttgcctggcgcacggccatatgtattccattggtctcattgatttgtcgataactgtccgcctcgagcctgagacccatgttcattgcagtttcctccatctctcctgtccagtgctgttagctagtatctttctcatgtgatgctgagtcttgcgagtctcaggtgtgacactggggcagccgtcacggtctaatggtctccgttaagactaagagacgttaccagttcacacgccgccaggagcgccgccggaccgatgtttctcgatttaatgaaatcagtttgaatctctgggtagaacagcaatagacagcaagtcttgcgtgaggacttccgttggatatgaaaagcagtaccatacccagaaattttgtcctattcgggccgactccgctgaatttagtaccgtcagtggtaggccttttaatttgtgtacgtgaaagacatagaactgcaaacatcccagaacctcacttggagtcatcgctgcttcagtgttgggcagatccgtaccaaatagtagactcctctatgttcaggcttttagtattcaacttagcgcggccccggaaaacatcggtcctagtatgccgcgcgctatcatctgtgtggcatctgcaagaccagacgctaggacgaacgcgaggacaaagaaacgagacgcagcgtagttgtgtctgcttggacacgagcaggctgtgcgtcgtttcaaacattccgagcgagtctcgtgagcagtcaactaaaatgggaaacgaagcattaaatttatcaaacatacacgataccagcttcatggtgacagttctgatgctagggctgtgttctagagtagcgagtggctagcggaagacactaccagccacgctagcagtccagccctgaagtgtttgtcaatgcaccactggtagtgcctatgagacgtgccgttgttcagaaggtctgtggggcattttgtctcgaaacgacctgcagtcttacacctgaccacgcatattaggttcctgtaatgttggaatgtctcaactggagcccgtgtgcgtgggctcgcgtgacacatcttgacgtgagtcgaaatcttcgtctggaaacggtgttgtcggttcccgaatagggaggtttgtcgtctgtaggcagttgaaactgcctgtgatcttgtttgtcgcaaga

SEQ ID NO: 2095 - DNA, 1648 bp, Toxoplasma gondii
  source 1..1648: mol_type = genomic DNA
tacagacacccggaaggctcgttccgacaccgacttctccaatcttgcgagacgctgacgcgtcagaatatcgcgtggaaaaagtcaatcccccttgcccactcccggcgcagactgggcgcgctgcctctgcgtcgctgcctacatcttcgccgcgacatccgatagaatcagggagaaagctcccaaagacgacctcccgcgaacgctctggtccgagcacagtttgtttgaacagcatcgcaaagcgcatgtaacggagaaagcgagtgggacagtgttgaatggcaacgccagccgacttgcagcctcggaggcacgtactcaggatgagctgtaacgcagggaagagagtagcatgaagaggaaacgaggccagataatcgtgcaaggaacaaaggagacgggaaagcacagaaaatctcgcaccttcttcaaggagaggcggtgacgacggagagaaaatctaatcggcagctggagaacagcgagacccatgatctccgttgttttcccatcgtttttacagcaggttgaacagcaagaaaaacccagatttctgcgacggaaacccggggggagaaaagacacgacccacgtccgtagtcatggtgcttcgctgttgttcaatgaagcaacggaatagacgagggcagggatgattggcggtgtttgaagagaagggccctacgtctttttgatttgaagccgcttgcagagccgagccaacacgtttttggcagttctgagctgagtctacgcgattctacagcgggaaagcgtacgacgggtatgacaccagagtgtcgatcgattccttacgttgcgaaaggggcatgaaggcacaattccctcttaccggcagcctcaaaaagcggtttccaagcacgacgccggaatttggagtggagaaaggaaagagagctgcaagaaaacgagagcttcatttgctgttttatgccggatgcggtcgcccccgctgagtaaatcgacggctcccatcgccggtcgcggtttttgacattgtgtgcacgaatcccggcggcactcaccactgtcctgaatgcagaaggccgttgaacgagcgaaaaaaaagattactctgcaattgagtcacgatgtggaacaccgtggcaccgaagaagagcatcgacgctgccgcttggaaatctgttcacagctgcatgaaatggctactcgcatgcaaggaaacatttctcgcagtcaccacatctgatgaactgaacagaagacaatgagacggcagctgtcgactgaagaaaccggaccacggaacttctggacccacgagggatccaacccgggcggttcccagaattgctgtgcttcagagtggctgccgattcccagaaaaaacgaccgacgggttctgtggcgggcgtacagacaccagatccatcctgcctcgcattcatgcggcgacttttcgttgagttagcggttgggagtgcaggtcttccaggcactgcttcgtgtcattccggtggtaaattattgaatttcttggaagacacttctttggagtagttctcttttctttatccttcgttcttctgcgtccacccacacgttttttccaaatgggaaggaagaggaggggcttgccaaccgggtccgacttgcatca

SEQ ID NO: 2096 - DNA, 2481 bp, Toxoplasma gondii
  source 1..2481: mol_type = genomic DNA
gaagagtgatctatctctcgttgtttcacaagaggaacaacgctcttctcacgagatgaacagcccttaccgggacactctcgaggtctcttttgaaggcgttgctgagatccttcatgcgtcgacctcgttcgatgttgctttcctcgccgagctgtctctgtagcttcacttcttcttcgtagttgacgagcgcgccttctgcagactcgaggccgccctcggacatggtggaaatgactctcgttcggagtccaccctgcttgtttgttgccccgcctcgacgcatgctgtttgtctggaactcgagagtttctcccatcatgcctgggtgtccagacatcgtcatggtcatgtcttcctcgccgccctcggtggtgtcggcgccaggggctcccggctctggccggtcgaagtcgtctgtcacgtaggacgccattttcgtgttttttgtcgagcaaaaagccacaggaaatgcccgtcgagcgaggcgagggaggggccagggtttcgagaagggtacgcccgaaagcgaggagacgcgcggcgtggtcgacgagcaattcaggactgtacgcaggagggagactcggcgtcggcaagcgtgcacacttttcagtcgggggttcaagaaatagcgcgagtgacgggaaacgcatacatttcggcgggagaagctggaacgcaaacgggcggaatcctgcagagtttcgccgcaaatttcggtactcaggttcgggggtgagaagacttgcacactcactgggcagcgcggcgcgactagttgataccggcaagttgagcaactgtggcttccgccaaggaggcgaacctggagtctaaggtggagaagaaagaatttcaatgtttcaaagacaatggagtcgagtaccgaaacacgggaacgccggcggacaagcagggaagacaccgaagacacggggtcgggaaagggtgcgtccgcccaacgattttgtggcgcgaaaataacggacggatatgtggaaacggcaggtcaacccgcgtttttatgcttccgcagaaaacgttctgaatcggagagataggaatttcgcttggagtccccggcgggactggcagaactgccccgccgctacagcgaccaggaacacacacggggaagcagagggcccctggaagtcttggccgcaagagcagttgggaaaagcgagtctctgcaacagacttgctgagcgtgaaggaaacggaaaggttctagatattgactcagtcggacggtcacggatcgaagaagaatcggtgaacctccagggcttttcccccgatcgacttgcgaatgcggagggggggctacaggggggtggtggttggcaaaagtacgctttttgcggacccgccaactgggggaaagcgccgttggagggtcactcaacggatgtctgaccggaaaagtcccaactgaaagcgatttctgtccagtttctcgggtgtacaaacaccgggaagtgagctagagactgagtgcaaatcggcgcagtgtttcgcgtcagcgtggcgttcacacgcgcagttcgcaagtgtcgatttccgtaagtcagtttcccagtgtattgcctcccaccctcatctgcgtgcatgtggtggcagtcaagtgatcggtgcacactcaagtcggcaaacaaaagcggcggaactgcggcggtttgtcaatcggcggtagcagccgcgtaaactggctgctctctgctcccagttccgctgaatggaagagcgctcttgaggatggaagtcagcttcaggtatcctacccgatatgtaccggaacgacacaactcgcgtcaggccctgacgattcttctatgctacaccgcgaaccctggaaccccttccggtttttgcttcgcctacagcgcagcttctgcatcactcatctggctgttaaatctcaaagtacggatcggtcaaagattaactgccatcaaccctaagtctcgactcgaaaaagtttccacgagggagttaagcgaggaagtaacaccgccaccgggatgcgacacggacgtcgacggcatcgagcgtctcccgccaacaaacaatccgggaaaaggcgggcagcgacggtgactgcattcctcattactaaacctctcagcactccacaggaggcactgtaggtgcagaaataactgggaagagaagggtttacagtagcattcagggtcacaagcaatgtgagcattttattgcacgagcatgcgcgttatgtgagcacgtagacagcgtcagtcagagacgcgagatggagatcccggagtagcacatatgctggcggttcttttcttcggtggttgtttcatagttacgaattgacgttatctccccgggcaagtgtctgtcctttatcttcttgaggggctggtttctttcggtcgctgcctctgttgtggtgcctctgatccagctgcagtgtgacggacattttcttcagtttttcgacta

SEQ ID NO: 2097 - DNA, 3534 bp, Toxoplasma gondii
  source 1..3534: mol_type = genomic DNA
agcctctgtcgccttctatttcactctgcggatgttcaaggcaggccaactcgcaggggagatgctgctcagccaaacctgcacagctggacacaagtgagtcttctacagagagagcgtggaagcttcggcacctcgaacgcaggcgcgcgattcgtgtgaggtcctcggcgaactgtgtcgtgtcaggtatcctcgtgttgacagagaggttgagtgtgggctaacgacgcgtgggctcctcgagtctgctctcctttgacggacagaaagagagcgagagcagagccacaaggctggccgcgcggagctgtgcgggtctgctggggagctggagagacgcgcctgctacagaatctaaacgaagctgccgtgtttgcaccggacacgaacggacaggctcgccagccacggtgaccggaagtattcgcaaagtgagcactcaaggtcggagacggccgcgacagagaaaactccggtgtgggctggcgatgcacttgcgcgtggaggacggcgggccggcgtggaacagggccagcggtgcccgggacggagtgtacgtatattcacccaacttgaagagagtttgacagtgaatcgatcgaatcgcgacacggcgaatgtttttatgttccacttctgacggcagccgccgtgaatatcgtcagtgaggaggcctccgccagaagggtggacggattcctgacaccaagacaagcgaacaaattggcacggaataattcgagcagaagggtcggcactgcatgcaccggcgatggacgccgtgcgtggattcacaaagaacgcgacagaaagacttgttgaaagcggacacacactctgaataggtagcggtgttttcgtacacgagacaaccagcggatggaaaagatactctccagagaaaccggaaagcacgcaccacaacagacatccggtttgtagccagcagaaacgcgaaacgcggttccgccacctcctctcgacagagacacgcaaatctaagagacgattctgctgcaccaggcaggtggctgtcgcagtggggcctctctggatctgtttcgtcttctattgcttgaaggtcgggcagcagaatccagccatatcggtctcaggccgcgcagccggggaagggtctacgaatggccgaaagccttggctgggagtaactaggggacagtgcgtttcacgttcacatgaggcaaagtgcgggtacaattagacgtcacgtgccatgttcgagcgcaggcaagtgtcttcacggaaacgcgttagaagacggaatggggaaacggacataggaaaacggaaattggagacattgaagaaggacaagaggacaaattggttaggcgcattgactgagacgactgcagtggacgaggaaagcaaccggaagggtggagaccacgaaacggaggcgggaggcgagtgcgaggggagacacagccacctatgaaggacgccaagtgcgaaaaaaaggttttttctgaggtcgaatttttgccgcgacgggctgctgacaaacaacgtcgctctggggagaacgggttcactccgcagtgcggctggtgggcaaacccagtaaactgttcgggaaggcgcacaagcacgcattcctcactgagttggaactgggtagggccacaggcgttaacgaatactttgcaggcgcttgtctcggactacagagagctaccacacaaaaacacgatgaagcttcgggtcaccgacaccccctccgtggcgggtgagtcaaaaacaagggaaactaagcgtgaggggaattgcacgtgacggaaggtgggtactccacgagagagacgagtgggcacggaagagccacgaactcacaagccaacgaactggaggtaagagcactcccggacgaagaagtctagtttggacgcgcgttggagctggtgggcagtccgttcacttccgtcgctcgctaggatagccgtaaagagacatgagggaacagacagcacgattcgcgttgcaacgggaggaagaaagagttctggacagctaagactgccgaccaaaagaaacgccttccccaacaacacccggtaaggagacggcaacgtggggatgtgcactttatcgtcggcctgtttgacttgcggcactggcaagaacatcacacaccaagtaaagaacaacagtaggatctggcgcactgcagcggctcctcagtccggtctgggcaacagctctggtgcgcagggcagagacactagaagaagtatgcacttgtcgggcgtccttgcttgttccaccactgacaacttcccattagcatcatctatctccttcactctccgggggaaatatccaaaaggaaaaccaccaccctccactacctgttccccacgccggcgattaaacacgcgacaacctgtcgctcagcgtcgactgaactgcggccgccagatgacgctgacctcctgtagcaagcgcaaactctgctctgcaacttttcgttcaagggttgctcgtgctctgctgttaagtgaccacggcaccctatgcacacgctcggccgaacacacccgccaaaaacggacaccgttcacaaacgattggatcacaaaagtgtacttaggtgcgagtggctcttttagtgacgcttccttccgtttgtgtcttggcttttgcaacaacaacaggaactccggtcccacacgctgagctgagcaagcaatggcaattgtggctggcatgcagtgatccaaagtggtacgccagcgaccccccaaaacctggtctttttggctacaggagagcgaaatagacacgacaaagaactcgtctgtttgatcttcgaagcaaatttctctctcacttctccagagattgcaagggccttttgggcactcaagccgctggctgctctgtgcgctggttcctgtgagcgcaagcgcacggcatagccacgcgttctcgttgatatctccgtgacgtagagaaattttactggggtgctgacaactgttccgctgtgacgcaaatctgtccacgttgtccgccgctccgaatgagtggaatcaactgaagggtgagcaggatgggcttcattagtacacacaactctgcagtttacgagatcaaacgatgtctgcgcgtttcactggtcgatgcacaacccgagacaagaacactaccggaaggctctaggaacacagaaacatagcaaatggagtgcagcatcagctgtacatacagtggggtgtttcacgcttggatgcctacactttgccatcagtgcgatgcagtcgcggcgttcacatccagttgtcatccgtgaatcctggtcattaaagaatccgaatctttgaaactgacagaaccactcctcttacttacaacatcagctttgtgtctgcaaggtgccgccgacttcccagagaaaattcgaaaacgttgggagggtccatcttgtttctcgcctgttgcggaacgcacctgccagtctacggaaaaaagagacatacgagtactttgttcaacgcaagtcacttctaa

SEQ ID NO: 2098 - DNA, 1759 bp, Toxoplasma gondii
  source 1..1759: mol_type = genomic DNA
ttaacgatgtaataaaacgatataacgctcaagatgcgtttccaacgcatccaacggagccacgtttagtcctcagtctccatcttgaatcggatagcttgccagcatcggatttctcccataccgtatttggtacctcggctatttggaggacactgtcgacggggcattgaacagaagaccaacttctccacctggaggtctgttacgtttcgcttaacgggaaagatatgccggagagttagacgagcgttggacgagatcgtttcgttgtacagagtcttctcgtaatggccgttagtggctttttctttcttcctgcgactctgccgactccatcgtactatttactttcagttgcacagaatggaacgagtatccaggcaaagaacttggccttctacttttttgcgtgggcagctacctgcctcaagccggaacgtctctttgtttcccatttttcctttctgtgtcggcgagcaagagtgactgctttgtacctcgatttgtcgtcccccccttaaacgctttgtgtaattgtgtatatatgctaacattaagctaagtaccctatattattcaagcgtaggtagcttgttttttacactgcgaagtaatccacggtctactagccagtcacgtcgcaacggacagttcagacaattgtttgcgagtgactcttgagttgtatcttcgcccttttaaccactgaaaagagaagatgtgcagaggaaaccatcagcatgatggcgtagcgtctacaacattgatatatcacagccttttagcactttcccccagtgcttcttccgtgagtcgtgacctctattctgaccacctcacgtgctcatcgaatctccggtggctcttgctccagcaaaacccgttcggtgatgtcaagcaagctcttgcgattcaacgaaggagcagaagtatgcagtatggtgtgtcaactttctccgacagcattttgtactcaaaaagtcatgatggtgatgggagtctcgcacgtccggctcgagaagaccctattcgcgacgacgaagtggaataattctctgtgcgcccgagcaagctcgaacacgcttactgcaagttaatgtggagaaggagaatgaacaaatctctcaaagtggaaaatgtgtctgcatctcgggagaaaggtctgcttctgtatgagatccaaggtcaactctgcatgcacgcagcttgcctctgattgccggaagaacgaccaccgtcaacatttttcacagaacgactttttaaaaaacgaaaaaacacttttgttcgtcgcaattcttaaccgaggcgacaacgtaaatgaacgtgggagaacagatttttcttccgcagcagttcgtctgcactttcctctgtggcccggccgctagcgtggcttggtcaactgtgcaaggaacgtgcgaattctcagcggcatttttgcttgattatttaccgcccggcttgttgctgtacttgactcggtagcttttccaggttgcggggcttagtccactgcatacggaaggcggagagcttcgttgctctcctcgagaattgtggtcgtttgtcgcctcgtctgccgccggcttcgattctccgttcctcaagtttgcgcaggcgcttcgttagttcagatctgaaagcctcacgtaactttcgacgggcgcacacgttttcttctgcggagttcgccgggtcaacaaaggccggtactgccactttttctaggtgtgaagtcaggctgtggctgcga

SEQ ID NO: 2099 - DNA, 4344 bp, Toxoplasma gondii
  source 1..4344: mol_type = genomic DNA
ggcttttgcgtgtcggcgaaagcggcccttttccattactggtggcggggaaagtccatttagtgcggaactcgaaagtgtctcggctgcgtggggtgtggacgcgacgcagctctttttcccgcatcttccatcccacatgcacttgtggccgccagcagagaaaattgaagcgtggaggcgccgggacgaagaggctcggactgagaatcgcagctttctccagtgcaaattcgtcattggggtacgccacgtgatcgcgcacggcttgaaaagccagcaagagctgcatgcagcgatgacagagttttggccgattctccggttcttcacggcgccttcacattgccggttccggagtgttggtccgtcgagagcgtcagaagtggatggcgctgacccgaagaaggcgcaaataccccgcgcgtttcgacctctcggggaggaagaggcctggccgagactggaagaagacctttcgacagtcggtgagtctttactgaaaaacgacctgctcggggaaccgcgaaaacgccgaggtggaccgacgctcaaacctccggcgaccccgccttcccagcctgctgtttcgctgcttccgcccggactttcggccgggcgaaacgagctggggaagactcgggcggaacctgtctctggaaattcacctggtgctcaaaacggcgcgcgaaaacggactgatatgttcaggccgactgccgcgggcctgagcgacgattctgcgagtctgcagccgcgtgtgagagttgagagcaaggcggagaacgtggactggaactccgttcacttgggtgagcagacgagcttgtagaaaagggaggagaacgggttatgggggggagaagggctttcatagcgtgtgacaggggacggaaagggagctccatgggagaatgtagcggacgtgaagcgcacaggttgggtctgctggccatcacgccggagactccacgagcgtctgctcgagttgcgcggatggaagaaatggtggcagcagcttttttctttggaatgaaatcagatgggaaacagaaaattgtcgcagataaggctgaggaaagaagggcggcgtgactgatgaacggttcagttctctactgtggacgtggacaggagctgcagagccgttagaaaagaagtgcagtgtcagtgcctccatcgtttgcgaaaaaaacgaaacgttccccacacagctgcgacggagtgtgttgtgcaaaaccgaatgcgaaccatgtttctaatagacatgtttgtacggggttctaggtccccggtgaatacagatcgttctttccaaaccgaccttcggccgtttggacttttttaaacgagcaaacaggcatcaaacagatgtccgcggagtttttcatgcagctagaccacaaaacacaccaactggttacttctggctagggggtatgaatccgtcacggacgcacgaccgggagtacaactagatatccataacaaccgaagcatacgatgagtttagtaggaaacttcggtgcaggaattgaacagataacttacgaatctctggatacgcgtgatatcgcgttttaattttgcccctgctcgcattgtcttccatttgtcgcctactgaaagagattggtagtgaaccttcagtgatgcaaacactggggggttcacagtccctcaacaaaacgcgacggagaaaaattacaagaaccggtgctgattctctaggagacgttttccttatttctgtcctgcatctaacactgaaagaacgtggttatgtggagtccacactggggacatgcgttacggtcacaatgaactatgtttcttggaatgatgtaatgcttgcatgctcgtggtcactggcacctctttccgtcgtgcgcatcaaacgagtttgcgctttgagaactctccaactcctgcagctcaagcgactacaaatctttattccaggggtttggatttctgaataatagaacacgcttcctcaaagagcgaatgacatcatgctcgagtgtgtccttgcttgtgtgtcttctcatctgccacgatacatctagcgactcttcctttaccaaaagaagcaagtgagatccgacaaggactgccggggtgcatgtctcgttctcgattcagcgaccaatacccctgcactagtctcgttaaatatatacgaaaaaggtttagttgcactcgacaacttaggcgtgtgattctcgctccccgtctctgctggtcctcaactcgacaccgtgcttccgtgtatgtggaaaactacagagactgtcgctcctgagaaacatcgtcctgcgtcgagtcttcgagaaagaaacctgtgtttgaccgtaccctcgaattagcaaccgcggacaaggtgacaaagatcatagctaaacgatggtaattttcgcattgaaagtatattgcctcgctgcattgaggccacgagacgctgaaggcatgcgagctgtgaactgcaagtatatgatcacatgcctctgccgtctagtatcggatgctagtgaggtcagcataccatcgtactgggatgccagttctccacaaatggaattctacatattgattcatttacataaacgtgtatttacaaaacaaatggtactcagatgctagtatggtccgcgccatcgtaccgagagtcatgatctatgcggactatttataagcttttcaggggagcatgaactacgagttggactacgggttgacagctcaggcttttccgtgaaccagaaatcgcaccttcacgtcgttttcctctcatagggacttcggaccgtcctaccttatcgacaggttgtttctgtttccgttagagaggcttttcccatgcactttccgtgcgttgaaagcacgcgtccagtctcggcttccggacggcatgcagttttgactggcgttgtttgagtccactatctgtggggcatcttccctgcccgttgccggtgaggactgaaattcgtaagtggtccctggttcctcaagtaagatcgtgtcgtttttatcttcaaatgcattcaacacccaacaatccgcttcagtccttttcgcggaaggtttttccgggccaagtgtggtcatcaattttgtcggattctgcgaagacccgcctcgcggcggttcgcgtccggttgcgggactggtgtcaattctcgacggcgaaaaagcctttccttgtcgaaattcgcgcgcaaattgagtctttgagtcgccgagggccgagggaaaagagtaagcattggaacattcccggtcacctaccctaaatcaggctagagcctcgcggtccgtttgagcctagcatcgctcgcgagttctgcacggactctcgggaggccggcctaggtagagtgcgaggggaagagtcgtctcgatgcttcggaactttgttttgagcaatcgagctcgaagaggaagtgaacagctcattcgcaaacaacagaagttttttcgtgcaagtgcgcactttctgggatcattgatcgatacggcatcacttccgtccgcaagagtaacgcgtgcttcccggttctcgccgcgcgtgtctgaaattgcagggcgcggctactcacgagctactcacaacacgcgagaagaaagttctcccggtggtcactttacgttttccaaggtatttccacgtccgccaaccggacgtttttctcaccgggtgcagcaggtatttcttggggacaagccacagtcacccgagtctcttccccggaacttcagtcgagtctgaccggagttccctttgtacgtgtgcccgcggaggctgtgagcgggtgacgccatgctttatgacgaagtagaaatacctcgacacgcgaaaacagacaggcgaaaaaatacttcgctcggagcgacagaagaggctgttcattctggtgtcctagtttcgctggcttcgtgcgcatgagcttcttccggagtgcctcgccagctaacgtttttcgcgtttcgagcggaccagctgcgaattcgtgttacctttgagcatttcatttcaagaaggtgatcatttcctcgtagatatccctttgtgcccgtctacgtggcttgtctcaacgccgaaagcgttttctgtgttcacccgcggcggcgttgtgcctcgtggcttctcgagctgcccttcagtctccggcgtttgtacacgcgcctgcgccaaagggttattcttgattccctgtcctttcttagtgcaaaggacatggaggcgactcttaagctccctcccgagtgtaggaagcgtgagttcggtgaatgtgcagaagcggcagttcccacttgacttgggtttcgagtagagaataa

SEQ ID NO: 2100 - DNA, 1638 bp, Toxoplasma gondii
  source 1..1638: mol_type = genomic DNA
ctccgtcgtttgcttatgctcctcggctgccctctgtcgtatctcttccagaacgggcacgcggatggatccgaagaggtgggcatgcagctcgatcttaggaagagaagcaatttcctcaaacgacggtagagtggcggatggagacatagtggacgcctcgggtatatgaacagtgaagaatgaattcctggaatccgctgtggcacatcaagcgcagtcgacgaccttgagggactccccggcctcctgcagatgtttgctcgcttttccgtcctgtaggtgacactacgcgaagaacccgacttgaaagggaaaaagacttttcgcgtagactaccgtcgatattcgtcgtttacttccagtctacctcctcgggaaaagctgttcatgtctgcttctcaattaaatttccacgcgataaaaacccttcgcctgacgagatgaatgattgctagatgaggcgcgtgttacatgcgcacagagtacgaacgcggttcttttctagagtcgcggaggacgactgtgcgtgcggaagaggaatttctagatgaagtagctgtagaaaacttcaaagacagcgaacacatgttctgcttctgctgtgtttgaccttgtttgcacggtagaagaggctcagtgtgtcagcggttgacggggctcaacagggccgttagtgatcaatgtagggaagcgagccctcatacaaactcgggtataaggaaagggaaggcagcgcctggcgcagagggaaaatatccctttggctcagcctcgcaatggaagacaaacggaccagcgcatgtgaaaaccgccacgttcttaatggaagggtggactagtctccaaatttgaagcgagcaatatcgataaaccgtaactatgaactggtcaacagtagtttaccgctggtcgcattcttgctatcagcaaactgggccgacatttggtcggcgactgcgaaggccacgtattgacatacacagactctgtatccacaagcacacatacaaaaagacgagcactaccggtataatcggtatggatatgaatgtagtaaggtccttctaaagcgtatgttgctatgcatatctgggtattttaggtatggtactcagccttgaagatgttctgcgcaggcgggacgtggtgtcgcgattgcctagggaaaaaatacctgtttccgttacggtgtctttcgctggatgcatgcgcaccgtttggcgtgcggagacagtgacccgcctctgtgccgtcccgcgaaaggttgtccatggggccgttgcttcggattgtggtgaattacagaataaaattgtcacttccgcaaactccctctggtatttgttcctaaaccccagcaccgtttgagggcaacttgcactcgtagctcaaagcaaagcagacacgttgcgtttcgttcgcctcgctgttgaacgcgttgcgtttcgttccccccaccattcgccagagtactcgcttcttgtgtccttggaggggcgtttgtctctttcaattctctctgaaggaattagtgtctcactgaggagacccccgggtccactatatcgtctggctgtgctccgcagaaagaggcggactgagaaatctttgcggcgactgtcgacatcactggca

SEQ ID NO: 2101 - DNA, 2396 bp, Toxoplasma gondii
  source 1..2396: mol_type = genomic DNA
tctccttatctgtctgtacacctcacgagactgttgctcgtgctttccccaggcctccgacgctgattggtccagcgtactgcctctgcagtcgtcgtggcaggaaggagaagacgaagtctctgcatccatcgctccttctccgcatttccgatcgacgtctcgtttttcagcttccaaagcatctaaacaacgaagatggcgtccgtctccgagtgtactgcgagtcccgcgatatacacccggagtcgcctccgagggcggcaggtgtgttgggttgttctttggagatctcaagagtcgaatcggagagcaaaactcagacgagggaggcgctccagactgcttcggtgtcttcaactgcgactcgttggtttactcgcgagacagccggtcgcgacgccgagttcctgttgaggctcccgtcggcgagcgcgacaggtggtgaagaatgagcggagggaaggcggaagaagcagatggtcgaccggaaggagcaagaacaacgtcactgatgagcgcggttgaagcgtacttgtgcagagcagagcgcgtgcccgcagtgtgaggagtcgggagcggtaaagagatggaaatgcggagggaaaaggaagcagagaaaagtctggagaagagccgcaagtcttcgacaagaaagggaaggcgaagcaactccgcggaagaagtcgccagcgggatatgggcaagaccgacaacgtcggagaatcccgaaggccgagtgtgcggtctcagcagatccacgagaagagcgagagcggcggaagacacagatggggcagagagagacgcgaaccactgttcctttaaaagcttttcatcgagggaaggaaatcggtggaaactggacaaaagcttccaagagagtcttcagaaagcagtgtgcacagttacgactcggagcgcgccggcaggtgggcgcactcatccctgttcgccgggaaaaaaagagagaaaggcatgcgtttaacacaagaaaggcagatcttttttgcgggtcttctttccttctttcactctggaaacgtcgcgagcgacgtcggctaccaccggtgctcaagacacgcggtcaagtgtgtgcatgcatcaccttttctcaagttcgagagaatctcggcaaaccctataaaacctcgaccggcgccaggaagaccctctcgctcgccttcgaaaggtgaaaacagcgcagcggaaactcttctcaaggtggaccgcgctcttccacgccgggagcgagtagagtgagtgaagtgagtggagtgagtggagagagagtggagagagagtgtagagagagtggagaaaaacaatcgcattctgagaaaggagaaagtttcgtcttcttggcgaccagcagagttggtgtagtggtcatcacgtctgccttacacgcagaaggtcgcgggttcgatccccgcactctgtacttgcgcgctcaactctttcatcgaaggaactggatccttcaggttcttccggttgagtgtcgttgcttttttgtcggctgtcttgtcttggtagtcagacccgttgcaggagtcttttattaggcggttttcgcagttttctcacttttcttctgctgtcttctgctggaccttgttgccccgggatggatcggcggctccgcatgcacccttgttatacagccgcagtgagagtggaaacatgccagtcgcgcagacaagactcacgagagaacctgtgaagcattgctcagtgtctccctccagatttgaatcgcattcactaccttgtttttcgctcgctgtgaacactttagacaggaagaaagatgctgccattcgtataggcaactagggtgcgtcccgagttctccggtcacgaaggaatcgttgcatgcgtagatgcagtcttgcggaactcgagcaaggcgcgtcagcgcttcgttgtctcctctcagtgtcgcagctttcgtccaaggagcttgtcacgactcctgcgctccagatgcacttggtaaaaacgaagaagagagatatgaatgtgacttttcgtgctattgtggtccctgggtgacggcggggggtcgtcgaagtcgtctctctcgtctccgcgttctgacgaagtggagacacggcaaactcgggaacagaatcatgtctcctctctgtattatattggatgtgtttcccgtcaggtctctgcattctgcagccgtggttctggggtgctctgtatcgtttgtgcctccatctgtgcgtcgaagacgacgctcgctcacctgtgtttgacgctgaagaatgccggatgagtccagcgaaacgtgcctgctttatcggccggcgcctctgcatttcacggcagaccatgctggggccatccagagttctctagcatccagcctgggcatcgaa

SEQ ID NO: 2102 - DNA, 2917 bp, Toxoplasma gondii
  source 1..2917: mol_type = genomic DNA
cgaaggaagagcgaaacgaagaacttcaagaggcaactcaacaacgcaaaccctctgaaggggagagagatccgacgctcagctgggacgagtcaggcgactcgacggagacaacggaaaaagcgaaggcagtcgcggcggaagaaggcgaaggctcagaggaaaacggagacagaagccgcagcacacatccaacagcagcagagggaatgcaggagggtggagaacggctagaaagcatgaaaagaatgaagacacacagttggggagagcaagaggaagatcgggaggacctggaggacatcctcgcagctctctaaggggttctagagggtgtaaactcttgcactcttttgccagttgtctttctctcatgtcgtctgtagaggatgcgcttggaaaggccgccttgctgattcgtcgtcagccacagaccgcgttttctccagactcgtttctgatctgcaggtagagtctgccggggattgctcggactgaggcggcgcctgcgttcgatagaaagcgggctgcgagcttcaaattcttgtcaattcagtgttttctctggagagaaaggaacgattcgaacatgcttcacgcaaaaaaaaaaacgcttcgcgaggaggtgatttgtttttcaggtgtctacgcgttccatcttggtgtccttactctttctgtcgttgaatgcttccccatctttctctcttcctcattccctcttagatcgcccccttttttcgcagtccctgtatctcctcctctcccctcttcctgccaatctctgtctctctttccatctccttctctcacttgctgtctcttttctttatctctccttctggttatgcgtctctggttcctcccgccttctctatcgctttgccgctgtttcgagcgctgcgggaacttcccctttcgctctttgtgggcttcctgtctggccaaacaaagtatgccgcgaaaactggcgttcctcattccctggcgagccgcagaggccctctctccacttgctgcgaactaaaccaagtagaacgtacagatgcacctcagactcacatcagagatcttgtagagaagagaaaaggcactcagcgtgctgtcgcacctctgcattggggttcggaaggtgctttcaaggacggacgcgctctcctctttcccaggacctcctctgggttctgtgtttggagctgaaagtctctgttcggaattcggtaatgctctcgctcattagtcatacgccatgggcgcatttcagatgccagatcgtccaccggcgaggttcctgttgagacactctagggggtttcttatttttcttccttccttactcaagacatgcaacacgattcagggtatttcccggcgctagctgccaacagccttctttcgtttcgctgcgtatcacactgtgcgtgcctgtgtcgtcgtaaaacgcgattccggttgtttcacacacgaaaagactccacgagtttcactcagaagaattcaggtgccggccacacgtccgattcgcagtcacgtgcatgttttcggggtcacctgcgaagcggcagcccggtcaccccccataccagtttttgctgactgaggaggaaagcgcgacttttcttggagtctcggagtcacttccacactgttcgtctgcgcctttgagagacggagtgtgccggatcccgcttcctcgtgctggacgggtgcttcacgcctagagtttcacctaacagaggcgcgaaagacgcgaatcgtccgcttctcgctttttcggggagagctggtcacgtttgactccacgctggtgtgtcctgaggggaattttcaacttttcccggaaccgtccgccatccttgtgtcgagcgagtgcgtccgtgctctgcagcagtgcggcgtgcacagccgattctcagcgagaaactgtgaaaaagtcaaggttccgatcgatttcttcaacggcctttccgctcgttcatccctcaaggtgagaagagcttttgttgggtgcaaagcctctcgaacactcagtgtcttctcgctggaatcgcgtctcaagcacccccccccggtctccccgtctccggccgcgctgcttccactctctcgcggtatgcgcgttccagcttaactggcgaactgcgtcgagactcgtgtcgcggctctcctactctggcttcgccttttaacgcaaaacttccgaagctgacccctcgcatccagcgcagccttgcttgtctccgtgcctgtggctgttcccagtttcctgtttctttcgggtggatgtacacctgaaaagccgccgcgatccgagcctttcgactcagctgcgcgagacacaccgcagtgtgacgtctcctggtcgctgatttggccaagtttcccctcttttttcttttcgtaactgtccggtttgcctttcgagtgccttttcaattatgtcggaccgttcgtgccttctttcgcgtcatcgttcgcctgttcgatgcgcctccggactgtctgccacgcgggtctttgccccttgtcttcatcgcagcgtctcctttgcgacttgtgcgtctttgctgcagccagccgaccgaagctggagtcacctcgctgttcccttctcttttcaacgccgctttttccgtttctgaggaaaacagctgtcggcaggtcgacggagagcgacttccctatttctgccttgccggtcgctccacctggttcctcccgcggcaaccttcgtccccgctgccgcgtcccgctgtcttccctttcctgttcggttaccccccctctttgttctttttctttcttcgttcctttccagtctctctctcctccccctcctctcctgcgactcgttgacgatgccctgtggaccttcccgaggcggtttgtgaggcgtgtcggacgcgtggagccgcga

SEQ ID NO: 2103 - DNA, 4904 bp, Toxoplasma gondii
  source 1..4904: mol_type = genomic DNA
tttacaatgaatgcgctcacgtacgtttgctaccacgcaccttacagattgacatgcatcggaggaacagcaaacgagtgttgttcgcggatatcaagtaatgtttcaaaagctgttgagtgcgcgtatcttcaaaggtttttgctttggaacttccggaacaaaacctgtccgtggagtgtacgttgtgtacgctcattcaccgctctgaagagttttgagttttcgagtctgtccgtttgttggtccaagcggatgaaaaaacgaggctgagcattctgacgagtacacaggcacttcccgttcgacgaggtagcaagttcgtaaaattggcattctaatcgtgtaacatgtgtgagcactattcgctccttgacctccaaacgttatagcgtttttgcttgttatcgtgtgcgattagaacggcagacgaaattactcttcattgaagtgaatcagcagtcccccatgtaaggttcaaggtacaccgcaaagaaaagatccatgatccgttagatggaggcgggtgaaaaactgttctgctggatcgttcgtcagtgctactggtgaggagaatcgaacagcagcttgcagaaagaacaaaggacactgtttcctcctgtgtcctgtactaggctgcttgatcacccaaaaaactctggtcacccacaggacaacggctagcgggcaaaatctcaatacactgtagaccaaagagcaccgagttttgcgagctcgcttggtttcaagaattctcacgtgcagacaatacaaagcagagcactctcattgcagatgctaaccttgagcacaaagggcaaacgaacggtccagactgatgttggagtgatcgctcgaatgaggcttcaggcattttgacatttctggctagcatcgtctgcagcctatcacagaataacggtgaagaattagacgagccttgggagtgggtgccttctcgagaaacacaaccattctttctctagcgcggttggttagttgctgctaaaaccgatattgccaaatcatgctcagacatagccacagccagctcctcgcgggcacggccggctggacgttctgtgacttccggagtacgttttctttttttgtgaggtgtcagttgctctaatgcaccgattgacgaagccgcgtggaggagcaagtccttcctccgtttcgtcgtaacatttataggacaaatgtagcgcttctgcgacggagcagacctcttgcgttgtttgtcgtcggtgactgtctggctggcgcatagtttcaagatgagcagggtaagtcagcaattcagccacaagggaaaaggaaatctccgcgcaccgggaggtcgcacaggtcgtggcactgctgccgaaaacgaggaaaaggtaagagctgggacaaatcctccgctgaactggcgtattagcgatcgctgcatagtcagtatagcgtggcatccgcctgagaatggatacagatatcgcgtgtcttgcacattctcggatgtgggcccgcaaatgacatagatgttgagaggcgtcaggtacggccacacaagcatccgtttagcggcttctacgaagcggtaacccagcacattgactagctcactataataagaccggtatttacagacggggcgttctgtgccgcatgccttgcatgtaaagtgtgctttgtatggttgtttttgtatgcacggtatctgagtgcctcatttacttgggtagggatgattgttctattgcccatacgcatttgctctatgcacaactactgtttcgcatatggaaggctgtgagtctgtgttgtgctgtctgcctctagcaacaacacccgcggtctgcgaaaacagaggggagatctagaaggactcctgaagaatgcaaagcattttcgaagtggtatgaaactaccgacacctcggaaggagcggccaacagggggagcatgccaggcgacgaaggtgcggccacgtcttctgacctgaaggttgttattgattcctcgcatgctcgccctcgccgagccgttccaaatcagcacaggccgcctccagcaaataccgaaagaaagtcatggagagatcgtacaccgtccagaggggtctcgaggaaaccacagcagctcgcttccctaccaaaggcaggcgactctaaaagatggattcccccgattcgacgcaggaagaacggtgagatgctgccatcttaccagttcatgtcccaagcagacgctgccttagaaaaagcggcaaggattatgattgcgaaagtccaagcaagtccggcagcggctttgggaaggggcagaactcctcaggatcccctctcaggcaatgcatccgttagatcgagcgactcagagtcaccgaggaaaaacaaggctctgacaacacgtaccactacgcataccatcgaagcagaaaccgaacatgcacccgtgcaatatgttcctgaatcaacattcgatggttggaagtatgcggagtggaagggggagaaggaaacggatgacataaagtgtgaccccgaggccgcaccgcagaaatacgtcaatagacgtgctagagcataagaatgaaagttggattcacaaattccgtaggatgaaccatgcgtcaaggaccgaaccaacagtgcatgtaccggcactgccgagttgatcggcatgcgccaagtcccagcggtcaggcaatatgttgtcccgcagcaaatgaactggcgtgtgggaaaaacaaaaatgctttctcctgaagaggatgctgtggccattcattcgttctcggccccggcatatgcggtcgacgtgagccgcaccagacccactcgatttatttgctttttaaatcaaaaccagagtgaaagtggatcgaaacgggagaaggttgctcgcatgagtatgacgcttttgaaaagacatcccaaaaggcgtgacacgtatctcattggtgtaggagatggaagggcttctcccgtcggcctcatgttgcacaataggcacagcgatacgtgcacaaatattacaacacgtaccaaacagggttctgcatgtcctagctttgtactggattcaaatacaaaaataataaatgatacaacatgttgaggagcgagagaagcccccgatagtctaatgtgttgcgtacagctctcagcagcgagcatggcacgcctccaatgggatgtctccacagattgtaggcacagacaacttgtgcgccaacgcagctgtacatctcgtcgagcgtcgttttcaccaagcgactctccatgcactgattcaccttgcttgtgtagtggtggaactaacgttcccagtgtgccgggacaaatttgcttcgccgccacgcttcgtgaactgtccgcccaggagcatctagcagcgtctatcgacttacgccgttccctcgcagtacgcttccgttcgccatacaccatgcatgacactaatacgttctttcagagcccccgtatttttcacaaaccctccacgcgaaagtaagcggtgcgaaggcatgcgtcattcaacaaggttgtgcgacgctcgcagatcgttcatcacagaaactttcgtaaatactagcagatgcggctgttaatcaaacagttgatttgaaacgttcacccactggttgacttgatgaaacaacacaacaatcagtcttcgccccgataggattcctattaagctgctgttttcgtagacagatgtgatcgccagccaatgcacaaaacgtttttgaggcagagctaagaactatgtcccgaaaaactctcgtcaccttgcttgactgagatctggcttctgttttatagttgtatatttagatatacttacgatacagactaagcttcagaagcatggtatcgtggttgcacctgactgaagtttctcgggcgtgccgtcgtgatacctctagtcactccccacgatggtcatgcatgttgaggaactaacagcagtgacaagacaagcttgtgtggaaattcgtgagaacagtgacatatccagttagagatcccagacacatatcgctcaagaacacggcagcaaaccacacggaggaaaggaagacggtgtccgaagtcagagaggctgcatactatcctctgcgtgcatcgttatcttcccttcgtcgtccgtagtgacagtgcaaactactgaaaaccatttgggatactttcctctcaggttgctggcttttttttgcgcttttgtttcttcttgctccggtggccgtgtgcatgcatttcagtccacaaatcgcggaatgtgcgcttgctgggacactgcctgcacagtgatgcgtctccgctggacccatgggctattttctgccacaagatgttgtaaaatccgaagaataattcgctgcataatatcttgaaagcaagtgtttggacatcttcgtcctgacaacgccgacgttgttttctctcaacgattgggcttcgggttcgttggatatccgactaacccaggcgtagacctgcgcgttcctgtttttatcagcttttgctcgccccctctttcgtctacgagtgaagcctatttttgctgtctttttcctttttcgttgctctcgctttctctgggcgtgttccttcctgtttgcgcagctgcctcgacgagatttatccgacggttgccgttcgtccaagcgacctttccggagcattctcaaggaccgtcgtgggtttgtcttgtctgaggagctttttatcgcagctttcttcgtttgtgttgtattcgtttttcccgttggatggcgccgatgactgtgcctaaccgcttcccccggtgcttgcacccttttcccccagcgctgcgttgcgcatctccagctgtctgcgaatgatgtcacggtcgccggcgttgtcccgctctctgtccacttaccaaaa

SEQ ID NO: 2104 - DNA, 1892 bp, Toxoplasma gondii
  source 1..1892: mol_type = genomic DNA
tcgcttcttttcgtagcttttctgtacttgtttcttcctcccttaatatccctgaactgccgcgctgtcctccgtttcccccctgtttctcttcctcctcttttttgttgccttctgtcgtttttccacttcatccgctctgcctgcttgtcaaggagctgctcttcccccacagcgatttcgttttgcacctttcggacgcaacgaaaagctccacgttcctttcttgtccgtcttgatttttctgaccaactttctgaccatatgtcgattttttcccgttttccgggtctcaaatccggttcacagtctcggggcgcacaggcgcgaagtttctactcttctcacaaaaaaacgaactgaaaacgcgtggtctccccgaggcgatacccgcttcggttgccgggtactggaaaaagagagacgatagttagagcatctgctgggatatgaaaaaggcaacacactgccactgaatagacacctgccttcgtcgagaatgttctgctccggagttgcgaagacagactttgggtgaagttttagaatattttcgcagcggattcaaatcttccgacaacgatattgttgcctccgcttccaagatctgtatcagcaataaagtgaccctgcgcttgttacaggcttcatgtgttattaatcgtgactttctcattgaaaggtggcagaggaacggagcacggcgtagaaaattcaaatggacacaacgtctaccactgacacagaaaatgagtctgtttcctgctactgacttctcgttgtctaatttccacgctgtcacaggttttgaaacaacaatgaaacgcggttttcccgctcttttaccgccagtaaacaccagagccgatttcgctggtgtgtcgggtttcctttcaacacgcttttggttctgaccagtcatgttttttctgtttgtgtttaaattctttccggagttccctaatcgcggaaacaggaagcatcgtcagaatcaggttttggaggaactatgcgctctgcgagcttcgaggatagcaaatgcggataggggagaaacttagaaaactattttatgctgtgtctagatatgtagtaaactcatggctacatgaggcttgatgatgctgtagacagttgtgagcactgcatatattttacaggttcctgctaccttcatgtttgcctcagcgggcagatttcatgaaacgcctttgtgagaatcagacttctgtccaatgtgttgtgggtgccacatactgtcacagtttcagaatacattgatgctgacccatttgattttctgtcgatgaaccaagagatatgattctgcaagctctttaatatggtcactaatgtgtcgccgtcgtcctcagaaaagcgaacaggagaatggggggcttgttttccactgaagcatttcaagctctttttttattggcaaaaggagccgcaaatacgagagtggaacagagacatggatcgctggtccataccgtatccgggcgagaatttactcaacctctcgagttcacctcagactcatctccagaaacatccacaattgcacgagcttgaataacggccttatataaagtgttcatttcttctgtgcatcctttcatcgacaaaaacagtaagcagtgtgcacccttgactaagatcgtcgcgggatgcccggggggccacgcagcgcggcacgcatccgccttgccatcgagtcgccccagaaatccaccaagcaacggctcgggcgatgttccatgcgctatgtcaggcggcggatgccttgtaacactcagaagcaatctgtattttcgagcttgcgtcttcggctcctatcgcgttgtctgtcactttgacttcgcctcaatttgtcttcaatctcttcacaa

SEQ ID NO: 2105 - DNA, 3841 bp, Toxoplasma gondii
  source 1..3841: mol_type = genomic DNA
gtctcttgcaaacgtcttgcctggcagtcttggaagacctgatcagacacctgggcgacttctcgcgggggccgaggcctctgaggctgcggtacatgaggcgctgtctcgcgcgctgcacgcgcttcgcgttcaagggagttccaggcttcacgacgactccgtcttgcctgctggttcttgtcaggtgcgagaaggaaaagagcaagaacttgacatcgcggagagagctctccgtttggcggctgctgccgagacagcacttgacaacgtgttaatgtcgatattaaagctgtcgccgacttgcgaagatgactcgagcttactgggacaccaccccctggcgcgggagctgctggagagcttgaactgtatgcattctttcggcgagtcttccgcgaggtccaacgcggtcgcttcggagacaggccgcgccggcggccttggcacaaccgcgagcgagtgtgggcggtttttctctcgagacaaacagggcggagaaacggccgagatcgacgccgtggggacgcgctgcgagtggctgaccgacagtgtctctttgctggaaaagcagagacggttggccgaccagcgcagaaggggggaagcgcccgagagtgaactgtctgagaagcgtggacgttgcttggcagaaccacgtggagtcgaccttccggcaatttacagagagagaatgcgcagaagcagagaagttttttgcgccatggcaaacgcgcgcgactgcatctggaaaacgtatgcagcagctgaagagtccaagcagaatccctaattcaggtttccaaaacgaaatccgaagaaaacgattgttcaaagcgacctgtcaaatacttcggcccctctctgccttggtacaatcacatatgcatgcatgcttgtgcgtatgtgtgtgcatgtatacgtgtaggtggatatgtatgcgcaagtccacatacacatgcagatgcttaagtacgtcctgtgagacagtgggaaaagtaaagctcgcgggctgttgggttgcatttgctgagggatttttcgtgggaaggtggtgacagggttggcgatggtttggagaggagactgcttcagggacggtgaagagcaagtgggtacgaattgttttcttgtcacgtttcttcgttttccgcgtgttcgctgaaaagcgacgcttcgagagattcagagactcgcaagaaattcatttgaggacgcgaaggctggcgggccgtgctggtgtggtcgccggcgactcttcggaggacacggaaaattcgacaaaagcagcatcgaaaagcgacgagagtggatctggagcggcagacaataacagggctgccgacaataataggacttgactgtgtgccagtgaggatagactactaccaaatccataatcgttaggtctttcgcacagactaacgctaggaaggagattagcaatgtgtgggtatcatgatgtgtgtatagctagtatgaaaatggtggctgttcgaatttgcgctgaattcggaatacacccacgcctgatgcatttgacatggccatgaaaagcatgttttgtcaccttttcgcctcgcttttctgtctcgtcacgtttaaaaagcaaagtagttcgtctgtacttgcagtgtctcttctatcacccccgcctcaggacccgcagaggaaagctaaagaggacattgtttcacaggtcacatatccaccaaagagccattccagcttgtccaaagtgacacagaccgcaggtaacggcaggggcaaagtcccgcatctaaatataaggtctacaaacgcacgcagtgatgcagctcacaagagacaggggtgcctatccagggaggcagtatgagcgagtggtacgttggatttcggtttcttgttgcccatggtgaggcgctgcactggtacgacgctctgtgctagagaaagggtgttcttttgtcttactgcggccacacaaagaaatagataatcttatagctgtggatgtgcgtcgcgcagaaaaggcagagatgtgtgagacatccagtcaccggaacgctccgccttaaatgcggttgggcacctccaccgttgccaccaagaagacaggctgccaacagagagtcgcttcttcatgaacagaaagttcgcatcagcatgaagttcatatcataacggttacgaatcaacctatctttcctagttacgcgtgtgtcacacaggtcgctgatgcgcacgtgaaaaagaatcttcagtcaggccggccactacatcttcgacgcggcgataccagacacactctgaagacgtgaacctggaaaacaaagtatctcgccgcttacgaaaaagtggaaacggagcattgctgtgttcggacgtgcgcctgcgctgttctgacgactttcaacgcagccccagaaacagccaggttttgcttcagaggaaatcctacatttcattggaggacgacagttaatcgaggagttgcagaggatctagatgtagggttctcaaacggatctttttctgttggcgtgtgaaggcaatttaagagctttctctgggtaggacggaaggacgcagcagctggaggcgacacccccgcccagaacaacgcagtctcgggcagttgagtcgcgccgcggagaagctggccaagtcactccaactgcacagccaggttttcgttggattttccgacattcatcacattttcaggactgttacattgcttggctcttgcccgattgcgagctagggaactgtgtccgcgaaacgacgtttttcccgaccttcctcggtaccatcgtccatccctttttcgtcggttcctaccctcgaacctccccccccccctcccccgcctctttgacggcgaaaacaggaacgctacgattgatcgatacctcaagttttcgacgcatacttttagagtttccaatcttgtcttatgaatggagaggaacgtgagggaaacctagctatttgtcctcagcccggcttgtcacggtgcccgccctgggaagacacccctgccttgaacttaatcaagcccaagcagctgggtaaattctggttttttattcgtagcggggtccgcattcgtctcggttgttttcaaggaggacgctaccggtggcgggagctgctgcctttccaagctccgtatttaaccgtgggtgcttgcaagctgctgagcaggcatctgggtgttgcgcgagcaagaagtgaccctgtttcactgcacgtgtctcttgtctggaggtcttttttcctccatgtcgcggtttctgaaactttaggtattagcgtggatggctaccgaggcgtagttcgcggaaatctctctgccgtgtcggcagcgctaagagctaaaggcagatgcgttgtggagagtgcttcgttctccgtcgtctgaaggctgcacagaagcctcattatttcctctccaacttttctgttaatctccttgtcattgctttttccgtctggcgtttgttggcgaatctccagggtgtccgtgtgcaggtagcgtttccccgaaaatggatcgagggaagcgtctgtctctggatgtgccagtcccgtttctttttacttcggcttcctcgtttacggtctagggtgagaagagcgtccttgctctttcaacccgcatttccaagctcgtccaggacgccgcatcgcgggtgagctgccgtaaggaagcctcccgcgtgcttactcttggcttttcgcgctggaatttctcgccgaagtctgtctgcctcgagtcttttgtttccctcgccgttcttgcatttatgttgcgcacttcctcggccgttcgtccttttccgatcgaagggaa

SEQ ID NO: 2106 - DNA, 2297 bp, Toxoplasma gondii
  source 1..2297: mol_type = genomic DNA
acctttttcgaactactttcctcgggcacgcaagcttggctggaaacccctcattcagtcagactgtaaatcatcaggattgcgtctaatggacataatggacagtccacaagtgatgggggtctagagaaaagggatttcaaagtggaaaatctgagggccgggaacaaggacacatcgtggttcctcattctgtgtgtttcccggaaatatttgagagatatcgagagagcgcattttccctggcttatggaaaagacgggagagagctttccggtaggcacaagggcggtgtggccatgttgtgcagtagaaaggtcgtccgaggcgctactgaacgtgtttgacagtgtagaagccaagacacttcgtgacagcaaagtcatttcatgccactacgaaattgccacagagcatagcatgagacagttatgggtgacacaggatgaactgcaagtttgaccaccatattcaggcagtgcaaagatgtcttttccactgataaccacctgccttccgtccagtatcacggagacctgccaccggcaagggggaccatcagcagagtccctctgtgcattagagaaacaatggctgggctttcgacacacctcactcttctcacaaatgctcttcccgctccaaatgtccatatcaccatctagcttgtagagttgtgtgctgtctcttctattcacgtcatgcctagttgcagccagcaagcgtttcgctttatttgcctccttcctctgttgacaggagaaaggctttactctctggacctcggcaccaaggtgaaaagcacatagcctacgcgctacgggcatcaacttcgtggggaatggactgtcaatttaatccgtaaggaaaagcacacctgttgtttccccgcatgttacccggcttcttgaggtgttgcgttttgaatccgtcccactgcaccaccttttcgactaaaacctcaacgatggtgccaactatgttctttcgaagacaccttctggcctctactgctacacttgaaaaacctagggagcccgctgtagtgtgggtttttgtgtctcgacgactgcgttccagccatgacaacagttctcacctccgcagctctcacagcaggaggtgactgtaaaagagatagctttcactttgaagtcagaaatggtatcatgggaaaattactccaagttcgaagactacaaataccgggatgccgctctcgtctcgcagtctcccgcgtgtacccacacctcgggtcccgcaattactagagttactgccgcgtgacgcaaaaatatcggcttcaagtataagtttactttccaacttcagtacagacagtgccaccgtctaccactgcacaaaaagtctccaacactttggtgtgctgtacaaaaattgaacaagttaagtgtcatacgagggggattggaggtcagcagctagctgacccgcgcacgcgtgaaccgagcctcttgatcgccgaagggtttagggacccgactgcgggtcaaaacgactacggattaggtgagaagaaaacttgattattcgggtttcccgacgaatttaccacattcagcgatgccacacaaaaagaagaaagttaggatggaaggaatatctccttcaagacttacaggaagggttgaccgtccgcgatgctgaaaactggccggtgaacggcatccgacaggggtgacgccagtcgttgcagctgggcctccttccacatagaacagttttttctttttgatgaccgcaagtctaactgttcccttgagctcacgtactaccttccagagtggtgcagcagggtaggtatcctgcacaccatttactcgtgtcaatgtttcggctgcagttgcgtgcccgtagtatttgccacgccgttgcaagtgtgcagcaaccctccggcaggaaaagcgcggcggtgttgcatttttgtcttcaaacgaaactggttaacttgagaaggtcctcatgttggaaaggcaccaagccatccacgacatgggctccctctgctgcgctgcctggtgtgtttgtcaacctgtgtctgtcgttcatcgtagtaacatgtccgcaggccatcgtttcgccgacactgactcgcgacgttcctccacgtcactttgagcacaaccagttccgtctacccccacgctgttcccactcagtcacagtgccgctttttttctcatccgaatgaagaccacactgcttcttcgctcgttcacgagagaaatctgctcaccagccggtctattccacctgcagtgaagaacatcgcaaaa

SEQ ID NO: 2107 - DNA, 3894 bp, Toxoplasma gondii
  source 1..3894: mol_type = genomic DNA
tgtgaatcagtagtaatcaactcgaagtgtccttacccgtcagaacaaggtagaataaaatggaaacttcggattcccagtgtatacgctttcgcagagctcgccgtacgcacacgcgtatcaaacgttctagaagtgaatttacacaacgcagcaggctctcgcttggaaccagcgctctgtctctttcaagggttttgacgaccggattctaacggttttttgtccggtctcgatattctctcggttgcgaattggaatttcctcgtggaggagccgccggagaagagagtcgcgaagtccgtcagcagtctgccattctgctctcagaataaaaggatgttcctgtgtgtcggggttttctctacgtttctcgcttcgcagaagccgacagtttccagtgccacaataaggaacgtaactttgtttttcgcggcgaagtgccggaaactgccaggagaccacaacgaactggaacaaagtgtgttgaagtgaacattcatgcacagttgtaaagacaacctttcgccaactgttcgttgaaaccagacggttttgagcacggtgcgtgggtggtcgttccgcgatcgtagggcttacatccggtcacagaaaacagaatttcctggcaaagaaccacggcgacccagcaggtgggaagagtgatgaagttggacttcacacgggaattccctcggactcttaagtcgtgctgcctttttgtcgtttacataaacgtaaaagtgccagtcaagagttccttcagtccctttagctcgctgcaagatcacagcagcggaaaaagaaggatgcagaggtaggtgttcatgaaattacattccgaaggccaaagagacgcttatgtctctctgtttattcggtctcaactacacagtgcaggatcctgcatcacgcatcgacagctgttgtggtaaacggcattccattcttttaagatactacaccaacaccgagtcaagaaacaggacactctctcacatctagtgtcgcagacttcggtatttacaagcaaagtagttttcaacttatccatttgaaaaccccgttaggaattcgtaccggcagttccacagcgactcatgcctctgtcgagaggtggacgggggaaaacagtcgctaacatcagtgaataaaacgatttggtaaacgttttagattgttgtagacgtaacagtctgataggaagcgggtaagcctgtagagagtcacttctggtgagcatccacctcatcaccgagtgctgccctctcgcttgcttaattcagagaaacggttgacaaatcggcagtccagttgtccgaaatcacccccgtctttgctcgagttcacgccagttaatgctaatgctgcgttcgacaaaattgctggacaaaaccaaggcttttttgtagcagacatatagcgatgtgtgtcgaaatcacttatcgtggatcagctgcgcacaaaacaacagaaccagtatcgtgcgtggtggtggcctatacagtctgtttctatgatcttgtttgtcggtgccagagggtcaagggcatttgagaacatcgcaaactgttcattgtttttgcgtatttgtgaaaacgagtcaaacctggcaacaggaggctcagaggtgccgagctgcatggccctcaaaaatttcacaaactgttttcggatttcgcttttctctttgttcatttgtttagactctgaatgaccgtgcactttggctgaaaaaaagaagcaggcaacaccctcgtgagaagtcgttgtagattcactgtcgtggcaaccatatagcgaaatttagtttggcacacgggacctcgattcatcaccgttaagaatgagcactgacggcgttaacgtcgctgacttctctgacgtcatgatgcgcgacttggatgggatcaatgtgttcaatttgagatttgaggataagaaagcgggagtggaaggaccagaaatgtactggtcgggttcattgtcagtgcatttgagtgctgtccctggcgttctagggcgcagcatttctcacgagagaaactgtttctcagaacagcaggccttatagagttccctctgaagaatctagtgttgccgacggcgaaggatttgtgtcgagttccagagaaagatgcgtgctcgtggtgcaaaggagggttaactcaagaaacgcgcgccacgcgaggggcgcgacagcttgcgaaagcgtgtttcaagctgcttcggaagttgctgttttccctcatagtctgcttggagcaaggcgtctcaaacttttatccagaaagttctccaattccgcccaaggctaaagcagcccccttgcagaggccacacaggacagacactcgctgtcgcagaaactcaagtttctttcgcttctttcatcgtttctcttcttcctcggggacaaacatctcatcgtggtttgatatttctccagagagtgaatcagttacatcgctattaagtggtaattccttctcctctgagaagcctcaaacccaagcataagttcaaaggttctggaaaacacaccaatactaaaggaatgaaaccgggttccccttcggcgacgttgctagcctgctttaacgaacagtgcttagttgcagagggattgcctctctcctcttaaagagcagaagcgacgacagaggactcctctgtcatagaaaaaccaggtggcacacgaaagcaccagaagagttgacagtgggacaggagcaaagacgtgtggatgaaagcggaagaaactcgaggcgctggcaaaaggggtcaaaaacgaggcacggaaagccagtcaaggtttcttcatttcccttcatcgcgatttaaagatatatatgcatgtgagtttttcatcatcgccttcagcctgcgtttttaacaagcacctttcatcgactctacaaaattcaacccgcaacagtgcatatctctgcgtagttctctttctacattcgcagatgttcgcgtgtttcgtcgacaaacaaggataggcgcgcaccttctttcgggtctggtgacctcctttcaaatactgccatttagagtgtacagatctataaatccgtttttacacaaagtccaacacgggctctcctggatgatacgccagttttgagagcacacttcaccacctttacacctccgactcttctgctgacctgaaccgccgagtatttccctttcaacatcgagttccgagccgcagccccgcttgtgcgtttcaaacggttctcccgtgactccacatctccttgacaaacagcgatgtgtacacgcgcgttccggaatcttcctgcccaatgccgcaaggatcccagagggcttcagtccgcgtaaaatcgtcaagcgagttggtgctgcagtttcgcaggattccccgcattttcgtctcagcaaagaacaacgacaaagctgcgtctgtgccaggcaaaagcctaaacgtcgaactctggaaatgtgaaactccaatcgcctttgcctctgcaagcccctgaacgctccttttctacagcctccgagcctgtttcggggagagcactctggggcgctgttgcttttccgcgcctttcaccgtggaatgatcttcgaccacaaaccgggaagacggcagtggcaactcttacggacacaccggcctacttcttttgttatccactgccttgaagttttcctgtgtggcagatcttcgcagactttgttctggtgtacctgcactggaagccatctggatatctctttctgccatcgaaaaaacgcttgaattcctcagagaacgcagcgtcttcgttgaacttgcggagaagagtgctcatttcttcaacggaacaaaaggagtctgttcacgatccacatagctacctcccagaacggtcagaa

SEQ ID NO: 2108 - DNA, 2401 bp, Toxoplasma gondii
  source 1..2401: mol_type = genomic DNA
gatatgggaacctaccgcttgagctgtattggcaaagtctccagagacccgcgtagcttcttcagcgagttcgaagaaattttttctgtcttccagtcccgttctcgatgtttcggatcctctatagtgattctgccggaggccttttttcccgagttgagcgcatccgaaagcgactagggagacgcccaaggtgtccgcaccctgcagaatcaccggcgttattatcgagagagtgagtttcaacccgtatgtcaatgcgacaactgctgctgcatatgaagcacaaaatacaacgccggctactcgaagaggcggcgaagggtgagcctgagagagcgacagagacactgtcgaaggaggaacggcgtcaaaatcctccttggaagcgtcgattctgtgagggcggcgcctgtgcagcggcccgggaaggcagtcagggaaaatctggtgaagacatgggaagtgacgtgccaacaaagcgaggatggcggtgtacaggccagacaaaaacagatccgccgcccccaggcctcctgcagacaaagtaaagaagacaaatgaatggaacgcgtttctcagtggctgcagcaagcacctctagacgctaggtgcggaaagataattgaatttgcggcccgtcgcttggtgaatcgtacgcagcaaccatacagtggaggcccacttgcatgcacaacgtgtcattaggacactatatgggtgtacaaggcgatgcatccgaagccgagtcaccaccttatcgcaagacatttttcaatccgataccatctagctgcctactccgaaggttactcagtttgcttcttctgtgtcatgtgtcgtttccccttcttccctctgtcttatcaaatcagccaagcgcgagagacatgagctagaatgagaaaaaacattcaacagatcacattaggagacccacgaggcttacctacgatatggccagggacgcctaaagtcttggcgacggcgtaaaaattgatgcttcctccaatgtatgtcgctgcaacgcaggctgcgcacattgcggcaatgcgatgcgttacgtaagacacgccgaggcaccaggcatacgacgatataacatgaatggtgaggtggtacgtgccaaagacgctaaggattgtagccaccgctcccagcacaaatgccacaccaaccgtgtgaaagcgccgcgcagcccccgtttttgtctcggttgtgccactaccgccgcttccaagagacaacggcggtggcagagagacggattgagagggagaagcgcccgatcccgaagaacgcacgacggaaggagcctggtgcaaaaagcaggcgcgattggccgcgctcgaggatgaggaacgagtgtgcatgcagcccgtggccacgtgctcatctagccaagacgtgacagcgacactgttttggggatattcttcgtgcgaagtcccgcacgctggggtccgtggatcccccgcttcctgacaagtcctcgctgaggtgtctaggacgacgctagtgacaagaagaacgagaataagtggcacaagaaggtgccacgcagcgtcataaaccggtgactgcgtgggaagaagccagggaaacgcattgctgatggtggcagcggtcaagaaggcggttagagagcttgacaaggcagccccgatccgggtttgccgggccatgatctccgcgacacatgctatagtgacaagaataaaagtcacctgcagagttgatgattcttgccacggttcgggaggcgtcggctcgcccgtcaaccgaagaaagtagcaagacacatcgtctgcgcttcctcgtggcagtgggggcctctccgaggagacaggagacacccgcaacgccagagagtccgccatggcagcaacgggaaaaccagcatagcggcgagaggggccgcggctatgatctgccctaaatgagagtgaccccaatccgaagcacaaacaaatagaaaagtgaaagcttcgtggcagcggagccaacagcggtccacagaaaactcggttgcgctgtgcccagcgttactgcatgcgtgtcttgtttattctgctgttgggccggttgcttgtgtagtccaagcatagccgagtagctcgagaatgctgtcgaactgcttcgttcagattgactgaggagataatgtgtaacaacagagatactgttcggggaacaaggttagatggaacccaccacaatgtcagtcaggcgtcaagctctcggttcatcggacgataacgcagagccttccacgatacccacgatttgcgtggtgaatttgctcagaacgacaggaggcgcccgtagcactcgaagaccaaagataataataataatgctccggctgtcatcttgtggttccttttcgacttgtttcgga

SEQ ID NO: 2109 - DNA, 3231 bp, Toxoplasma gondii
  source 1..3231: mol_type = genomic DNA
agatgtatgcatgaaagacggcagaaatgaggcaggaaggaagggagacgctttgtttctggaaagccccttaacttcacttgttgaaagtagaaacaccaactatttgtttggactctggagaattctgcatttctcaatgagaaaaagctccccgatatgtttttcaaagaaaataagcatcgcgtaggttctgcgtcatcgccggaagcaggagcagagggcgggaccacgcaggaaaaaagaaagcgcagaggctagaaaagctgcagaggccagcgagatgaaagatactgctgcagcgaactagtgcatgcatagggtttgaagagaaagcgaggagatacaacacagatgcgaacggaaactgtgtctcgcagcagggggggaacccaaaagtcacagggactcttcgccggcaatcgacagtcttccacgacctttttcgtgtctcagacttggtcaggtgtctcgtcagcctttacagctcgacagtggattctggcacgaggttcgaggagaactgtgtgttcttagtcctgcttgtccggtcgtccgttcgaggctcttctgccaaagagatttcgtgacaaagtgtgtgcctctgtggcttcgctaggcaaatcgggaggcgaaggcagcgggcaacagacacccacactgactgggacgaatggtgaagaacagaagactggtaaggaaggcagcaaaaaagggactcgtcaggccgaatggagaaaatcggtgtgtaacaaagaggagagaatcaccaagtcttcagctggtcgcgacctcgcaaggtgattgttcgtgtgcagccgcctgtggttctcgtgcaaatggcatgactatttcgaataacagttgcgagatgggaacaaaagagttcaatcagcagaatggaagggagacggaaggcttgagagagaggaaagtggggaatgtggccgattcaaaaacccggaaaggcgctttcgccacgttaacctaccgaaggaaagaggagggaagaagccagccattgcgtcggcgaactggaaggagacggaagaatttcagggaagattctacgacacgccgccgagaaaccaggcagggtgaccggagactggagaagccgagacactggaaggctctcgaaggtcgcggttctttccgcgaacacgaagagccccagaagacaggagagggacagtctgggagaaagtcaaaaaaaagaaagatgcgcaggagcaatctctaggggaaaaggtaggacaattggtctcgactctgcggcgtttgacgtaataaggcttggtgaacggaccggcgccgccgccctcatttgaggcgaagcgaaagggtatacgcctgcgtggcagtgcccacgagaagagactcaggcagaaggttcctcagagacgaggaggtgctttagacagaacgaaggaaaataagtggaggagttggtcagcatgcaaaaagcaagacacggaagctgatggagggttcccgcgagagcagtggtcgtctgctcgcgaggagtctgcctctcaaaaacgtggtcgaggcgacggtattacctccggcaaaagcgaaggaagctcgttgtttgagggcagttctgccgatacggacgacacgacacaagcgaaccgtccgaagaaaagagcgcggatcagaaactctggttttcttggacaggaaagtcgatcacagtgcccgcctgcctcacccatggttgacgaaccagcgcgccagccgagaaaagtctgtcttgacagatgctgcggcgaacaagcgaacaagacacaacagaggtagcgcgctggccgcatttgcggttgaaaggatttggggtcagggttgaaaacacaggatttgttgagaaaggaagaacgcacgagttctgtagttctctgggcctgttctttttgcgacaagatgaaactgacgagaaatggaaacgaacgagctcgaacacgcactcatggcccgtctggggaaccacggcgcgggctctagcgtcttctcctttccaagcaaattctcggttacctcctttcggtttactcgagttacgaacaggtggagaaggggatgcaggagcaaagacccaggcagacattaaacaagacagctccatcaggtctaggttcctccccccgcaactggcgcacgtaggtgtagacagctaccgcattcaagaagtgttcagaggagctttttcttcctaggaagaccagcgcgtggccttcagctctcttggttcctctctgagcgctctaactgacatggcagtcgtacatgtgcatttgaatcgaggcggcgcggggtaggtccacatcgggacggaagaccgaggctgcctccaagagagttcagcacgtttcggacggctcggttcgtctgccgtgcatcaactaatcagtcaacccgctcgacgatcggtcaaaccaggtgacaagagttcactgatgttaaaaggaaacgggaagtcgcgttgccatgagtgaagtgttggtctgatcctaagtaggcctcttagctgcagctgagcgtgtcacggtcctgcggaaataattctcagctggcgcagtggaacggaatgctacagtgctcatctttagtcggagaccacgacagcgttctccactctggagagtggcaattaggtgtcgactaccagagccgccatttgaccagtaggatattgtcctccacggtagacgggtgtattcccttgcgctacgcaccagagcccggagaacgactctcctccgacactggtttcgtcggaagtgtctcaaaagctttagaacggcttgactccatcatgtctttgccttttaccaggcattcaacattggcgcgtccacaatgtcttagagctgcagaacggcaggtgtacagacacccagcagtggcgatgaactacttggcacgtttgtcatgcctttcctcgcttcttcaaaccaccattttcgcacccattcaatttgtcgaaaacagagaatatgtatgtgatatgtttgattattcccatctgcattcttcctggcgaaaacacaggactgtcagtctgagtaattgagtggatactcctgcccgtcagggccactatcagtcctctgtctcacaagttactgcactgaattgctttaactccttcggaaaaaggaaactcgcggcactgcttctgtttgtcttcgacagcctagccgtctttttagttgcctacaacgacga

SEQ ID NO: 2110 - DNA, 2376 bp, Toxoplasma gondii
  source 1..2376: mol_type = genomic DNA
atggaaaccgaggtgcctgtttgctggtcaccaaccagactggcgaacaggtgtcgtgggttggggcaatgcaccggcggcgaatgttagctcagtcactctaaatcctgacgctgctgacaggttgatcgaactctgctgccttctctgagaggaggcgcctcgcttccagaaaagaagccggacgccacacaaaactgaatcacttacggcattctttgtctctcaggttgccagtgaacggattgggaggcagcgagtggataggcgccgggacagtgttcaccaaatacgattcaccgcctctgcaggaactctcgaaggaatagtacccgacggcgaggccgaggatgtcactgatgaactttccactgaaaacacgcagagactcgagaaaaaccagtcggtgtctctgaacgccacagacgctctggctcgacaccgtcgaattcccgtttcgtgcgtagacggtggcgggcgctgcggcaagcagcagagttctgattcggaagaacgaaacctcgtaactggacccaggattttctccagaagcgcgaaacgccttactagggtagcaagttggctatctcgaagtcttggttcagttgctcgctgatcatgttgttgaggtcggcaaagctgctccctatggaggaaataatggagtccgcggggtcgtttacgccatcctaaatgcacacacaagccaaagtccgagaatgcagagacggaaaataagtccacttcgtcatatttcgaaacctccacggacacatgctgcgagaatccacggttctgtcgactgtcgcttctcactctgggaagtggcgtcagtcttgcatgaaacgacagagcgatagaaagaggcgagattgtagacggcataacacattcaagaccaggtggcaaacgaacccttgcaacaactttgcaaagtgaagctgatccgggcatcctttttgtacactctcaaccgtggaaatcaattcgcagaccccagatgcgccgcagcctttgtaaattcacgaggccaaattccgctcctctcgggagccgttctgtcagacagccttttcgcaatccggaactcgaccagaaagggtcaaaagagctgattcgacttccggcaagcccagtgccttctcaggaaccacagaaccagcactcgcacagtacatgggtagtaacgcgtccccctgagatacccgccatcttgttttgcgcattcgttgaacacgacgtacttgctgttcgcatctggcttcggacacgtctaaaatgcctgtcagtgagttttccattgtcctcaacaattcggagcccacaactgcagtggtgtcctgccagaaatgtggcccggggacaaaagacgtcaaggacaaaccacagtaaacggtcctctgttgaccgtggcaaaccccatgaagctgcttcacaaaaagtcactggagaaaggtcgtgaccgtggcaaaccccatgaagctacttcacaaaacgtcactggagaaaggtcgctgttccgcgagaaatgcaactgccaaggcgtgcgtgcagttgtcttagggagacagcacatcgggtcagatgcaatcgtcacaactcgatgcaggaccgagcttgaaagctgaaagttcttgtatctagggaaagttttcttttttattttgcaggtttcgcgtcaagctgtgcctctcgcgactgcgggaacgggcgagaccaatcgtttttccacccgcagacaggacgtcttttctatgtgaggcacagcggagcgacgactttccccccttggcgcattttttcgcagcggccggtttgctcggcctttccggcgatgctctgtcgtgaacattggaagaaaaatactttgacttttgctttggaggaccagaacccgcccacttttccaagtcagacacggtctgagtctgacggtgtcgtctgttcacactggggattcttgtgcggtgctccctctgcacctcacagctgacgccgaaaccgggcgaggattctttggttccagcctctctcgttttcgggacgaaactttgactcttcattttggcaaacgtatgttttcgtttcctccttgtcttccaaacgatcgtttgcatgcaggaagtttccgctgctctcttttgaggtggtcacctcgctgtcttcggcagcctaacccgtagcgaaagatttacggagactggcgactctctggcgactacaaatcccttttgaatctttctcttcgtcaacaaattgcggagccggattctcccgacccctctctggcgttggtttttccactgatcgatctggcatttaccggaggcgggacagccccggagggaggtcctcctctaaagttcagtgcaaaca

SEQ ID NO: 2111 - DNA, 2250 bp, Toxoplasma gondii
  source 1..2250: mol_type = genomic DNA
ttcatatgtaacgtttgtgtctcttgctctcgtggttgagttggaaactggaaacccgagccgagaacaaacgatctgctggagaaatggaagtctgcctcgacgaatgcagatgggctgggtgaatggacacaacgacgatgcagagtgtcgcttttcgaacggtcgacatgactttttcgtggcccgtacggcattcctgggcccggtgattctcccggtcgtaactccgtgaaacgtacgccttttcccgcacgagcttgcgcaatctatacgactgcaatcccaattcaagggtatttgacaaaaccgcatccagatactggaggtcgtacctcgtgagccagacccggacaaggcagaagtgctccttatagaacaggtgtctactgtaagtcttctgcaagtcgctacctccaggtatttagactaacacacgaaagctaccacgtccaccgtacaatgccggcatgaagagcaaaaaggtgatagctgcaatacgtggtgcagttaccacattataaggttatcttgtgtgaccaaggtgaggcggcacgttgctgcgttctgttccccgagaagacatgaacgggacgctggcttggccgcttgttcttgtaattcaagacgcttgttgctaattgctccgtacttcacacgagaactatttgaattttaacttcctatggacagcgggagcaaagataatcaaacatgaaactccgccctctgctaagacagtaggacacggatccaataaacaggcctttaaggtggaaaaaagtactcctctgcttacataaatccggcctactcacttcgtcgctctcacccacttttctccctttgcttctcccctttccacacagaagcattctaccactggatgtggtgcaagtctgctaggcagtgaagttgtgcctgttttctgaggccgagaaacggattctacagttgccagagagataacagtttgtgcaagagtatggaacgcagagatccactctgttttctggtcgacggagacgacaccgacagggataggcaaacgtgaaacgattgagaggactcctgcgcggacggaacacgcgatatgatttgaagagatgaagcatctcttgagcagttgcgctttctaccagcagggggcaaagtcacagaaactgtgcatcggtccacatagcacacagtcccggtgaactacggctccgttaaagtggtgagtcaagcaacacaaactgtaaaagcttctgctgtgtccatctgtgcatccaaagttgatatgcggctatttatgttagatgcatggacgcgaggaaaacaaatagaaaagcgtcttgagctagatcgcttctcaacatcttttcttctcgcccaggcggaacagagtcggccgtagttccacgagcctgacgtcctgtgcgttttccacgtgcacagaaaacgaaaggaaacgcaataggaggtttcaaatgttagaagaaaaagacgcgcttttccaactagaatgtcaagtacatctccaaatgctctactttctgagctgtattccctggatgaatttagctcgttgaagttgatttcccatgtaaatgttgaaaaattgaagaatgtcgttgttttatggatgtatgtgttacacattaccagtggaggacttgaactgaggtgtgcattcttgcttactgtcagaaagaattctccagacgcctgctgcatctccgcgggtctcggacgaaagactcttttcgcatgacgcggccgagcaaagcctcacaaaaggttgagggatttttccccttcttgctccacctgtatctctcgacgctgtcgtgtttctccgcctttttatttttcgtcttttcctgtatctggcatccgttcagtcttccgaccctccgaacaattgcttttctccttttctcccaccctccagtgtgtcccgtagctggcgctgcccgttcagcgtatttgcctacgctcctctttcatgtgtctctcctcggttgtttcctgtcctttctcaccgtccgtctccatttttctcggcctcttccctttcctttgggctccttccctgtgcagctcttgcctggtgccacccctcgtcggcgcccgcctcctgaactccgcaatttcgcttccttctgcttgtctctctgtgtgccgctacggtgaaatttcgatggcttttcctttgtgtattttgtccgcctctcgaactttttttcctggactttctagaaacga

SEQ ID NO: 2112 - DNA, 3102 bp, Toxoplasma gondii
  misc_difference 1954..1973: note = n is a, c, g, or t
  source 1..3102: mol_type = genomic DNA
cgttccgttgccctaccttgttgctccgcgacttcggagaaacctcgggccgcgacgtcggagagagttgggcgtcggaaggcgcggctcttgagcaccggtcttcctcaaacgcctcgccgaggacgccctctggcagtagggaggaagcttctgcaatcatctcaattgcagagtgaagccacgaagcgtcgcggaccatcacagtcgaaaacgccagttgatagtgctgcgccgcaagcgcggccgaagcctcctcgatacgacatggcgctgacgaaggagaagaagcagaagaaggagaagacgcagaagaagcggtgtttcccatcgcctcttggaggaggggaagccagccaggaacccagtggagagaggaggcgtcgttttccttggagtctggaatctccttttcgggtgagtgtgcgcctggctctttgtttgtctctttctctgcagagcaggtcgcctgcgtcgcggcggtcgcagcgaggagaggcggcaggggggcttggcttgctccttcgtctggaacggagacagaagacggcggaatttggtgaaggaactggagcagcagatcctgggaatccacgcgtttgcatcttctctgcgtgtcgagacactccttttcgaggctcttccagaagcgcgaaaggtcgtcgaggttcagggaaaccagctcctcgaccgcaggcgagagagcaggagaggcggcggaagacccgccgcggtccgccatgtttctagcagaaaatcgctgacgttggtcgaagcagcaagggaagagagaccggtttagtgtgctgtcaagacacctcaagaaggcgcatgcgccgtcgcatgtgcgtgggaagcggcctgccagtcgagagccaacggcgagaggagcagcagagacgcgagagaggcgaaaaaggaagcgagggaagggagaagaatgcgaagaaagctcagcgacaacgtgagccccgagaaaaactcgcgtctgccgagagaaaccgagggtcgactgctggctgccctggtgtcaaaacgcgtacatgcgcgaaacgtttcgcgggcgatcctcgtcgaatccgcacagccccccatgttcagtccccaggaaacgaacaggactcgaccacttggcagctcgatcctcacggaggcgccagatgcacagagcacggtgtacaccaaaatatgacgcagctgcgattcatccggtcggcttctcccattcttcagcgcctcgcccaagaaaaacaacgcgtccggaagagtgacacagttccttctcgctctcgacagaggggcagactagtccgtttccgggcggtcgagctccagcgctgccgacgacgagacacccgaaagaaaaaagtaacgctgtccacatggccatctgcagagagagatagagagagaggacaacgattgaagtccgagagagacgcttaggcagccacagcgagcggagacggcgcgggcgttggtggtctcggcgcgcgagtctccggcgttgcccggggggtgcctatcaaactggagtttgtatgcgaatcgcaagcaggcctccagcggagaaggctcacactgacaagggaaaaaacagcaaaggagctgtgagctgttgagagaaaatggaaaaatggaaacagggtgtacaggcaacttgtccggtgggcgctgtcggcagaatggccgagtggtctaaggcgctgcgttaaggccgcagtccgaaagggcgtgggttcgaaccccacttctgtcatctttttctcttctccaatttactctacattttactcattcctggttcttctccttcttatgtttgcgcacgcgcttcttcgccacaagagaacgcaattctttcagttcctctcctccgcccctgtgtctccggttgggtccttccctgtccggatccacctgttcccgtcatcaggctcagactgtccagaannnnnnnnnnnnnnnnnnnnttcactaaaacattcttaattgtctgccactgcgcataaaatgactttctacaaagttgcaggagcttctcatcgcttaacaacttcctggatgagcagaaagaccggggcggacaggaggagggtgactctcagactcacgtgacggaagaaaggcgtctgcaacgaaacgtgtaggactttgaaatcctgcgacagtaatgttatggcgcatcggggacgttctacgcgcgtccatccgattgaagtcgccagaaacgcgcccaagagctgaaaatcggagatagtcgaactgtcagtgatgtgctgacatgcatctataaacttacatatgaaggtacgtaaagaggtgtaaacatatagacataagtgagagtaaaatagacccgtatggacgtgtacagaattaaaaaactacagtgggagacacgagaagagccatgcccgagatggcgagcacggagacacagaccttctcacgacgcgcctccctcgtctgatgagggtgctttcaccttttcgtcggatgtcagcttttgcgtcttcttctgcagacggtcttgaagcgatgcaagtgaaagggaccctcgggccattggaaaaactcgaatcctcgagaatcatcagggtcgcagccggcgcggctgtggttagagaagaaggctttgcatgtgacaaaagatgaggaaaaaggtctcaagtgtacgatggagaaagaagactcttgcgagactcacgcgaggcgtgcgtcaacagagaaggagaaaccgtcatcgaaaacacactcgacaggtttttccagtcactgattcgtgtcgactctatccacatggccatctgcagagagagagagagagagagaggacaacgattgaagtccgagagagacgcttaggcagccacagcgagcggagacggcgcgggcgttggtggtctcggcgcgcgagtctccggcgttgcccggggggtgcctatcaaactggagtttgtatgcgaatcgcaagcaggcctccagcggagaaggctcacactgacaagggaaaaaacagcaaaggagctgtgagctgttgagagaaaatggaaaaatggaaacagggtgtacaggcaacttgtccggtgggcgctgtcg

SEQ ID NO: 2113 - DNA, 1561 bp, Toxoplasma gondii
  source 1..1561: mol_type = genomic DNA
acgagaaaaagcaaacggtgggcactgactggaagaggaaacttgagagaagggtgaagagcacagagaaaaagaagaacgacagagagaggagaggcgagagacatgtgcgagagacgtagcacaggaggaaggcgacaggacggtaagaccgatccgcctgagtgaagaaggtaggagttgtactgcggccattttcagttgattgaaggagaagtcatcttttcagagaacaccctggatcgatttgaagttcgacagaggattccccgtgacgaaggctccaccttgaacttacgctttacttcttcagcactgcatggatttctgtcggaaacgcgactcctccttttccttcgtctttccctgactccgtgcacctcgtctctctctctcctttctcgtttctctcctctctcgtttttctctccttcgcgagtaggctcttcctttctgtccttgcggagtttccttttcttgatccttcaaacgcagcgcgtcacatcgagaccggagacgaagcagacgcagtgacgcgcgagaaagcgacagaaagcgacagaaagcgggaggaaaggtcgccaggaaacaggcacgccgctgggcagatccggggcgcgcagcggcgagtttgagtgtacatacacctcgagcagtctctctgctgcatgcggtttgaggagggaaaaggaggaatcggtagcgaggcactgcaaacgaagatggcagcagagagaaagaccgaccgagtggagacgaagagagaaatgtaggaaagaatgaggagagtcaaggagcaaagaggagaaaacccgttttcgtggaggttctttatttgccgtcagtcacatctcccctggagcatcgcgacggcagcgatgatgagagaagtcgatgcttcgtggagtgcttccaactcaactcttcttccggatttcgcctgggttccttggcatttacatttctccaggagaaagccattcctcttgcaagtccgcagaagaattctcttccttttcttgacacgttctttttcttctctcgacctcgcactttctcgcgccttgcaaaactgcatgcgcgtcggcgcggcgccgaaacttcggcacccttgcatgtccgttgctctgtctctgtctcatagtgtctctcgccttctcttcgagtttctcgtccatttcgttcttcacagagccgttttctcttctctgaccgtcgacgctggaaagcctgaggctgcgacggggtctgtggcgaagaacgcgctgcgtttcctcgctgtcctgctcctcaaaacaccgacttcatggctccgttcttctgctctcgttccgttctcgagaaagtctcttcttcttcgctctcctctctctgtttcttcttttctgcttctgcccccagctgcctccctctgtcgagaggggatgagagtccaggagaggttcaaaggaactcgaattgtcaatgtccggctccatcggggtggcagaccagatgtctggtgtactcgcttacgagatgtacatacaccccaaaaagcagtgacaagccgctagcagaa

SEQ ID NO: 2114 - DNA, 4875 bp, Toxoplasma gondii
  source 1..4875: mol_type = genomic DNA
ggaaaggtccgggaagaagaacagcatgacaacgagggagcagttggaggagacgaagaagacgttcttgtctcctccacgttcctggtagtcggcatgtcgacagcggaacggtcctccggctgactcagccttccggaactcccgtcgaccagcgtctccagatgagctgcgtggatgccgcgcctttttctctccttctctttttcgctcggggttccgagttggttctcgcggcgtctgccaccctcggacaagggtccgcgcgacggagacttcgcgacggcaaagacggacgatcggaaggaagcagagtgcagcggaacggggaaagtccagtcccctggccaagcgcctcgcttctctctgcggcgcagaggagacgagacgctcgcggccgcagcagtcgtctcgcgggagggcgtggagccgtcgagagaccgcgaagtcggacgtggatcttcatgttgtgaagaggcgcagaccggggagcggcggagagaagaaaggaccacagttgcagaagcagccgcctggggaagggaggcagacgcgagaggaggaagagcggaggactcggacgaggcctgggagcgacactcagcagtcgtggtcaagagatgcaacagagaaggaacagcgagcgtcgcgagaggcagaggaaacagacgccctacggaagtcgtcatagggtccccggagaaagagacgtcgccaggccaccgctctctgtgtacccaagtcctttctgtcaggtcccctctgtggcgcagaaaggtcgctgcaagccgagatggtcttcgctgtgtcgtggagagcttctgtttttttcacgtttgcgaggctctttgtgtagctgacaaatcaggcactgactcagaaaagaccgaaggggaagcgcgaaaaacaaactctaagaacaagagaacactgcgctgcactgtatgctctcacgcctggaccacgctgaagggagggtctaggcaacccagtcaccgaagtagtcccagagaagtcgtcaaatcctttcggcgtgatgggggtagaaagttacaggaccttctacagaaggcgactcttttccaacgtggacatgatgtgctcagggttctcacgcggctcgagaacgccgagacaccaaggcggctgcgaatcacaacgggggaaaggaaaatatgtgttgcatgcgtcttcgtcaactcgctcggagaaaagaaaagtctcacacgtatttgtgtgtgtttgtgtcgccggacgatgcaggctacctcgaggaaaggaccaagacacggttcttggagtccgcgtcacgcgcctgaggcttttgagcagtaaaacgcccgcaaaagccacgtttttcgggtcagacggagacaattatacgtgctatttccagcggaacgggaaaggggaaaaaggatggagggagggaactcttcacgcggttccgcttgcgtaaccttgcgaaaatgcagctgacgagttcgaagatgagctgtatgtgcatgtgcgaggactgactgcgcgtgtctcgcgagttcgtgtcagtcgccagtttgcgcgattgcgtggggatgtttatggagaaacactcgcttaacggagaaaagctcgcgttacggaacctgctgagttttggggtgagtgtgaggaaagtgaaacggcgaggaggctgtgcgaaaacggttcttgcagcctgcagctctgcctgcaacagccaacagcacaccgcttgacgtcgagaagttcctcttttttacctctgctccataacttcgtgcgcctttctttcccttcagacacacgcaacgaaggaagagaaagagctcgtctctcctgttgattcgactgacaccgtggtgtagccggttttctccgcgaaaaaccggtggaatcgacgaacggcaaacgacgcggaatcctaggagttacatggcagggtgaacttgacagttcgtccgttggtggtaatgcgaagcggaacaagaactcaagttcccgttctgggtcgtgctcttgcgagtgcgagtggcgttttctgtggaaggagaagcagatttttcgcacgctcattcagagtcggtcctaaacacaaagagcactcatcggaatgagtagttgtggcttttcggattgtccgtaaacatagaacacattccctgcaacttagagagggcagcacgtactttcagttagccttctatgtgcttcagcactgcaagttgcagggcagtgactttagacattttgcgaatctcgaatgtgaggggcgagacgccccgacggttcgaccctgagcgccattacgtcctttctgtcgtaaacaaggcagaatccaccgacacctcggcgaggcagagctgttccggatagggtggacgacgtctgattccacagaacacgagcgagttgttgaacggttgacgcctaggcagggaaactgaacttcgtgtgtctgtcgttaatacagaggggaagctatctatttatattgtacctgaacggtactttctagcatactcacagtacgacgctgctgatcatcctagcatctgaggaagtggataaagggtctgaacttcgagatcggcgtaagagtttaaacgccgaaacggacgtcagacaacaaagctgggaaacttctgtatcggtagatgacgagggtgcgttttctcgtgatgcacggcaatcagatccgcaagcgagttacgtttcggtagtcctcggattcgtggcatctctatgctctccgggacgcaggcggaaagcctggtctctgcgcttttgaagacaaaaagtcacggttccctcgcagaaaaaatgcgtaacgatattagatcctgtctgaacgactgttaccaccggttttcgaagccgaaacaacaacgttggctaacgtttctatccatttctagccgtgtgggacagcggattttgctgcagatttgattgaaagaagccttcaaagagttgtgcatttgtctgctattctctgagctgtgtaacgcgtctacatgtcgtctagaaaatattagaagtcccgcggcaattcgaaaagcctagagcaaaaccaattagataaggcacacatgtacacacagagaactccgacttctgttagattccgactccaaactttcggcttcattttctgtgaacgaaacgagtgttggatttctcggtacatgccgctttcttgaagtgcactgacagtgttaagagtgatttcatcccaaactggtactgcatgaaagacgcacgaaaaaatgcaacacatgaagcaaagccgcacactcgaagtctagcaaatggatgggtgactatttgcgtatacagtacgctattcttggttattataggtcggggtattccgcgagcacagctgaaaaaagtccgtgatttccagtttgatcgtcttccctcatagttccgatttttccttccttgttaacgcttactccctttcctctaaattcgcgaagtctctcgacaacagggtcgcttctgtcgactggatgtatctctcttttgcttggttgtctgtatctcataactgtagagtcgcagtgggtgtcctatgtactccagtgtctgtgttcactcgattgctgcgctgaaaaagggtgctctacttcttcttctaggacgctgtctgcgactcgagctttgacgacccccagggaaactctgacttattgaatacacctgtatgtattctcaactcttggttttggaattgaacgcgggacatctgcttccgaaagtctcatcttctgttcgctcatgtttcttaactgtgacgctcctctagcatgtgcgttttccggttctccccacgcgtgtgtgaaaattgaggtccgcgagcaccaagtgaaaaagtgaaatgcgcagagggacggagaaagcagcgtctgagtcaaagaaggacaacgcgggagagcaacccagaagagggagaggccgcgaaacaacgaatgcgagagagaggagaggggtgcgaactgaggtacgcatgggagggctgcccagagggcggaaacgacaaggaagaaagggggaagggcgcagaatccggtaaaagacatcagacaccggcagacagcaaagaaagggagaaacaagcgccaagtccttttgggcgcttgccagatttttgtcctcccgtgaggcgtctcgtgggtttgtgtggcgcatgcaggaaatgcagccggtgtcttttttgctcatgcttttctccctcccagtctctcgtgcttctctcccgttttatgatttttcttcgctttttttcgcaggagaaaagcgattcgtttttcgtagatcgacggtatgctcatttgaagcagccgaccgagaaaatcagtttttcgcgatttttcctgtccccctgcctctgcagctgaggacgtctccacttgttcggtttcctgttcggcgtgtgtgccttcttttccttcgattctttgctcgcagaaggcgtcgcctcttctcagaagaaacggtcgagaaagaaaacgagcaagagacggacgctgtagcgcgttctcttgccttcctccatctccgtttcgcagcacacaaagagcagcctggcgaggtccttccttcttgcggccgccggcacgcgtttctcgcatttcttgtttttcccgcctttcgttttcctccagtttttgccgtcgcctctctgtcgtgtccttccaactttgtcggaattccctgctggctgtactccacccacctttcgaaccgtgacgcgttctgcgttgaggtcgcgcgtttctgctttgtgtttgtgcgctgcttggtgagagacatttctgctgatttctgctcctcctcttgttctccgctctccttcttacttcaacgaaa

SEQ ID NO: 2115 - DNA, 3657 bp, Toxoplasma gondii
  source 1..3657: mol_type = genomic DNA
tcgttaggccgtcttccctgggcgagcatcgaggtgcaatagacggcaggagccgcggacgcccgccgggccgtaccccgctgaaggggattcaaaagggaactcgcacacacgtggctccactttgaaacccaacggggcacgaaacgcaaaagcacagagcctgcacgcagcctcgcaggtttcatattgacccgtcctcacacgttccgaaatgtgctttctatgtcggaagtatgtccgttcatgatgccgctcacctgccattgtggagggccatcgcctcatcaacaacggcgacacagtgtcttattatggatgctattgccgtaggtgcatctggggaagaccctgtcgacgacacggatggtcacctccttcgtgctgtagttcgttgcgttcgctgcctgcaataatcacgagttttctatgctgcattccgtactgcaggccactccgcagtgcgtgaaggcacggagttggcagcacctaccaatgtgtcgacgctcaacgtaactggacaagtgacaggatgataacaatgaggaccggcgtaggcacctgcccgtcccaatccccacattccgaggccgctgtcggtgccgctacccctgcttcgtatcgttgccgacaccatcgtgtggtgatgttcacttttttccatggcattcttctctctataggggatgttgccgcccccgggcatgatatcatgcagggcggacccaaagcaccactcaaatatatttggcggtgtcttgatagatctccttcatccgattcttttgcccctccaaggtgttgttcgcgtgaatcccgtcctcgcccctactggtgcagagaaatccacattgatcgaggccacgaaatgaagtccttgtggttgtccaaggcaccaaggtgatgctgccgtcttgcgtccatctgcttcattttgcgaaacatgcgccccatcgtgatgactgataaattcaatatagctgttcctcggcagtcacagaatcagcgttcccaacagtgggagatcggtgatacaagcacctcatgtagctgttccttgacacttgcagtctacagtttcggcaatgggatggtcagtgacataatggggaccactttttcgcctgacagcgaaaatgatcacacgcgtctacgcttgttggcacgaacacaccgtcgtctgccactgctgctagaatagctatcattcgcggggtcggtaaaaacggtcaagctgcaaatcccaccccttcacgaaggcgaaaatagcaaagcgcggcggctgtcaccaagtagcgacgaaatgggaaagaacacatcgtcagcgtttgggagccaagaaacacagtctctgtcacctccccgctaccatgtatgtggttcattaagggcgtctgcgtttcatacaactaaatcggacggggggtctgcttcctatccaaaacgagcttgcaattccaaccgtgtaattgtgcgttgtgtctctgttttcgcacgccgagtcgcacgtgtctgttcaggacgcttgacaccagtggtttgtcggggctgtcattatttccttgcagggatctgcatgccgactgcagtgtgatgcacttaattcgtacgctgtactaaacatggatgcttcttcttcggacgatccctctcagcggcgtctaaggcagtgcgacggacaaaatcaatacagaccgtttttcctagtgatcgtagaggcacgcacccacaacacatattcagatgagcacctttgaggctcttggacgtattcgtggatgtctcagaccagagagattccgatcaacctagaatacaagcgtgaattccagactgtcctttcttgtccagtaccaagcgccgcgtacagtacagccagcgccagccggaatcagttgctggtagagtgcatacgagacgcgaacatccttagtgctgacgttagtttccgcctggctaaaatccacgaaaacacacggcgagttgctgtttccgtggcctgcatgtgggggcttcctcctgaccgagaatgtttacttccggttagtgcagagagtctcattgctgccgggtacacaactgcatcttctgctcggtaactagcggcactccctccttatcacatgcttcgccttgtcgctgactctgttacacacgagtcataggctggggggcgggaatgctgtcggggcatagggagtctcatggcaacactgcagtagcaacgcagctggtaagagtggtagcagatgccgttagggggtagcaagctgtgaagatcaatcatggtgtctcaacagacgatggttcggcgtatggcggaacccggtcgctggggtctttgttgctgcacaaacgtggcagacactgacatacctcaggctctagttctgaccggtttcccgacaagtctgctctccagaggctcggggggctgcgtcgcaatagccgtaacgcaacaccctgagccagtgctgcgttcttgtgcgaggtccaggccaggccgcgcttacccggcggccactgcgactcgctcgaaggtgtaccggtgcaattcgctgtctgtgcagagatggcccttctctctcaagggcatttgccatcacgggaatgcgtcagagcaggacgaagggcagaattgacggctgacgacagatttacgtcgtgtacagctgagaggcaggaatcggcgtagggtgtcggagccgatgaggagtggcatctatttctccctgtagggacattggcttgagttcaaggcattcaatgcgcgatcttcaggggcattaatcgactcggacgatgtacgcagtatcataattaatcctctaaaatgtacttattcatgagggaggcactgcggcgtagaactggccactaatggttagccgtacattccagaaacacgaacttctcttccagacaatcccaacggttctagctgacgagttcgggggagatgattacaacaaggacggtaacggctacggaacggcggctgaagtgcaactgtttgagtaagagtaggcaccaagacaccaagaaatatgactccagttatgaacatcactagtcgcagcctttgagtcgaaggaggtgttgctgcgatcccgaagcgctggtgacaaaacgtaaatttcttggtttctctcatggtacaacgcactgctgtcatcaagtgcgtgtgtgtgttttcgtgtgtgacgcgtgatttagctatttaatgaatataatggagtcaacgttacaatttctggtccaatatacctctatagagtgtcggtctctcgtgtcctactcttccatagatctgctgcaagatgctcaccagggtcttcccctcaactcgagtcgcccgcacgtttcccggctctgttccggccgggtgtcgaggcccgcaccatggcagccgttttctgaagtacgggacaatgctgtcctgcgacagtcttgaattgctacacactttttacactacgtgtcggcacgttcaccttccaaaccatggccactgtgggagaaacttttacgtgtttcaaggagcgtaagcgaccgtgggagcagctcgtcaacccgtcgaaaaaattgcttttcgcgaaaaaatcgtgcctgctcgtgaagctgcctatttcgatgtacctgcggttcaactgcgca

SEQ ID NO: 2116 - DNA, 3193 bp, Toxoplasma gondii
  source 1..3193: mol_type = genomic DNA
tgaacaactgcatattcacttagtgtggtatatccaaaacagcctttacaagcagaggaccctgtctcttgctcagcgactgtcccggggagacgacctccgccacgaggattccctgacagtggcgttgtttgccggagaaaaagcacccctgacaatagtcacaaaatcacttcactgttcgtggcaaaaatctgacaaggcacgtgctcccaccaggaatcacagccgcaacttcaggatacctgtacacaagtgatattgcgacctggaacaagacaacactaacggcccagacaccatgcagatgtagatctctttctggctcaaatcgagaatcctgttgagacacaaccgagatccctgaaatggggtcctcacccaaagaagagaaaaatgctcgccgcactcgagcaaagccggacagaaagggttacgcctcgcacatgtaccgataaacgtgtgcgtgaacatgcatacttgcaacacatgcggtacgcactcccgggttcgggcaaacactcgcattaacacttcttcaaatgtaccaccggggtttccttcagacgggcctagtcaaaaagtggatcccgtcgcggggttctcgagaggcacagcgttaacgaacaaaaagtgcctcccccctacgcgtggccagtcacatgcacgggaattttttccgcaccatcttccacggggttcgatgaagccatacattcaacggtacgtgactgctcgttgacggagacaagcattgacctgcatggcagggatgcagaacatcaacatcgaaacaatgggctgagcggccgttgtgcgaacaaacaaagcacgaaaccacagatttcagcgcactcggggtcacactgaaacctaacgcgtttaaagtgaagatgaactgcctgccagagctcttgctgccaccggcggaaaaaatcgtgaggaagatgtaatttgttgggactgtcgtctgcagccgcaccgttgagtgagaacagcttgactttagtcgtccaacggcaaccgggggacgcaaagagaaacggaaatcagagaaagacggaatatttaacggtgacgcacgccggggagcaggagagcgaccccgaacacattgacgtggtttcggaacgaataaaggaacatcagttgcatggcatacacatacttgctggaaagtggattggcagctcttcataggagcaaaagacggaactcccagcgacgaaaccggaataaggccgtccccactgcgcttccactttttccccaggcgaagttaccttgtgactgcgcgcggggcggggggctcttttttgggtggcgcagtggaggccgccgtctcgcgggtcgtcgtaccaagccaattcaaagactgaaaagggaatccgttcactgaaaaagactgaaaaacgaataaaggagacggactaaagactgagcggtgtagggaaacggaagctcttcaagtcgccttccgtcggagaactactttaacgcacgagagacgggtaattccacgcgatcacgtcttctgctcagacatccagcactaccttgccaccgcgcccgagaaccacgtgaagagaaaaaaagaaagtcgtggcatgcggcattgcacacgccacacgcagatgcaacagaaccgcgctcaaaatggggacgaccacttcaacgccggcggcaaaatcgataaaggccctgagcgtcagccattcccgcccaacaggcgacagggaataccgggagcaccggtggatggcgcctgagagaaaagctcacagaaagcaggtttttttcgcaatgcaaaacggccaagggtgctacatggcaagtgacacctatgctgccgtcaacaagcagctgcattggcaaacaggcgttgaaaaggcacgctagtcgcacgacacacacgcaggtacggcctgatgtccgcaacggcacacacactgggcgaaactataaagatgaacccaggttctcgctccccccttgcgcttacggcaatgcacgacttggtgtatgcacggctttctccatggaacggtgctttctgttttggtaaggaaaatggagaaatgcccactagagaaggactctttcagtttcctaacagaccattggtgacagaccaaccgagaggaagacgcgcttcaagtgttcgctctcgagtccggcgcgcccgcgctaacgcaacccatggacgtttcacaattacgcatgctgcaacaggtaggtgggtgccttccgacccaatcgagcacctgagttccgaaaatgtagttgcgtaacctacccgctgggattttgtagaacgcggaagggttattgaggtcacgtttaggattgtttactgttctgagacgtgtaccggttcgtgcttgtggctgttccatacagcgggaatccgcttgttgctggtctgtgctagcccacggcgaattttttgcctggcgagctgctcgcagcgtcatccgtcccaatcaagagaatcgtgatgaagtccgacaaacggaagccgtttcttttttgtggacgaaccatgtgctgatcttgtggaaatttgctttcgcaaaagagaagccctgctgaagtgcctgcggtcgaagagcacattccagctcctctaccaaatcgcgtttcccactgatgacttgcagccgactgtttcgcgtcgattgattaaagtacattctaattgctggaacgcccagttttctttctcacgtgcaagaggccgccgattgttgtgacgacgaggagacgcgtcaaagcatgcaactgaccagtgcggacccgatcgttttcttggatctgacgtgataagaacagaatatttcgttgtaaacttttgtaaccgtgcgcccggcgcatgctcttcacgatatcgtatactgcttgatcaggtggggagtggacaaccttagaaaccagtgatttttttacgcagtttcttgcgaatctcatttcttgcacacccgttcctcccctgctttgggtagccgtctcgggcaagcctactggggtcgcgcctgcgctgaacgtttttgggcaacattattggtgtgattgtccctgtctcagtccgtagtaacgtcatcagtaaacaaaacgcaaaagaaagaacttgggttattcgaagcccccaacccggccaactgaagtgacgttttctccgctttctgctgcaaaa

SEQ ID NO: 2117 - DNA, 2790 bp, Toxoplasma gondii
  source 1..2790: mol_type = genomic DNA
atccttgtgtgtgcatgaggcgcgaccttgctagggaaggtttcaaagcggctaaaccgcgagaaagaaacgcgcgcttgcggggacttcatggagattttcggatttttcgaagaacctgtttgagtgtctgttcccgggagtatccaaacgagacagttgccttccaaagtttgtccacttctctcgacaggtcgtttgcatgttttccgcgcagacagcccttcagtcaacaaatatatgtatatgtatacatgcatatatgtagaagtatataatctgcacacagcatgcatgcttcacaggtgaactacatgtgcgtaaggagtttttcacaaggtcggaaccggtcgttttttcgagtaggtgtgtgcctctacacgatccttttggtgcatatgtgtgacgctgcgcgtgcgactcgggtgaaattgagaagcgacacacgagggaaatggatgtttacgccactacagtaatgcagcgtttcgacttgctccgtgttcgtttcgaatgaactgggagtttgagagaatttcgcctctctttgatgcacacatcgtacggacaccgtgttgcacaagaggcgttctgtgggtgccgcaaccagagctgcgtcgcccgggacgactcacgcacctgtcacagcctctgcatgcgctcgccttccaacggagtgatgcagatgcagttgccacagaaactcagtcgattggacgggggcgtttattgtgctccaggatggaaaacacaccggtgagcaacacggccgtcgcacagagatcaagctaccgcagagcatccttcggggtgcttgctacctgtacccgctgagcaacagaactcggtttttccattcggcaacattcaaaagggctgcgacgctggaaaattcctaggaacagcacatcgtggcactcgaagctgcaggcactgtgacgttttcggcgaagcatgctccatttcgtcagacagcgaagatggaacgcggcttgtttccaggaaggtttatttttctacggctgtttcgcgctgcaagactcaacagtgcgtctcacacgagtaacgaacgcagatatgacacggcagctgagcagagttgtcacctctgtttctgatgtcacacgaatgagacgggtgtgtgttttggtgtacagcaagctcgatacatgtgtgtagtccatcgaaaaactgatatggtctgggattagcgggcaacctctgttcccccaacttggggtccgtttcgccgacacccttcctgggtttcaacaagagacctgaggccctctgtggtggttgggttgacttgcggtcttgctttgcgcgttacacgctgcgcccgtgtttctggctgatggtatcgagacagtgccttatactatgaaggaaagtgtgtttatttcgcagtacaattttcgtgaagtccgctgctcgcgtagtgctcgagtactcaggtagctcaggacttggcagctgcgcaaaaggacatccgaaaccccgagaaagcgccgtttttcgcacctcgaaatgaggctgcgtgtctgccctttggcttccctagcacagccagccagccttgtgtccggcgctcttcagctgcggagacgaagaacaggcttcgactcggcttgcgaaccaacgaaaaactaggaatagtcgcatacggcgtcaaaaatgcaacaccggaaacggcactctgcgcacgacgctttggaacgtctggctcgggtttctggctggctgtataataagagaccgcgtgtggcgcgaggaattttattcacgaggaaacgtaggaaagtctcgcttcctcatttgcgctgttttacgccaccattcatcctgtgaggcagaacgggacattttgctcccgaaaaggtcaacgcctcttgacggaaaagggatttttgtgtctcgcttcctgtggcattgctggcttgtggctgcatctcgggcattctgcccgctgtgggtggacgggcaatccccgtgctgcgcgctttgtcttgcacggaacacagctttgagagacttttcgccgagaaatcaagacgtccgcggttgtctttctcggaggacggagccctcactgcacaggacgtctctcgatcgcagatgtctccctcttcttcactgtgaactttcgaggaatctccgcgttcatgcgacgtcatgcacatacatcttgctgcacggctcactacagaggcctctccgggtcggtacgcgtggaccgcgtcgtttttccctgctcatctgcaaagcatttctgctcgaactggaaattgagttcgcaagggaagcttggttttttcttgtttgtcgagcgaaaacattggctgcttccgctgaaggattcgcagccggcatctcttcggccgacgtcgaacgggggtgaatctgctcgcccttggcggcaagcatgtagtgagagatgcatcttcaaacacatcctggttcaatttcatcttttttcagggtgtcagacgccttttcctctgcgattcacgtagcatgcgcaagatgtgcaaggagtgcgcggcgcagaaaagcgacttccggctctagccagggagggggactcacgcattaaagctgtttgttgagtccgagctgccgcacacacttggttttatctctagtaaatgtcacacttcgaggtttgaaacgcgtgccgacctctggaactcgattctgtgtagcctcaaccctcgaggctcttctctgctctgtgtgttccctccctttcttcaatctcttaaccgtccccagcacatcgctttcaaa

SEQ ID NO: 2118 - DNA, 4233 bp, Toxoplasma gondii
  source 1..4233: mol_type = genomic DNA
cagccgaacgagtgttcggcagacgtagctgatcgctcagaatcagttgcaattcgcataagttcaaacatttcgccgagcggaactctgaaaagggcagacgaaaaaggaaaagaggaaacagttacatacgcctgcaacgcagtgtgaaacgctccatgctccgcggtttgtcaagatggcttcaacatctggaccaggagctcatcgcattgttcataccccccagaagaagaggatgaatcctcctgcctagcggcatgacgacgacctctgaacttgatgatgggatgtggaatccaaataaaaatactctgcaggttgggacaacgaccaccccgagcgaaacgaaaggagaacagtggaaatgataagacatgaaacatttctaattttccgcactcccacctgaccttgacgagtctgttcattcgagccgaatccggagagaggcagagacacaacatacagcccagcactaaagacaaaaggacactgcaaacgatcccctcgcacaagggacggcagtaatgtctgtgacactcggtacaggcggaccacacccgctttctcggcagtttctgcgagggaaaagtgccacgtaccggggcctagtcccatgaattgtgggtcgagtttgcgctccatggagatggagaatgaagagaaataaaatagggattcgaagaaaacgttgagggggacacgatggctctgcactacttgggtagagtgtagagtcgtgctgcttatgctcgaggcccttgagtgcctagaaaattgtctccagggcgtggtcgacacggaaaacgaaagaaacggtaaatgtcgaaaacgaacggattagacagaatgcagaacaagaccaggttcgatcgaaacctccctttcctaggggcttggagggaccgcagcttgcatgcgcaagaggttacaagaagacaaaccctagctgccagtcttttctgcacgccgagacatgtctacaaaggggggaaaattagaagatatatctaattagaaggaaagggcttgaaatcaaaattaagccgcctgaaacgagatcacaccaacggccaaacaccgaaacctctcgttacgtaggccacaggatgccccatgtactgccatgcaagaatatggaacgtggcagatggtagaactggaaaggccagtacagtttcggtttttctttgctgacaatgcagtgattttggctagggatactcgacgggtggaaaacgagtatattctttggcaaccgctgttgtcgatgcctctctcgtccgcacaatgcatgcggctgacgcaaatgcaagcagccctgccgctgttggccttcccccttagcaaaccatgcactccacgttgcaaatcagcacagctgccgaacttgttaaaatcaagaacaagagggtataggggaattatgggggcgagactgtagcgtggaggggcgcacgaggaatcatgtgttttttgaaagtagaaaccatctagcgtaactacgaacaagcgagagaaaacaaccttgtgttcagtcgacgtttttggtctgctgataagaaaagccaaacgcagaatgacagccgcccagtagccgttgatttcgtttattcggatcgagagatactgttcactttagcacaatgaactcactgatcgtgtgcttctttttgccttaacggtttcggcgatgaactgacgtgtacgaagccggccttggggctcaggcaagtaaacgttctcgtttcagtgctgtgaggtcaaccacaccgaaacgccactcaacgacgccatcgtagcggtctcctaagacggtgggaagacaccgcagcaagaagggtggaaaagactgggcaatgtcagagatttcctgacgccccgtttttcgatttcccgagcaagcaagagcgcgccgcaatgtcttgcgcggcagacttgccctttcacaaagatttggggcactgcttgacaaggcttaggaccgagcgttaggtacgctccaagggtaacaaattgtttaccgttaccaatcatagtaacagcgaaagaaacaactactcaggtgctagtataatcattacggtcgtagtgggagtaatacttggtgagagagctttttctggggagtttcaaacgacgagttgggctactggccgaaatcctgaagaccgttgtttaccagatcgaggctgtattgtgttagctacataaccctgaagattcgccggctcatcagcttgcttgacaagacacgcatataggcttcacagaggaaaaagaggcgttaccatacgcgttctaaagctgctctgtcagactggccacgccctctgaaaaggcctcactacaagctcacaccgaccacagtaatcttttattcgaagcggcatgttcccactttagaaactgctttggccgcaactctattaagactgtctcgattgagaaacggcaaggttctcttgagatagtttgcttgttggagatcttgtcgacagcgtccagagaatatcgtgctgcggccgccagagttcatgcttctccattactcgtaatcgccccaaagtaactttccgggacgtcgcgccgcaattgtttcctttgtttggatgtcatactgtcatgagtccggaacagagcatatttcaccagatgaaatgcggcatgtgaacatagacaatgcttttctgtcttttcactacggcgtcgccgctgatttacgccccgtccacgaaaccgctgaaacatccccctcgctttagtatcgctcttgctgtttcgtactttccctttcgcacatttttaaagttgtgtgacttccgctgtcgatttttactggccatcgatgtgcgagagttcaatctgacggggggttgtgttgcggaagcccctaagagcgccttgcgacaggccacgtaactcaaccagtgatccctttctgtcgccgacaggaggaaacatgcgttcagaaaacgagggaaacagaccctttaggtgaccttctttttcggggtgttggtgatgacacggtgctaatgtagctttctcgattgttctggaagccccaagccccaagaatgacccgagctggcagggcctgccaggcgtcgagacacagggagtcccgtagcttctttatatgaagacgaccaggaagaggctgtttctaagctgcacgaagagttgccgttatacatgccatagacgcgtgacaactccaatcacgtattctttgtatttccaatgcgcttcgaaaggacaggctgcaagaagggggggtgggggaggggggatgcactgacagtcacgtaacgacaggaggtacataactctgtttgccctttcggtggttgcagagatctgaccgttaaaaggatgagaaaacttctagacggcacaccgatggcacaggaacagtgtgaagggggattgatccgcagggagtaggcgtcgccccgtcgtgagaaagtataccatctagggtctctaccccgggcaagacagccgctaaccggagcatctttacgccgccttactgggcgcacgtacgcattcggcagatttttgttgttctcgaaggtggggaaagaagaggctttttctcagtttgatctcggaaagaaacgacactgaggaatgcagtaaggagagttctcgtgtctccgccaggacgagacgcctgccttctcccgatgcggacggggagcctcggagagactgggcagatgcaaggtccgattttagagaactgcgagtttgtctgaatgcattttgcctttttttgtgttgtacgttcgtatctatgacggctgttttcagcgcgaaaaactgcggaacatttttcgatctgtagccaactcctacaactgttttcccctccagcccggcggcatcttttggcactctttgctggtcgcggcggttatcaacttggatacgattttctcttgtctcggatacgcagccgctgccatcccacctttcctttcgttacattttctactgcatttccgttttcctgatgtttcttccacaacgcccacttgcgcaggagatgtgacccttccggtcgggaagcggcgctggtaggagtgacgatgcgtcgcggcagggagtgttttttctaggtctattcgcagcgctcttcgctgcatactcgcgcgcgtctcttcagttgtatgaactcttcagcgacaagcatggaggacgaaacaaccggagaaggca

SEQ ID NO: 2119 - DNA, 1841 bp, Toxoplasma gondii
  source 1..1841: mol_type = genomic DNA
atacgctaacacagagtaatacgtgaccagataaacagaggtggtctgagaatttgccatacgcgtgtacgcaaacgcaaacgagcccgcggacaggaatgaaaccactgacaggaaacgtggaaaacgcgactagcttacactgaagatgcgccgtttttctaccaccatctatgcgaaagtggccctggtttgtcctaagacggaagctagatcgcggatacatagcaacaaaagggacgaagctgcggtaacgtttcgtgatcatgaaattgcctgtacctgctgcaagctcggaggcgaaacactcttgaatgatgcgatcgaccgtccacgtagggtcaatctgcgcatctgagaaattgcaacggcggaaatggaccgaaaagaattagggacaccaccaaatcccctttggaagcactgggtcagtgataggaacatcatgcgccaaggtgatatatccgcttcctccggttctagctgctgtctttccgtggccgcgtgtagattgccgtctggctgaattcagaattctcacaaaagaataggctcgttttctcttctcacctttgatggtaggcagattgcccgtcctgttcacaatgaatcgaatgacctgcgacggaccggtcgccatcatcgacattcctgttcacctgacaacgcgaatcatggcgactggcggaggattcctgctgctgaaatgacactgccgctaaaaactggtagtcactgtcttcttggtgccttccgacattcgtctccctagcggacaaggctccgccacaaaaaatcaccaccaaaaccgtcagacaagggacactcctcacgcttatattgctttcggtcacattaaacgtccgccgcctcgaatagcgaaagcactgcggttaccaggcttgctgttaccattctttactgaaaaaaatgcgcttctcggttcgaaaaggtaaccaggaggggtctgcactgccacatgaagaccagcacaggtgtcccgcctgtacaccagagcgcccagaccggcagacacacgtaggatgctttgttgtctttcctcgatatcgcttttctactgaatgacacaaaactcctagaattgaggaacttggtatcacacacgtcatcgcaacgatttttgtgcggcacggtgtccggaaccacactggctcaagtcaaggcccctacgaagctaccaccatgcagacgttggtccccttccttgcaacttcactctttgagcaaatacataaactaggtttctttgaatggtgcaggacggaagccatagttaagagcagctgccgcgaaagtacgaagaggtggcgactcgacagcgaacgcttgcatgcagtcgatgtctgcacgtcaaaccggctgaggctagtcagatggaagccgtcctacgtactgcactcgacatacgattctgcggccgcctcggtatacttcgtcaccccccacctcacagtcccatcgaagaagacgtgtaccccgacttaacagatcccaaaaaggccttcaacatgagtcctcttggtcctgttattggttttataagaatatggtctatgccatgctgaggtgaacccgccgcttgtaggcgcgtgacgtatcgcgggcgacgcggctaaaggtgagctcgatgaacggcggcctgattccatcgtgacatcagcgacgactgcaccgactcacacaccagtgagccacagcctgaagtttcacattccgttcggtacctgacggttgaaacgcgtaattgtgtctactgcttccggcttttccacatgttttgtagttgtagactgtcccctattttctttttacatcagcca

SEQ ID NO: 2120 - DNA, 2731 bp, Toxoplasma gondii
  source 1..2731: mol_type = genomic DNA
cagcttagccttcatttctctgcgtttcttcagaggcacatactcctcggcgtctgcagcttcttctagaaggcgcagagtctcctgcagttcttcgtctctctcctgtcgcctccgcgaggaccgcggcgcgccagaggcctcgccgctctcagacggcgacggcgacgaagcgcgcagcacgggtgccattggagcaacggaggaccgagaacggggaggaaaacgaggggaaacgagagaaaagaacgacgagaacggagaaagataagaaaggcgggagagggagaaggagtggagaggaaaggggactcgaaaaggaagacaaggacaagaagaaagacgcagggcgaagaagagacgagaggcggggactcaaagaggcgacgcgtccccaccgagcgcgatcagttgcggtggaaaggcagcggcgatgaagctgctgctacacaggttgcagacgaaactctcggattaacgcgaagttgtttcggaccacaaaaaacgatgcgatctcttgggttcgccgtcttcgtcgctctgtctctcctctcttgttgtgcgctcgttacgatcgacaacttgcacatttctaccccgtctccgtactgtcttctgctttgtctgcgaagtgcacgccgcgagcgcgatccctcgtttacggcatgtctggggtctctccagatccaagttgtcttgcgtcttcaccagtctgtctcctttaccctgcttgtcggtctccgttctcgcctgtcgttcgtcgccgaagtcgcgctgcagaagggcgggcgagaggagagaagaagacttggaggaagagaacggagagaaccgacaagagagaggagactgcgagaagacgactcgagaacagtggcaccgaagacgcagacgggagagaagaacggtggaggaaaggtgcaggaagagagggtgagcagcagcatgtgcgagaagaaggcgaatacactggaaagatggagaaatgtgcaggaggaaggaagaagaaagaagcaaaggagaagaacggagagagacgcagccaggcctgagcgggacgacaggaaggagcagggagaccggaaagagaagaagagagaggagagcggaagaaacaagagcggcgcgacgaagagagcttaggagatcgaaggacctcgacagacgttggagggaaccacacagaaaacgatttcgtacgctgtcgggagagaaaagcgaggagcagccacgcagcgaccgggagaggggggacgcgttgactcgcaaaaagcctcagagaagctcacaagtgcctgatccatcagtgccaagacagaccgtttcaaaggcgacgttcgagtcgccgaaaaagcacaagaaaaacgttctgaaagactcccgccagaaagcatgcttttaccagacacaggacttcgggcaaacctgcccgttctcctcggctacggagaaacagaaaggagaaaaagtcagagagtatggaagaagaaacccaggagactctaggaagtgacgcaactgaaggagaagaaaaaaatgaggaaaggccacagtgaatctcgcgaaccccatgctccggttttgtagagttgcttcgaggtccgttggtgacactacagagaagcctggaaagagtcacgagctcgtttatggagacaaccccctcggaaaacaaattttaatctctgtatctcacgcgcgatttcctctcttgtgtgctagtgtctgcgtgtacttctctagcttcttgccgcggaaaacgtgacccgaaatcgactgtcgatgctgctcgggcacgttgaccgaatataagccgagccgcactctggagggtcgcgagcgagcgcgagggggttccgggaaaaagacgcggcgcggcaatcgagcgtgtcttctggctggccagcgcgaggcacttgcgtttctgtggtcgcagagaaagcggggaagagaggcgttttctcgagcgagaataaggaagagtgacaagacatagcgaaagagggggagaagcgcggcgtccaggtgtatgtacagcgtgtgaaagggagcgcgcgagagactgagagagaggcagcacgagatccgacagaaaaacgagctgggaggtctctccagcctagagcggaagctgcaaatggattcctctctctctgctttttctcttctatttccagatgtgtgatgagtccacgagaggctgaagaaggcgagaagacgagcgcgcggtgacggagaggactgcgagaaatggagttataaaacctcgtcttcctcgccctccaagccgcacgcactcatgttcctctcctcgtcctctttctcctctttttctttcttctcctcctcttttttctcctctttcttcttctgttcctgagcctttatcttggtgtcttagagtgttgccacatgcgttctgtctcgtggttttgcttcacggactgtctttcacctgcctcgcattctctcctcccttcgtggtctcttctgtgctttcttctttctttcggtctttctctctcctccctcttctatcttgtcatcccttctttgctcgtcttccgccactctcttgtcttttgtctcttctcttcttacccttctctcgctgtgtctctcttttcttatccgttttcctctttcggtaccctgtctctcccgcctctttcggtgctttcctcttcccttacttagctgtttttcgtggatttccttttatttctcgcga

SEQ ID NO: 2121 - DNA, 4054 bp, Toxoplasma gondii
  source 1..4054: mol_type = genomic DNA
tagcttcaactgtccgtacgctgcgtccggccgttgtgatgtttcaggaggtcgttgcggtgtctctacagcttctcgcgtcgcatctgtcgcctctgtaccacatctatacgccttcttcttctctgggtgacgccgccgcttcgctgctccgtgaaacggatagcttctcacccgtctctggaccacccccgcccctcggctgtccgtacttttgcgtattgatgctgtgccgagaacagatgctgccgctggacgtcgaccaaggcgccctcacagagtggtttcctcacagccagatgggccggcacctgctggggatcgtcgcggcgccgatgagctggccagacgaccgcctcctcttcctcacatcgcaccttgagtcgatcaaggagtaccgagaggagcgcgtccgccagttccgccgctgcatgcaagtcgtcacgcgcagcttcgcccacgtcagcgaagaggaaacaaaccagtcagcttcggaagcggggcagcagagaaacggtgaaaccggggagagagtggagacacgggagacaagggagacagaggaaagagagggtgtaggggagatggcggagtggaagcccgcgtttgcggcggtctttggaggcgataccaatctccgggactccgagttggtgcaggacggcgcctcggggtgcggggggaaggcggagaagttttctgggaggccgcagaagacaccgaacgaagagaagaggcggccgcgcttggcaaacgagagtggaggaggggagaccgaatcggtgtcgatcatcccccgcagcgtccgagacgtttgggaagttctgggcagacctgacgagtgtaggtacacctgggacatgctgcgaaacgacaacaaacaaatgaagtggcgcccgaggcttcgcttcgaccggctgtactggtggagcccgagagcgagttcgtcctcttcgccttcgagtgggccggctcccggaacgatcgccaaggctgacaagactgggagggctggcgagacggaaatgccagctctcacaaaagactccgagagccgctcttcttctgcttcacttcagcgtggacgagaaaaaaaagacgagtcgcttctctccactggcgcaccagggacccagacacctatgacctggattcctcagtctctgcggctcgtgggcgtcaaccgcctgccgacgtgtggccgcttcccaagcgaccactttggtcttctcgcgcgattcaagcgcgggccgatcgcagagcacagtgagcactgagtttggagaaatttgtactgatgtgtatgcaagtttcgagaaacaagacggtgacacgttgcccatcttcacgcatgctgagacgccgggtgtagggacaccgggtgagcacttcaaaactcagggagcgagaggcacgagcggctgcggtcgccctcgttttcatttctcgatggtagctacggtgatggggactgcgaggtcgccagaaggcagaggaaccggatggttttctgtgatacctgtttttgtggcgagtccgaaagaggcgaatcacggacggcgaaactgacacgagttctctagcacgcgagtgttggcagatgagtgactggctttcattctcaattactggatgtcgagggaacacatatgatggcagagagggaagagaatgatgcagcacgacaaaagagcggcatgaacgccgtgctgggacgcgcagctcgccaatggccaggtgttgactatgcagtgcgttccgctgtacagaacagtcgcatggtttttgttcacgaaaaaagggaaatataagctatcgatctaagttagagaaacaacgaaagttccgtcgcctttcgcccagcttcccacgcgttaatacggacggaaagaccttagtgagattgtctgagtggagtcgacggagccgtgggctgagacacacacagtatttctgccacgtttcggcggaacaacggacacgaaatcggtgcaggaaagaggggggataaggcacagatgacaacaacagtagcaagagaggtatcaaacaacgcggcgacatgcgtgttgtacttgccacacacccatcctggggggtggatagccgtcatttcgtgtacacgtgagggaactcggacgtgcgtcagaaagctaagaaattacagaggtcggaactctctagaaagagaactagtgttacccggtcgattggcgcgggcgacagaccgactcgaggaatgcagctggctgaaaacagtgcagtgggaacctgttgacagtgaggtccggagcggacaaactgcatgggcccctccagccaatctgtcactcacggcgaccgatccggtctcaactgtttgtcaccggaatactctacagctgccacttccttaccctctggaaggggttgaagctttttcgcactgaaacgcgagagacacgaatgagctgcacttttcctgcattcgctggccctgtaccggccgcagtctctacttcgtacaccttcactgtactcacacccgaaaacttcagaagtcgggctttgctgcaggcgactcagggcagaggagaaggtgaacatgccttccccaattttgcccgcagtttgcctcgggttgctctcttccccaacctagatgaaatgaaaccactcgatcagccatgtatttcccgcaaaaggttggctaccaagcccacatttggtaagcactctggaagatgcggcgccacggaagcaaccctcgaccgcaccgctgtcgcggggtctcgacgtcgtccgcgttaacacgatgtcccgccagagcttccactgttctgacgagtacatggatgcaataagcaagtcgtctccactcgtacacgaatgtccagcaccagcaagctgcatcacttcaatcgcttggtagcccaacgcttcttttgtctgctttctgtttttgctgcgagactgaccgagcacgaagcttacacgaaacgcgaagctctaatggcctacatcccactccttcttcagaaatggcagggaagctacactcttgttaacgtctctaggtttaaagggtttgtgcaccgagccgatcacgttacggacacgggctcggggttcactacgttacaaggaataaacaactaacgcacaatcctggttacattcgggcccacagcatataacccctccggaggcttgtattccagctatcgaaaaaaaagcaattcgatgtaatttcctccaacagccccgagcgcatgtcatctacaagtggcagccttggtagggacccctcttgggtatgcccggacagatgcgccagtgagatctttaacctccgcgtaaagataggtgtctgctgtagcggtgcgcttttttgtgttgcatgcatgcatcaagctggccgggacaaggcggttgccccgatggatggatggcaaaaccactgtgctgcaggcagcagccctccctcggaggctcctcttgtggggcacggcgcatgccccagcacaacgtagcggccttgtccagcatggacgaaaagcagtgggggagactcccagaggaaagcgttgccatgcaaaggggaaacaggggatttttgtcacgacgagctgtttgtccacttttgtgaggtggtaatttgacacagttctcatccctgttttgtccaagatggcgtcgaccggcaacgtaaggggattctccgcactgcattgctctcttgagggagaaaaggccgccgtgaaaacatgctgttctccaccagttggcagattgaagcagtctacgggaagatgcacggtttaatcattgttgaatttcgtctgcagtctgacgcttccgtattggagcacgcgatgtctcgttgcgtgtgaaatcgtactgtctggatctctttgagtgaagaacacgcggcaggccgcagtttttttgcagggccttggtaccaaatgcttgtttacatatttgccttgtcgagttcttttgcatgcttttagatatgcgtggagactgttaaatcaacaaccgctcggagatattgtgcgcggcccagcaa

SEQ ID NO: 2122 - DNA, 923 bp, Toxoplasma gondii
  source 1..923: mol_type = genomic DNA
ttcttgtcgctgtgggcggaacgacttccagacgaactgcttcacgcatgcgctgaagcggttctccacgcggccgccgccatgtcgatgcagcaggcggatctgttcctcgagtttacagaggacgcaaaacgcgaaggagacgcgcgccttgtccgagtcggaagctccggagctctgctcgcgctggcgcccctgggagctgtgcgtggttggtccgcgcgcgtcctcctcgcgggcattgcggctctcctgctcgaaggcggccctcgcttgcgtctgttttgtctcggactgggcgtcgtccagtcttcggagtctggcggccgcgcgacgcgcctgcgcgacagggcagacgcgcgagtgacgcccctcgatcaggtgctcggcgaagcctggggtgtacgcgagagcctgaagcaccgagttcatgaagcacaaagagcttgggttccgcagacctgcgccggcttgccgcgcttgcgtccagaagggtggcgggagggcctcgcgcgggaagagccactgggagaccggcagcgtcggtggacgcggaacggcttggcggagcgcgccccccgcgacgaggttcgcagccgagggcacaaagttgatttttctctcggctaaagccacgacgacggcgtccgaggttgtctgcgctgtccgcgtccctttgcgcgcagaaggcgcagcgcagactctcgacgcaagctccggaggcggctccctagcctcccgccccgatacggcgacggccaccatcctagagctggacgaagggagcagaaggagaagggagaaagctggaggagacctagaggagacctagaggagacagggcaggagaggggagagacagagagacggcctggaagcggggaagggagaatcatgcagttacacacaaatacagacgtaga

SEQ ID NO: 2123 - DNA, 2389 bp, Toxoplasma gondii
  source 1..2389: mol_type = genomic DNA
gcgttttctacttggtttttcgttcctggcgtgctctttagagctgtgtgttcgtccgctttcaattggggtccactgtagctctgccgtggcgtcttttgttcgttcgttccttgtgtcgttgtgcttgtcgtcttggagaggaacgccgcgttgtcgcctcgcttgaggtttttacggacgtcacacagtccgagtaggaccggtgagactctggaagagtcgagtgtcactcgaacacactgctcgtcgcgcagccaacggacgccacaatgaagaccgagaatcaacctagaggcacagatgtgcataattaacacttggatggcttgtccgtactttgattcctcagttcaggtgaagaggtcctctgtatacaagttgtaccgttacgaaaagtcgcttgttaaaggcgcgcccgacgccagcactcagcttcagttagttctacacttcgctcgcatctgcggccagcccaggaaaagcggtagacagacacgggaaatggagcatgaaatggtgaggaaggtggcgggggggagaaccgagaaagagcgaagggacgcgattttcaggagagaaggaactcgattaaagagaaccgttttctgtctgaaggaaacacctttgtgaggagagaacgctccccgcatcatggcacacgtgcaaggcgatcgaaattctcaagggaggactctcctgttcacatgtgacatgcacaacgtctgttgcttctgtttcgagggggatttccgctaactacggcaaaggtgaaagtggccatcctcgaggcatcggtttttcggtggatatgagagcaagaatcaccggatttcaatccgactaacggagccgtttttaacgggtgtgcccgaagaattacgggggagtcgaatttgtttttcccagtttggccgcagaaaactgagacgcaaggtctggctctttcggcggcactgtacacttcaccgattcttacctgaatagaggctagcccgcaaaagtctgtttacggccaaggaaagccacgaaactacaagcggtctgcggagtctcggatgtgcccatacagttcgtttaccatcgcttcaaagcaaaaacccagtcttgttgctcaacaagggaaatctgcacgagcacttgatacgaacgactagagttggaagctcccgacgtaggagaaattgattcgacttgcagtgctggaccgatcctcgtatggcagccacatgatggggtgttgcttaggcatgcgtgagggacataacggaaccgggagaatcgcgcgaagccttcaatcagcagaaaacgagccgcctcgcctttgccaacctgtctgcttctccctgtttttcacactggagcaacgatcaaaagctcttctcgctttccagtgttaacttacagaaggcttacttgcccaggcaccggtgtcggtggtaggtagaccgtcgtctttgtttttgtacatgccagtttattggttcttctctcgtttttttatcccacaaactgtcgccatgccagccgatgactgagaggggaacctccgggagcaaagaacgctcagacatgcctgcaggctttttgtttcttcccctgatgcggtgtgtctactttgcctccacgtaagttctgattagaggcgcccgcggatgtgtgtgtgttcctttgtcgacaccgacggttttgcccgcagaatcagtaccggagcctatatcgtacacaagatctccttgtgggccagtccgcacactaaaagacagtgactgtgtgtgggagaccttcacgcgttcccagtttggatcccgtagcaggtttcgcaagccggactgtgtttacagcgcccgtaagaataacatcctattggtcacgcatgtgtgtcatactcgagagaaacgcagtagagtgaaatccggatgtggttcgcgctgctcataagagcatgcggtagctcaactgttccgcgtgggtctctgttagtactgccaccgcgactaaactttcgcaaacaaccggacaatgcattcagtagctaagggaagccggcgttagccttgccgatggcagtgtttttccgagtgacgctgcaagtgtacgtttcaaacagcagtagttcatcccggtatgtttagtggaaaactgctcgtttttttcaagtcagatcctcgaagagtggtcgactcaacgtgtctctgaaacctagtgagtgatagctaacagtctcagttggcgggaatcggttttcaagggtcgggtcgagagaactcatttttctggcattagtgccccgagagttatttagttatttacatcgatagttgtgtagctgtaagtcgttctcttacctcgactgtgtagttttatcggctgcgaaaaaaattcagta

SEQ ID NO: 2124 - DNA, 1834 bp, Toxoplasma gondii
  source 1..1834: mol_type = genomic DNA
tctcagattcaagttcttcgtatgatgagataacagagttgcacggtaggcaccatgcagttgatcgtgaagaggcctgaaaaagaaaagcgggacgctacgcaggagcatacggtcgttcagaacccgcgtcgggcttcggacgatgtttcggagtcgccactctcagtccgcagttccccgtcctgcgactttatctgcgtgatacatcttatatcacacacatagagatgtggaagtatctagaagaacacggctcacctgcccctgtaatcgttgatatcgttaacgaccgagggccgtcgggagccgtctacggaacgcaggggcgttcggaggtcatcatatgagttttggcgcccttctttagctcgaatttcttcctcatgctgtctttgaagctcctccaaccgcgttattgtgtcctgctgccggagccacagcgatttggccacttttgattcccttttcagcaaagaagttcctccgatatccggagtgaccggaccggaccccccgttttccttcctcttcgattccacaaccgacattgtgagccgacgcgtatacagatttaggacagtctgtcaaagctagaatcgatacgccctgcgtacttcaggtcaagtcgtcctcggcaccttgcttcgacagctctgccaaccggcggtcagtgtctgaacaaagcgtcagccagagctttgaaactgaaacgcgcatactaagagccacagcaagacagtatccatttcatgtggctaaaatggaatcaccatcgtcaccaacggaaggaatacacacattgctctttgaagaaaactcctatgcgctgtcagggtgtctgacagtaccaactctgaacgaggcttcctaccgatgtaggagacaggatcccgactctggatcgaaaaaaagtgtttgtcttgttggaacccaacacgcccacaaacagaggcaggggaagcaaggcggagaaacgcctcaatttatcctgtgtgctttatcgagaagacaacagacgtcattttgtaaaaaaatcaaacaggcagaggaggccactaccgtctgtagtgcgacagcaggcagtatagaagccaggaaccagcctcccggccagatacgaaaagatggcggacaagttccggactttactgttttcgtcaagaatccagctggtttctccctttcgcgatgaaacagggaagcgtgggggaggacggaaaatggatatccattgaacttgtatttacgggagttgcaaacagttgccactttttcgcgcatttccctcattcattgcttcgctgtttcagctacgatactttcacatgacactgtagcagagtcagccggaggtttcctgcgaattttcagttttcagctgcgttaacaggggctctctttctcagctggtccgattatgaaccgtctctttgtgttcgggcgacacaactcctactgcatttgacgtgcatgctatcacgtgctcgtcgtccgaggcttccacggaggagcaggcactatcagcttggatggaggctatagacatccacaggtcacggtgctttcgcattttgtttgacgacaaccgagggataaactggattcgaacgcaggaactgtgtgcgctgccgtgacgttgcctggcagaactgccccaggtggaagaaatccagcgccattgtgtcggggatgaacgccacctcgaaccaacactattaatttcgactttttcttaccacccgaaatcaggggggaaaggagacatacgctgtcttacggcaggtgctgcgcctgtgcggccgatgttggggttccacgtatctctttaata

SEQ ID NO: 2125 - DNA, 2764 bp, Toxoplasma gondii
  source 1..2764: mol_type = genomic DNA
ggaagtttgacagccactacgacgacgatgctgaaatggaaaaaggcgacttttttgcctggtctctcgtcaccaggattggcggcactcagtgtcactgcgatgccagcgacgtcggagctacgtggaaagtgtgcacgcctgaggaattcaaggcccttttcgaagagtgggccgccgttctggatgccataaaaggactcccacagaagatctacgacgccatgtatgccagtcctgcgctcgcaggtgcttctaattagtagggacagccggaagctttttcagaaagaacggtgggaccctctcgtccttttgaaacgatgcatttcctacgttaagcacagaaaggaatgctgcagtcccaataagttgtttactgacaggaggttctccgacgcagtgacggtgcgtcacgtggtttgcgacttactcatgcagatctcaatgattcgacaggggaagaattatgtggcagtatcaataaagagatacatataacattgtgaatttttctgttggacagaaccttgctgttcgaatctgattaccaaggtcaagttcagtgttcgctggcacgcggcaacacagtggctcagaacaggaacacccagcaacgtaaactagtttctattaaagcgtaggttgctggaaacttgaggaaccaccctttcttgaacatttacttgtgcgacaatgaagtttctacgactagcagctgctctagttggcaggtattgccgtctgagtccgacatcatcgtgcgtatactcgctggcagattcacacagtttctacgagatctcatacatttgcatattctaaaagccattcgcgtgcgcagacgtgttggaaaaatatagtgccttgtttctgtccagaggcagtcacaagagtttcgacagtgaataactgtccaaaaccacttcggagacccgattcataagacattcacatgccagagggcgtcccatttccaccgacagacgtcgagtttttaccagagagaggcactctttccgagtgtcggagccattctttcagcaaaagaagaagatagacgactcgtttccttctccttagatagtttgctcgctgactctgcgtctcactaggatgccactgaaaacctctcgtgtgcgtgtagtcgaagtctaagcacgcgcacagcgttttgctgacggcacaatgagccagcgattcgcttcaattcacgcgcgacgcttacagtgaacttcgaacgagagctagagatgccatgcactctgattcatatgcgctttggttcgacagcccacccgatgccgcaggctctctttagtcaaacattcgctctgctggaataaaaaagaaccctcgaaaaagacaagacagcatcactgtttttagctgttgttcaacttgtcccccttcatctgacattcactctgccctgtgaacaaggcaccgccctgttagcggtaaaacacggcggaatggaataccccgaccgattctgtcttgctagagacgccaatttaaaatatcaacgccatcaccacgcactttgagaaaacatttttgtttttcagcatgcccagtgccacctttcccttcgggacggggggtctggctgtcttgtacacaaacagcgccccccagtggcactcctgttgtcacaagcatggaaaggagcgtttctgttcgacaggcttctaaaaactttgtgttttttctaccacactcaaggccagttctttccacctttctctttgtcctcatgttctctgaggttttctggcacaatggaggaggcagtttccggcgatacgctaccttcttcactgaagtttcatgggtgactcgcccgcgtcttgcccccgcgcgggcagtcgtctctagtcgatcgggtgtttttgactgcttcttttcttgtcttgcgactcaaaagctgctctttttgtgtcagggtatttaagctgcagggccaaagtgaccctttctagctcttcgaaaagaagaaactcttgccgataaggaatttccctcgattaagcgcacagaaaatccactctttccgcaatggaaagtgcgcgactcattcagatgccgttttgacagagcattgtcgccgcccctccacgtgtcttgtccgcgcaaacaagttcggaaagcgaattgtctttctgcctaccttttcttggggttttcttccgacgtttcttttccccctttcccctgcaattttgtattcgactttttcccacgggtttcgtcaggaattcattatctgcgttgctcccttgagtgcagaccccttggcttctcgatcccgccctcttagtctctcttgccttgcgcgcttccccgtgcccacatttattcattctttgcatctgtcttcaaataatccaaggacgtttccattgtacgccgacatttgtttttgtatgtatgtccccggacagatgaacgcgtatcccgcccagcgcggcccatctagccactcaggtgtacatgcacctcacttgttgcattcacacatcgacaagtttccatgcatatgtgtaccttcgcctgcggctgatccgcgctttgtgaacggtgttcttgtgaacggtgtcctttttcttgacgacgcgtccagatatgcgaagggcgcgaccatccacttaattccatccacaaggtcgcgactttcccctccattacctacttgtaaacgacccgcttcaagccaccagccgcttcttccccgtcctcggaaacctgcttcgagttgaaa

SEQ ID NO: 2126 - DNA, 4713 bp, Toxoplasma gondii
  source 1..4713: mol_type = genomic DNA
cacaaatgcaagccactctttggaagcctatccacaaagacatccatgtacttattcctgtacatacaacatgtatatatatatatatatatatatacagacaagcatctgtaagacgtacagacatatgcacacatacatatgcatatatggacaaatatatgtacaagcattcatagggatagatagatagataagtacagagagagacagataaatagatagatgaacagagagagatagagagacggagatagagattcagagatagagagattcagagatagagagattgattgagataatgtcgtggagtatgcggtcgacacagacgcttcaggcgaaccgaatggtcacagcagaggttgagatcttgcgaacagagacgcgagaggaagggagtgagtagaaagaaaagaacgggagaaaaacgagcgtggcgagtctttttcgagtttgaggatgtgaagaagagcacacctccgaagggcaggctgcgaaaacgtctcctgcctgaggaagaaatgggtccgagaagaatcagattcatggaacaaagcatttttagacgaagagaaatatttgcgttactgtgtggagtcgctctggaggtccgtagggcgtggtttttgcagactctgccgcccttgacacttgtctgaaggggccttgcacaacgggagaaaagcgcatcttttcgcctgccaaagaaacaagtctgagggagaatcaagagctgcgagacgcatggggaaaaatgaacacaaatgcgtccttcgaacctccaaacgtcgtgaggacacaacagcaaggctcagctcgaagagcctctgccggatcctcggagaaggcctcgccgggcggctcagtccgagaaaagagggtgaagaaaacgctggacgcacaaagacgcgtgaaagaaactggaagaaggaggtcctgaaaagacggagagaggaatccgcgagaaactccagagttcagcgagccggtgaatgcgccttctctgcgtgcaggcgcggaagacaacgatggagacacggacggccaaaaaagcatcgcgggcgaaaaaatttggacgccacgatcttcacagaaaaaacgaatcagagtggaggggaagatgaacggtaaaacgagcgtcggagaaaatgcaacgagggaaaaagtctcgagatctgacgcaaatgaaacctgcgaaaagaaggcggcactcccatcgacagctagtcctcgctctgtctcctcgtgaccacggccttggagatatcttgaaaacgggattgtcctcgctatttctcataaagagtatggtgccagtgtggaaggaggtgggagacaagaaaatatggcgaaatagagttcaggaacgtatgtgttgagccatgtgcaggcgaaactctcctgtgaaaagccgcgcgactctgaacgaaaaaatctcgtgacacctttgtgagatgatggggacttttacatggggagtttgagtaacatgaagggacacagacgcttactctttccgctcttcgtcactcttctctgaagcctgaagaagtcgcctgctgtttttctgaacggcaaacgacagaaccctcggacggcagctgggtgggtgtctgactttcggagctcccgagacggtggaacggtgtggttccaaaatgtccatatacggagcgaatcttgcggggaacgctgtgttttgacaacttccctgataaacgcctctcttcttattcgcgtaacacacatcacgtctcgtcggtactgacagttggaggaaccagagtggcatggctgttctgtgctccaagtccgtttgacaccgaaatgtttcgcattctgaaggtggaacggatcgcagaaaaacgcgtgcaagctgttgttcctcaaactgttgatttcgtgtgaatccggtagcaagaacagcaaggaagctccgacccagcaagtcgaagtcctggtctctgtcgaatcgttggacagaaaagagctgtctgtgttaacgacaatggaattcacggtctcttgatcctcggattgatctatttctaacaatgatggctttgacggcgcaggtctacccactgttacgcaattcagtcatgttgttgcgtgtttttgccatctggggatttgccaatcagggaatttacgcctctgtagtttcgaccgtgcttggaaacccacgtggatttgtgcccgtccagcctgagaaaattccagtctgtctgcaagttcctttcgtctgcctctggtttgcggtcaaacgactgtatgaatcgaggcttctgacggttagttgcacttctttggtttcgtctgactgcagaagcccaccgtgtagatttcctggcgtccattcagatccagcctcacacaaacacacccttaggaagctccgcatatacggctgttcacggtttagggtgaaaatacgacaggtgccagcagaaacgggatgttctgtcgtggggaaatagtttcaaatcggcttcaaagcggtcctcggaaaccgaaactaagtcgggaacttagtttatagaactaccttcgcgccgcgtatggatacagcaaaggcaatcagtttaacagagtatcgtctcggaatgatgtttatggtagaaattgaacgatacggccacctgtgtttttgctacagccaaggtcatctgtccgtctcggtgcaccgagctcgctttcggtccgggaggtcgtcagacagacaaaaatcgatcggacttcgctcgtattcagctttggatactccaggcggtccaaactggaggagggctgtgaaaagacccctcgacttttctcgcatcaaatgcgttcccctgagctcccgtctactttgctcccgtccaactcgtgaataaatttgcagctgctcaagatacaaagcaccttctttacaccacacgagggaagtccttgtttggctttgtacggaggatatcgcagcttctctatgccatgctatttcaaatggtattagagagtcgctttcccgagaactaacaagattttctctggggactatgtacagcgaggtggactacagctctgaaaacgctggacgcctttccttaccgcattcccacgcaagtcacgactcttgctgaggtttccctcagtcgtcggtcggcggcccgtgatccgggaagtacgcggcaagacgctgctctctccagaaggaaacactttgctctagaaaatgagccgaagaaaagcattgccttaatttctgaagggaaggggtttttgtgttaaaaacagagtgagcatgtgcctgaatgtggctttgccttcgtgttttaaatacgggagtcttaccgtcgcacatgttacagcagcacaggtaagccgttttagtttttaaacgtgcacggagaccagagcgaagacgagccgttctttcagctttctggatatctgtgctactaaaaccgacgtcctatgcggtgtatacataaacatatgagtcgcttctttctacacaaactcgatcccctgttcacgtgtgtgacttctgctctcaagggctatgtcgacacacaacttcaagaacaagcctgtgtactggagcttcgactctcgagatccacaacatggaaatgcgttttcaggcaacgcgtttgtgtttctttcgggatcagagcacgcgtctgaccccctaacggacacggtttttgtcgacacttcaactggcgctcctctgtgggtggcgcttgccgcctcttggcgcttccttttgaaaagtacacgcacgcatccttcctcttggcagtcggagcagaaaaaaaaaacaaagaaacctacaagtcaacactcgtgaggcggcctgctggcatgtcctcccggccggccccgccatatatgcgggtacgccagggaacagtgggtggatctctcccgctttccgcgttttttcgccaccaaaaagagtttactccagtcccgcgaccaacctgcttcttggtgccacagttgacgcgcagaacagccgattttactcactacttcgagaaacggtttcacgcggggtacagagccaccgaagagggcgctccagtccgcgcatgtcccgcggacacagcatgtacacagcagccgctgaccgagcttcacggccgagtgtgtttgtaactttgctagctttcctagctgtcccctggccgttctttcctcccgttctgtctttctgtctccctcttcaggagtttcgcagtgttttcttgtccagtgactctgaacgcacccattcacctactctctcgattgactggtagagcccgtctcccggttttctgccgatgggagagtgaaatcagatgcgagacagcagccctttttctgtcgcttcgccagtgttcagcggtcgctcgttctctgcagtgtcgattttttgcggaaagttgcaatagtcagctggtttttaaagccagacgagcgtcgctgtgtcgtgagaagagccccgaacttcgtgttctttcgcggtttctcgtcgtcgtttctcctgctggaacaaacccgctgtttctcttgattttttccgtttccaggacgccctcccgtgtgtgtgtgagttcggcctctctgtcgcagtcagcctctccgctcgcgtgtacgtacacctgacatacgtgcgaggcagttcgcttctgttccttgaactttcgtttccctcgttcccttctcttctgcacaaaa

SEQ ID NO: 2127 - DNA, 2088 bp, Toxoplasma gondii
  source 1..2088: mol_type = genomic DNA
agtcttcttgtgcgaggatgtgcctgctccactcccgtctatattgcgggttcccaagtgatcacatctacgtggtggggggaggagctgcaaactgtcgcgggatgaagtgtgtgtggtctgctaactcgaaagacagggcttaggagtacacgagaattcttctctcctcagactgtgtcaagtgactcttgacaggttgatttgcctgcttgccatgattgcgaaatagattcgtccacaaggagttctacgcatctttgtattcggttttttctcgtggaagtgtccctcaaatctaccgttgcaggtagcgatactaaatctgccagttctccggaaaatggggcgccatctggcataacgtgccggcaacgctggcgtgtacaaacgtcagaagcatcttgtacattcgctggcgtccactccctagagaagtagcaggatgggaaattgcgttgttgcacgttgcagcagtccctctcgttttgtgatgtcttctaattcacgtaaatcgaggattgcataaccggggttacagaattcaactttggagcacgatacgtcacacggcggggtgtcgacaagtgaagagtgtaaacgtacttttaatacgacaacgtggagaccgcgttctggacggttatactacgacttgggctactgggtgtaaggtcgctgtttctactggatccgagttctagtgtgtggatacacagcactaacccgcgggcgcgtttatagcaacagcctaagttcttttttagcacatcctaccacagaaagttaccactcttgtcatggaatcctcgtccgaaatggcttcccctcagtattctgtgccacacgtagttggttgcgacaggtgaccgtgtatacacgttggacggcggggagctgagtatgcacgaaagtgggtgcttcgtccacggcgtacgttattggctgcatgacctattcagagtataagtgatacgatgcatccctttttctttatcttttctccttgttcagacgattcggttttaataaaagaggctcccagattccgcagatttgttgtaactgctacacctctgcatttcggtatcgccttaagaaacggtttgtcccgcggctgacacgcgtccttttctggtgggggtgcctgcgtccgcatggtcactttatggcgtaagaaaaagaagttcaaaatgcagctagaaacaaaacagccaagacattgaggttttccagcgcgaacttatccgctggcttcccgtacctgctgcacgctaagtgcaccaagtgcagccacagcgaactctcgtcgaaaacggccgggcacagttgtggatgagggttgacatttcgtgtgcggagggtcccggcgcctttcccgtcgactgttcttaccgaagtgatctgaggcgtttggtgaaaaaacagaaagtttgttgtgttgcccttgttccgcggcaacgtgtggctgaacgctgtctcgcagagtcctttcacccattacaaaggcatgctgagcttttctcggggttgagacgcgtccgcaccgaaggagggacggagtatgcacagataattgcgaggatcgcgaagtcggccgcctctgatcgtctgaaaggttataggtcctggggaaacgcgtagatacttcccgttccttttgtcatgccacaaagcgaacgttgccttttgagagacttattcatgcatgcttacgttgtggttcgcttgatctcttaaccggtagaggcgggtacgtctttgtaagttccacatttgagggggaacaggtttcggatcccccacgtagatgctgagcctcaagtgttcacaattccctcgcctatttgggggaaagtccgtatttgcggtaacatccaaacgaatatatgtttttcatttttcctggcctgcgggctggcgttttattgtctgttgtgaggggctttaagcaccgcatcaaagtagcagggaggcgccccagttttgcggcaaatttgaacctcctagacgcggattaacagacgtgtgttcgagagtattcaagcttcagtagcaccaacgctgtgtagtcgcctaagtttacaa

SEQ ID NO: 2128 - DNA, 2048 bp, Toxoplasma gondii
  source 1..2048: mol_type = genomic DNA
acccacatacctttataaattcatgacttgaaaggaataggcatatacgcagatgtcgcagtgtagatacacacatatgcaaacacatttgcccatatacatacacacataaatatatgtaatttgtacatatatatatatatatatatatatacatatatatataaatatggaagtgaagctgggtttgaaatgtgcacagtttctcagatatgtgtgcgtgggtatcggagtacctggtacataggggtgaaagacttctctgcttttcggtttgtaaggatttgcagagaatctccgtgtctggaacttcagtgcggcagaggaggagacaagtgagagcacgggcgtccgaagtccagaggaagaccgagacaagccactcgaggaggaaacagaagacgaaggcgacagaaggccgggagagagagaggcgggactcgggagacagagtgaagaggagagaggagaagacgaaaacgagaaagaaactgaccgggcagagactgaagaaggcgctgcggcgcaaggacgaggaagtgacgagaagaaacgaaagagaggaagggagcccagagacggcagaaaagagcgacaagggggagacagagagagaggcagacgcgtttctccggcgcgaacgcaagagcacttgtcttggagcaaaaaagacaaggagaggagtttcactcctccaacgagtggagccccggccgcagcaccgaggtgccgccgagcgtgaggcggcgccgctaggacgacagtcgccatgaggaacaccacacagaaatggagaactcgacggaaaatcgaaaaaaggcgaagtagggagacaaggaaagagacaagagaagcgagagagagagagaagagaagctacagagagaagaacagagacacgacgaccaccaaggaggagatggaagcagagagcccacaggtgaccagagactaaaggaaagaagatcacaccaaagagattctgaactctcatatggtgcagtgggaaaatgaggacactggaggtcgattgtgtaacgagaggatcttcctcgacaggaaaaagcaagggcagaactccggttctcgcgccgaaggaacgcgtacgttccactaagataagcggggaaaagcagaaaacgaaaagactacaccacagaacctctgctgcagtccttgtcgcttcgaacccaaagcgagcggcgaggaattccgagttctaaatttcacaaaaaaggcttgttcgttccaaagtgtgcgtgcatgcatctgttgttcttcgcgtcatcagcgccgctgcatgtcgcagcagcccccgcatggagactttttctgtcatttttctgcggcgcgaagaaccgagtttgcctccggatgtggcgcttcaatgtcgcctttgccgaacaaagaaggcaggcttttcgcgtgactctgcagggacctctctggttgaggcgcgcgacacagaaactcgcggaagacccagggagggtttgggtgtcgagacacttgaacggcgaggcgccccggagcaattttgagttcagcgcctcgtttcgagtgctttgcgacaaacaatgtctctctttttccagactttctcagaggttctgttcctctgaaagcctgttgcgcgtttcagcgtcgctcttgcgggtttgcgcgtcacccgaccggggacccgtcaagactggaaggtccgcgggggaaaaggcgctggctgcaggaggaaagcagccgcgacgaacgcgaacgcagggtaatgcgaaggaaaaccacgagaagcactgctgccgagagacgcgaagtggagaaaagccgaaggtgtctctgaattctctgcatcacgaccaggggaacttttagctgcgtgtaaagtgctacatcctcctgagaagaggccttcgcggcattgcagacgaaagtaacgcgagaacactcgacgccacaaagaggaaacgcggacacaaaaacatgcacggaggaagacgctgatgataggaagagagctttgagggagtctcgcgacacctgtgtcatccccaaga

SEQ ID NO: 2129 - DNA, 1044 bp, Toxoplasma gondii
  source 1..1044: mol_type = genomic DNA
gcagcagaggagaaattgatgtaacaggtcggtcaagcatcaaccatgtatcggctccgttcgatcggtaaattctatttgggtttatctatcggtacaaccggcagtcactcgaaggagccactggaagataactggagagccacatgcattgaggatccaacagtcgcatttcgtgatgacacctgagtcagcatcatcagccggttaaacgggatcggggcaaattcgagtacgggtctggatcgagctctagagaagtggagccgcttgtccgtaattcaccgttgcttatcaatggtcatagtggcattgttgaatgctccgctttggcttttttgtcgatgggaccagctcggaagcagtttattccctcttgttcgaaggcggaaatcccttatggaacacgcgtttcttatgattttgcgcgaacaacgtatcctgtggtgtcagctgagcagactcactaactgttgaaatcccggatataaccgtgaaaaggtgtggtgattcatggtagttcaaacatgctacctacgaccagcacatacacgcacactgagccacacagtgcagttcacacgcaggcttcgtcgcagcattagcgatgttcgccaggttctccagaaaccacggcttctgcctttcttcgcgagtgagcggttcgagacagcaggtcactttcttattaaatgtcatgcttataaaacgcagacgatcctccgcaaggcgtgaaagcagcagtttttcattcgttggctagtaccagtgtggaaatccgactgtaccgacaccggcgttgcgaaccacatggtcagtcacaagcgtagtaactgcaagaatggagtgtccgcctgttcaggcgcaactgttttggtgtaatgaatttcgtacccgcacaagtaggccgtagcagtcccgtgaagactttcctcacaaattgtgtgtctccggcaatgtctttcgtcaaagacaactcagccagatatttggatcttttcctgtagcggtcgtccacccgtcgcagtaacaccagtttgaaca

SEQ ID NO: 2130 - DNA, 3942 bp, Toxoplasma gondii
  source 1..3942: mol_type = genomic DNA
gtcggtgactatcgacatagacgaaaaggctgtaaccaaagattttcgttaacaactgtcctgttttctcgtcgatacagtctaggctgctgggaaagtctgttcaacatacgaagatgctatggaattcctagcaacacaaaaactagtgtggattgaacgttgttaaacacgcgtcgcacgagacaagaattcacactaccgaatactattactaactcgcggtctgccacctgtgctgcatggtccgtataccagaaacggccatctcgattcattggtgtatattccgttacaagtgagcaaacaattacatacgggaatctccagccagaaagtcaacgccagaataacccccaccaagtttatgccttgttttcattatgtgtagacgccggcgctcttcatgcacagacagtgcacggcttgttttcaacttctgcagggcctcatgttttgcagtttcaattctcctgagagactgaacaagacagaaacacgcagagaatatgtcaccgattacacacccggaaatgcgaaaaaatgagcagaacacgatgagcacaagaagagcaaacgaaactaaccggaaacaggaaacagttgactctccccttccgcgctaggcacgcaccccgtgagttaacaaagatggaaagattgatgaaacagaaagaatgatgtggcgtgagcccgcaaaagtgactataacacgaaccgtaaagactcggcaaaaagtgaaggcaaacgaggcacaccacaaccagcgaagctgcaggaataatacagtcagttccctcgatcgcagcactcgaatacagctgccgaaaagcatactgcccttcctgtttgtttctgcaggtacgaccagaaaggcgtagtgtactccaataaaatccagaaaggcagggcaacgtgtctgcacgccacgaaccacgcagcttcctcaaccgcctgctgagcacgcaaccctggacccccttcaggcgatagcggaatgagcaattgtgcacctggggcagaaacagttcttacaggcaagggaaccggacaaagcaggcaagagactgaggtgagaaaacagtgacacaagaactcagcggatctcgtattcattgaacctagaagctgctcgttgacccacgttttccgaccgaaggcaccggccctctgctcatctagcgacaactgttgaaggctatggtgtacaatcgttcgcaaccataaaaaacagttcggacgggcttgagcctatccccctcgaggtagaaaggcgacactctcttccaactgacgaatggatccaaaacgcagcaagcatgggaacaaagattacggacactcagcgttcgagtcttaccgccgcccgacgttgggccatgatttctgcctctgttgagtcgctcgtctccagtttcgaaggcggatgagtttccctgatttttccttctgctttacatgcattccccatggcgtggttgttcgtatgaaacacatgtgcaagaagaaactgtcagccagtctgcagaccggaccgcctttgtgagggtagcgcgaagatcctgctggagctctaccccagcagcggaaattccacccatcactcaggcgtttacgctacagcaacgggcaatgtcggtggtcgatatcgagatacaaaagctgcgccggggggaaaaagcgtgggaacggaagcagagggttctgatgtgctgttggacactggcgcaaacgttgcagagaagagacgcggcagctgtgagggcgtcgcgctcagtggtgtgtcgaacacttgcaatgcagaaacggctccaagcgtaaatgtcaacgttattctccgcttgcgggaaagaagcggcgggggaagaggcagcttctgcagggtttagtcaaagcgaaacgagcaggaacgatttgccagggaagagagactcgggtgactgcgcggaatgccagatgaaggttgtttgccgtcgattctctcggggtcgctcgtggggtttccgctaatttaccgtatttttttgcgacataaaacttaaaaagcagactccatcgcagcggggcctgttaccaagtaaccgtttttgcaagattcactttcggttctctccctacggacgacgcagtcccggtgtggcggtatctctttcttggactcgtaccgcaaaagcacgaaggagaagcgacgcaagaacacctccaataggatacgtaactcgattcaggacacactgtgacgaaacgacgcacaacaggtggttcctgctgtaagtgatatcgatcctctgacaactgaagagttccaaacagatccaagatctcttgtgcactttcatgaccaagtatcgcgcgataagtgtagaggaatctggcgtagaggtgaaaaaccgtcacttgtatacaagctgtacaaatatcatgatattcactttagtagtcccatctgcattttagtctgtacggaatgcttgcgtgagagtccctggtgaccgcaactcctgttcagactacgtttcagctagacaactacccacttatcactgaaggtaggacctcgagtgcctctcgacaaccatgcgctactatcgcacgttgttctccgtccagaagcataccaaactgcggaacggaattatctattttccatctagcattccctgtcactttcaactgtccttccgactggcggctttttctagtggcctatcgggagcgtggacgaaagtaagcgtagctcctttcggataacgctgagtagtagtggtgtgccaaagtgtctggatttcccattcttctgctttcacgctccttcatgtaacacgcaggctcctgccgcaactctgctgaacttcagcacaacgccagccaagaacatattcgcatggctgtaaacggtgaaccgcagcctggcttaaagggcagcttgcgagacggtgtttttagtataaatcatcgtatctcttcttctattgctatgcttttgttcgcttccttgagttaatgcttcgtactgaagctttcgaactccggtaacgacaaacctgttatctgaaaagtgtcacccggggtgcactttcgcgccgcaagaagcacatcgacgcgtcctgtgcagtcattgagtatattcagtgtttctagagatagtgcacacgcgtgcgtgtttcaaccttcatttctgctcctaaagccaaaagagacacattgcctcccttgactatgggtgcagtcttgattctgaggaaggtgccgtcagctgactagcgccagtacaatgccgtgtggcatttcttgcctcgaaagaaacgtgaaaatatatgcacgcgtgcaaggtacgcttcttgtttcatcgcgggaagattcctctctaactatttttgtgtcacttcagaaggataagaaaaaacacacgtctgtaaacacttgaacagatcgctggccaacgacgccctgccttttctgtggcgggcggggggaactcggagcatgctctctgtctcctggcttgtctgtctcggagaagtcggtgcgtttccggtttgcaggttgtgtagcaacggtttgctgttatgcagtatcactcctgaaaggactgtgctgtgccttgtcgcgtttcttcatctgtgggtgcggccgagcccccctctctctctgtccccagcagctcccagattttcccttcgcgaacttcgtgccgttgagcaacgctacgtgtatcacgcgcgagtaacttaccactgcttgtcgcttttcttcaacctcgccacacctgagctggcggtccacaaagttttttcgctctccataggcagcaatgattcttcgataacgcaaaacagcttttgggggacgggtgccttcccgaggagcaccgactgtgtcatgcagttgcatttccccgtgccgcgtgcttgatccatgtttccgcgatccccggaacga

SEQ ID NO: 2131 - DNA, 2141 bp, Toxoplasma gondii
  source 1..2141: mol_type = genomic DNA
ggcagacgtctgcgttcctcccattcccgagctcgtaaatcgaaaggccggaggccggaacaggccacgaaaatgacgcggagaccggggaagagagagaaaacaaagaatgaaacccagaaagggtcgtccctccttcgtgtcgatacggcggggtcaaaaacggcttcgcgtgattctcgaacaccagatgacgccttgaatctcggttctggacaacttgccatggccgaaaaagaaacagtggagtcgtcagtcgtgctccatcttgtttgtgctctcgttcctcgggacgaaaaggcggaaatctgtcactcaggctcctgcatctgtcgccggcaccacgatagaatgctggcacttcgcctccaaggcgggcgccggagatttggctggccacaccttctccgccattcgcacgagggacagactgataacggagaagcgaaggaactgaagaaaaaaaggaaaacttctctggcaaaaagtccttctgcgtcggaaatgcttgagcggcagtgcgccgccatcgatgtgtgaacggtcgcagaaagtcactgggtgtctgtacaccgcgccaatcaggtccgccaggcgttctggcacccgttctttcctggacctttcgcgacttggaatgcgtgtcaacacgagcaattctcgtagcacgattctcttcgcctgggttctctttagcctctttcagaagcgcggcggaaaggtctggatggaaaaaaagcgactcgaatttgctggaaggtttcccagaggctcgcgcgtccagtgccggcggcttccaggacggaaggcggccgccacattgctcacgtctgaccaatgcagcgcaagaagacagggaaaaaaacacggagagaaagagcaccaagagcagaccgccggtgttccatcttccacccgccatagaatcgaaccccagacaagactgggcgcgtgtgaagtccactggtcggttgactctcctcgacaacacggtcatgcccttaggcatccaatttcaagaacttatgtctctctgcaaagggtggcgatccagactctggacgccttcttcggtggggctgcatgccgcagtcaagagaaaggccgcctgtgtcagttacgaaacatcgagagcggagacaagactgaagaacagacggcgggagccccgaagccttcgagaatcaaggattccagagaagacgaggaaggtagtctttgcttgtggttaataaaacacaggcttggtccttacattcccctgcagagcagcgaacatcgcacgccgttgtcttgcgacgagtcctctcacgccctcagacaacagggatagatgtttgcagatcttgaaaaagaattgaaacaacttctatccgtcactccattgggatgaaggaaaagaaacttatgagaggctctgagtagaatggaaatgacgtagaggcggcggcaagaagaagtgacttgcgcacactttgctgtgcaactcgctcagagtgtgcttctagttgcggcgatttcacacgcgcgatgcatgcatcttcaccttagaaagatgttttgtggggctagaggaaacggcgagtttcttgtttcatacaaacttctgaatcctgaaaaagtgaatctttcgaggtaaaaatcctcccgtcttgagggacgcttccaggtttttctcggagatttccgagttgaaccccaggcaagtttcatgcctcactgagttgaggcgtgcttctccgttttcttttgcatctggagaaaaaaagcgaccgcaaaatccgccctttttcacgcataatccttcggagttttccttttcatctgttttgtgacattcaaatagtgttggtggagccctctcaaactcgcacgttgcttcaactcaaagtagacggctcgggggtcattgggtcttcgctcgtccgcatccgtttcttcccggttttctgtttttttcgtcattttttcccctcttccgcgtacttccccttctagcacctggatcgtgtgagagactctgtcaacagccgctgatacgcactcattcaagatccatttacctcagtttctgtcccggaccttttctctcgctttctctcgtttcttctcctctcttctcgtctcttctcgggcagcca

SEQ ID NO: 2132 - DNA, 2037 bp, Toxoplasma gondii
  source 1..2037: mol_type = genomic DNA
taccgctgtacgtgcacatctatcatttgccttttaatgttaaaacgatcaggtcatgcatgaatctgcatgcgcacatacaaaaaggtacattcatcagcacttgtacccttttctatacacaggcttgcgatatctgattgtgtgcggatgctgtctaaatgtgcatctaacgtttatctctgcacgatgatgcagccctcgtcactatttgtgtcatagagcattcaagaattcctgtactttccgaacagacggcaacagacacggttttcttggttcagcattcaaacaatcatcagcctatagcttacgttgcttagagaattcagcagatatactctcaagaattaacaccagcttcaagactcaccaagaaacgtcttttctcctcatttgtttcgcccctccttcggttctacacttcactacgaggaactctctgtaagcacaaaaacgctcgaagcgccagtgaagctattgtacaatcaggtggtgacacaagctctgtcacagtcgtagttgacactgctgatgtgttcactgacctcttggctgttgctcagaacacgtgtatgaaacagagtgaagacccgttgcgaagaacaaagaaggcgtcaacaatagcgtcgttgacataaatcctaccacacaatagcgcggtatataaaaatgctttgtaatacttgtaactatgtatcttggccaatttgcatccgcatcatcacctgccgaccaccgacactgaagattcacacgggtgtatcgtgtccacctggttttcgttggcaggcaatcgccttccccccttcgtgtgttccgattcgactctgtgcagctttcaggtcttcactgagagcgattttggttcactgaactagtgcctctccccgcgtaattcctgctcttgacaaattgacatttcgtcttgcctgcgcggccttctaagcgccctagttatcgggcgagctctacagagaacagacgcgtgaggcaaaagcgtagaaggccattggtgtaactctgcagcaatatttagcctctttcgaaaggcagcttcccccctcttcaacctcctactgagtagcactgaccgcatgcagctccctagtgcatgcatgcgagtgtgttctggcatgcgccaccgaaacgaaaaaatacccggtggccgagggtcgtgccacctgctcgctagaaattgcgcaaatgagttgtgaaaattatgggacgtgttttcagacaaattcaaacaactcttggcgaagccagatttcttcagggatgcatgctttccgcagggacttgatccacacgtttcgcgctggcagaacactaactcgttctttcttccggggcagcagtggagcacaagcgactcctattgggcgacaaagagagcttgtgacctgaagtggaaatttcgtctccttgtatccctgaaaagacggaggtattgctagcccctttaccttgtgcgcttgatttttgcgcttcaatacggtatcctgacccttcgaagtaaatcgcgtgcttcacggtcaatcggtgttgtttttttgccattctgcgagcgggctcccttgagaagaaaggagaaaatctgctggcgacgtttcacttgagattgtttgagttgtctttgaaccacacttgtttgcttcctttcccgctctctttagagctgtgttcagcgttttcagagagttttgcgaagttgttccgggagaattcgcttccgcagttgtgggctgcaattattttcccgtccacttccccagcagatatttccgagttctcgcactcgaatgaccgggcagacttgctgaagtgttcattccacacaaacctgtcgtcgttaattgcctgaaagcccacatgcgccttcggagctaaacgccctctgaagaatagttgccttccacgagtatacctgtttgtaaagttccgtgcaattgtgtccataaaagtaccgtggagtcacgtacgaattcgtgttcacatcgctggaacatacacgggaacacgtatgtgtgtgaa

SEQ ID NO: 2133 - DNA, 4827 bp, Toxoplasma gondii
  source 1..4827: mol_type = genomic DNA
agagaagcaggccagctcgatctcccatccaccgctctcgagatggggggacaaaacgacattcgcatgagtgcggtttgcactacatctgtggtcctcagagttgcggaaggcgcgcatggaggctcctccgccgcgcgattcagcttttgcgtcctcgtttgtttcctcgcctcttcttccgtccgcaatacgagcagcggcgcctcggctctcttccgttgagcgacaagagagcagaagggaaagagacggctggtgaacgagcgagaggtgctggggcgtcaaagtcaggcgacagagcctacccacgtcacggctgctaggcggtgtgtagaacgtgacactcggattctcaggaaaagaagaaagagacgatgaggaagaaggagacagttgccgtggaggggactctcctggagattcgtggcctggcaaagcccactgaacgaacgcgggtcgcaggcgctttggaggagcgaggcggtgaagagtccgaaaggcggttgcaacggggaggagtctcgcagcaggcagaagccggtcaagaatgtcatgcaaggagaggaactggagaagcaggcagaggagatcctgcccagaaggcgagagaaagtgcgagaaaagcgaggtgttgtcttttccagagcgagcaccggggatctggcgagacgtgagggggatacaaggaggccccgaggcaggtgacacgggcagagagggcgccacagaagcggccagacgcagacaaggcgtggacggcgaggatgggtcggaggagacctcttgagacgaggaagacggcagagaagagtacgatggagaggtcgctgtcatcgtctctggagtacagagagagaccgcgttctcgttcacacgctcgcctttctctcgcctctccaatgctcggctgcggctgcagctggcatccatgactgcgtgtctaagctcggggaagactggagaggacgagaggaacaagacagcggtgtgcgataggcgtggaaggtaggagctttactcatagctgcttcgactttgaaggattgacggacccgtgtcttcgatatcgatgtgagctggtcatctcccttctttgttactttaagccatggagtgcctccgtttttgcctcccaccttctgtctagagtgcaatcacggacctgaggtagacaacttttgtcggaaaacaaggagaggcggggagaaacaggggaagagaaggatgagcaaacgaaaaccgagtagggggaagggagggagggaataaagagaactggtcagactcaaggacttgcagaaagggtggggaagcacgttcctgaaacgacgcagggtgactggtcagtccgagaactaccgcagagccgaataccagtggtagaggggcggcagcgacggagaaagtgagaatttcagagggtgcttcaagaagggcattgtcatcagaaatggcttttcctgaaaatctagcaaggagagcatgtcagaacgtttcgccttcggtctctgtcaccgacagcggaaagatggagtacttaagaacctacgagttttccgggatacgggagcaaactccccgttgacgaggaaatacaaggatttggactgccggtgttgtcagaaaaccacgcagaaaaaattcaaccgctgcatggcaacgacgggtgcgaatgaagacaagtatcggagtgcacgctacctggcgactgcgtagtccggacgtcgaaggcaagaccgagtgcaaggcgggagcgaaacctcgacgggttggccgtgaaagggagtttggatagaagaaaataagacgcgagacgggtaacaaagggtgcgaacataaatgacgttgtcaacgactggtctagccgtctgggtgtcgtttgcgtgggagcacgcgagaaaacgaaagatgacgaggacgaccaaaatatgtgcaagggaaaaagaggcacgagagaaatccagacgggtaaccttaaaaaacaagtgtcgtcttgaaaaaagaatgcagaggagcgacagagaatgagtcaggtgaggcaggtgtgccactgccataaagcgagcactaacagttcacagacaagaaacgaagaacggcgcccgtccctatgagtgaaagtctgacaaacagaagtttccgtttgcaaaggattaaaaacggaaagtgggccacagcacacacacggcttgcgaccatgaggcagagaaaaccggcctggcgagagttgccttctccttgcaactctctctctcagctgtctagggactctttccagtggcgcttgggtcctctctcaggagccaaaagttattcttgcaaaaggcaggccgaatgcagcagtgcacagcgactgctagcaaaaagacacacgcgcttgagtgcccacaacagaacgcgggacggtttgcaagtcggaaaaatccagcaccattcctccggcgccttgagacggctgcctgtagaggatatgactaacgcacaaaatagagacaaaaggagctgtttttcttgcttcgtcgacgcctgccttctacccacagcgcaccgcaccgaaagggcgacaaaccgctgtttgcagggaacgggaagaaactggtagaaaggttgcacttctgagactgagagagaaggtagaagtcgcgagacttgccgccccgctgttgccaaacacgctcatgagcaaggccaaactcgcagacggctagcacaccattttgtcgctcgtgcacgtcgctctgcgtttcaccgacgaccaaaagcggcaaaaaactgacccctggcagagtaaagcggccccactagccaaaatggtgaatcgactgtcggaagtgctcaccatgcctagtccagggccgcacccctctttcgcttgtacggatgatgtgcgcgcctcttgctcctcgttcctgttcgcgttgtcatctacatctttcatcgtctctctacgtccacatccccaccgtccgccccctcgaacccgcgacttgcagggagacccactgactggtctgaaaaccgagggtaaacgctttctcgcggcagcgtagatggtacgggcacttacacgttccaaacaggcatcttttgcataaacgttcatggccttaagaaagcgtgttttggcaaaggaattccaccactacgtgcatattgtgttctgcaacacagaagcttgacccgcgctagcgccgcgcgtatcggcggaaccctccaggtggcagtttttcccgctttagcaaataagacaagcgagaggaagccccctcgtgaacacgtgtgtctcgcttttgtgagaagctgagtcacctttttcgaactggggaaatggccactttcagttgcggtgcttctggtgcgggtacctagcgctcaaatggatataccacgccggtgtttccaccatgagtctcaactgaaattgatttggactcgaacatgatacataactgcaaaactagctgacgacagaaattagatcggtgaactggtgaaaaggaggaacagaaactcagtttacatggtgtgctaaaaataccattcgcgtacccagtgcatcaagacgcacggcagtgtcttcaaaatcgagcattttgtgtgagctgatgacgacacactgaacagtgaatatctgcagaagttcgcacctcagatgccagtacataaatgcgacaaagtttgttgcaggaccttatttcaacgctgttacctgccgcgctaagaataagcggtggtcagctgcatttgacatgcctaaggccaggtttacagacaccggggaccgctaattttcgtgtgaaagctggcaaggatgattactccagagagtaagtcccccagaggccctccagaacaggattgtctcgtcaaaggaggaagcgtttgtgatgctagagcgagcacgacgccaagaagaagcgccacgcacttccggaggcagaacgtttgatcatcggggccgctacttggccgtaacctctactctgtgcgtgtctcccccgatgtacgccccgttctctgctctacgtcctgtggtgagacccaacaatcggtacgaccgcaacttcgctgacagaccgcacgcattcagaatgagagcatctcttggactgctgctttcttgcgcgagcagcgcacaccgagagaatgacgcgcgaactgcagtctcgagcacgtagcagacacgcaaagatcctctggttttcagctgttcagtcgccaaacctacggtgcttgtctgctgcgccgcgcggtcacctgcatctaacctgcctgttgtccagactctccagggacgggtcacattgttccttcacaggcgcttgtgaggaaacggaccacgtcgagcatctggaaacggtgaacttaggaaccgtgcatcgccagtccgtctgatccttttgtgatggtgagcgagactcaacgaagcagtctgtaccacagaaacaccacgtcttgtgctacctcgataggtggggcctatcaactgtgcgttcgacacaccatttcagtctcccgcaggaagaggctgctgcgcttgccctccacactttgctcggatgcctcttcgtaactgcttgatggatccgacaaaggtttgcagctccttttgctgttacctgcgaaaggcatcaagtgatttttttggcagaagatgtacccgctacatgtgcgaggggggtgtgttgcgggttgctaaccgatccactctcctcgtggcatggtcgcagcatcgttccgagttttttgctcttttcagaggtgaaaccatgaaagagctcctttctgtttctttccattgaatccctcgaagcatcgcatcaa

SEQ ID NO: 2134 - DNA, 1982 bp, Toxoplasma gondii
  source 1..1982: mol_type = genomic DNA
ccgaacaacgtccataaaggcgcccggttttggctcctagaacacagcgtggcgccgggcaggtggacaaaaatcggaaagtcggggagatacactggctgacacccaggcgacagcgacgcacagcccatacctgctatgtacatatagagggtcaccatgcagagagatgaaggaacggatccgagaatataacaaaactgagtcgtgtggcagagagataaaactcccggcaccgcttttagccagttatcctcgaagcaccgtgcctcttttcctcgcttgactgtcaccaattaaatgcacattctttgcgtcttgttaatcgtttgctgcgacgaaccttgctgatctacttctggaaagttgtgtcgagcgcttctgccgcctctcgctctcttccttttgcctccttcttcttctatgcctcttcgcttcccaagccgtcgccccacgctgtctcctcgagaaaaaagggaggagggaagggaggaaggaagggaggaaaggagagaagaggctccgagagacgccgccttcttcctctgctgagaaggtcgacgacctcgcatggtgtccgagaaagagccccgtcagctgaagcgtgaagagagaaaaacacgagagagagaagaaaaacactgaggttataacgcgtgtcggcctcttcaaaggaccacagcgatatgtgcagcctaacagaggagagagatgagaaggagacgtgcagcgcggagcccgcggtgtacgtacacccggtgaggaggtccggcagggcgcttcaacgatggttggcagacggtcaagaggggtacggaagacaagagtgagcctttaagaaagcgcgaaagaactcgagacaacaaccacgagaaagacgaggcaaagcccgccagtcgggattccaggcgcgcgaggagagccgtgaattgggcggcagcggagagcaatcaagcggcctccgaggagatacagaagcctccctgggcactccaggatggcatagacacgaccggccacgcgtctgggactcacgcgcagtcgagaaacgaagacaggagacggccggtgtcgaagaacagtctgcaatcgacgtccgggccggctttgcatgcgcaggtcgagtcgtggggccagagcgcagagcgaaaaagctcaggaaaaaccaagcagggacgaggagtaggaaagaagagccttcgatctagatgcaaaaaaaggatccttaggaagagaaagaaagaagagaaaggagaacggattcgctgccctcagctgattcaaccgggcagcgaccttgctcgtattcgccagcgcatttgcatgcaccacagcgacgtgctcttccacggacctttttcgtgccagaacgaggtgctgcttcaaagaagagaacctttcgacgggaaacgcagaagaaagtgaaaacagaaactgttttacttcgtgtaaactcgacgtcggtcccctctgcggtccgacggcgtccctgcgtccagcaggtgtacatacacctcgctcgtggtctgttgggaacaccgctacgtatcgatcccagggtatttttcggctgtttgattcacactcgcgtccagaactcaaaagctttctctgctttgtgtctcggctgtgtcgcgcaaaaacgccgttttccgagttgtcgcaccgtcgagggcatctggaggcgaagtacttccgcactgccaccgtgtccgcgagtcatcgggtgtatgcacacctcagaaccgtctcccatcgtcgccttctttgtgtatgccaaggagcagaactgttttcagttgttgtctcttcgttccgctttgtctcccttttctcgactgtcgtggcatcccgtcgtttcctaacgaagtggagacttctgttcgcggttcgcaggaggcgagtcttggacgacgcctgccggtcctttggccactctgtgctctggaatttgactggttctgctccccaaggacccagaa

SEQ ID NO: 2135 - DNA, 4064 bp, Toxoplasma gondii
  source 1..4064: mol_type = genomic DNA
gtttttctgtgttcagggatgaggagcaccgcaacgggtttgtcttcttcttgcgtgtcatggtcaagagggcgaagcaagctgagcaggtgggagctgaataattatggcgttctgtctcctgccctgtcgcttcgtggaatgcctgtaaagggcgcttacgcggcaaaagtcgcaacggtgaatttaggtgaagaagagcgacaaacacatctgtcgaaacacaaatagcctgcgaacgtcgtctataggccgaagcctgaaaacacggtggcagtcgggtatatggttgcggagaaactgtcattgtgcgtgtttgtgaaatcaaaatcttggtgatttgcccaagtatcttcactgtgtggtgcaagaaaagaaaacgtgtggtcccgaccttcccgacccttaacagtcgtttgagaaatttgcggagcgcagttcgggaaaaggcatcgaagcgggggaagtttttccgtgtgcgtcttgtcatctcgtgcgtcacccggccctgctcttggtgagcgagaaggtgtaccagttggtcacctcatgcacactgcgaatccggtggtcctcgaaatcaaacgagaccgaacctcgagtacgggaaaaggcggcttttgccgtgatggcactgtcacacccggatcgcctactaccggtcaggcggttcgtaacaccgcttcatatcgcaatagaaggcttttgtagcacattaggcggtggcgcaagtccttccatcgataggcataagcggccgtctcggatcgtgaaccagcatttcacaccgtacgtgctgccacacgcctgtaggttttgtaggcacttcagcggtccacgggtcttctgtaaaaatcgagttgcaaattgttcctgaatttcacagaagacacccttgcaaaaacggctgtcgacttttgccattcccacgtataatcaacgaaaactggtccagtgttcgtcgacaaaacagtgcgacttgcacagcctgatctactcatgccagtatatgtccagccctaggtggcggaacacatacacacagatgcccacgcgagaatacagttaatgggagagtcgccagacgctaataaggagaaggtaggttgctgtcacgttaaggataaaccaggaacgccgatggcgaattcttctaccttctactgggaagaaggctgcagcataggcggaagatcagtagcataaccgcagctggatgtgggtaacagtcattataacacatccagtgacagcggtccaggtggcatatcgtctggactattacgcttcagtgaaacgttcgacaagacagacgatattatcatgtgtgtagccaacagagccattcaagggacgctgcattccagatttttgctggaggtgtagagataccactctgactatccaacaccagccaagaaatatcaatctagtgctacggttgctgtaagaactcaaacatgtgcgttcgtgtaactctccaaatcgtcactttcatcactgcggacgacggcctgttccaccaggcctctggatctttcaacctccctgaaatggctgtgtcgtgccgttgacgtactgggtgacatgtgaagtctttggggcttttcgggcactccaaacgagacaggtaactgattcatgaagcgtttctggcacagcgaagcacatcaccacaaactccttcttctaacgaagtgaaaacgatccgtggaagcgaactgttcgatgcatggcacatgcaggtttgtgtttcgcagagagcgtgcaactgtttcgagagtcacaacgacaacgcacgtggcgaaaagaactctccaccggtcaaagtgcaaatctgtctgtctaacggactttgcctcagtttagcgaaaccgaaagcgaggatcgtggtcagagtcagttcgacatgtcgctgttaggacgtggctctgtttatctcaggggtctcgaggttgtgtgctgtccaaacgaacgagtgacactactgtacaaaacatgtgtgggcatatttttgaaaaatttctcatcttgtcgttgtgtgttcccattctggcgggctggtagcgcagtccagtggtctactgctgcttgcggcagcggccttaccaatacagagaaaggacgggtcgtgagcgtttcaaaaaagacggctgagatgcaaaaactttctttcaagtactgaaattgtgttttcagtcacaggcagactaacatgggatccccgacaaaattcgacgaggatgcgttgaattgtggctaaccgcattttcatagagactcaactaaataaaagaacatgtggatcacgtgtctccagagaatggaagacatgcttgagcaagtcgtagttacgagagatctacatgtcgaagaacgaaggggagagctgaattgaagacgccaatggtgttgggtagaagcgagcggctggagtgtttcttgctttggggcatgcaatttactccttcgtatttttcatggtttctgcacatgcatgtttcaattctctcgaagcaaaaatccgaactctgcacaaacggtctttttcccgaagaacccccgcagtcgttccaccgcaccttggaacaggaaagcgaccctccatgtgccctcagaacagcctgttctgtgaggttgcaggacagcccacttgtcgcttctgcttccttagggtgaagggtcaaggcccggccgctaccgaattcagagcagacattctgagttgctgacacacctaatgaaactacggagtaagaggtcgcgttcgttcgtttcggagaacgagctccgaacgcccagtataaattatcacaagaagtacgatatcttccgtacaaaaccggagttaagaatatcaagggcatggctagatcaggtaccgcatttaccacaatatcagcacgcactgattgtattttacactgtgtaacatgaacagttacagctgttgttcgactggcgttgcatgccttctctcccttttcgaatctctgtggtgcctctaacacaccagtgagcagcttctgatgctactgcgagacggttaggtttctcgcgaggttctactaatttttttcgactgcgaatccggcgcctctgtcgaactcgggggtcacaaagagtcaccagaagacgaccgcaattccacgaagagacaggcacatttacttttatctcatttgcagatatatatatgcatatgtatatatataaacagacatcagcattcactgccaagtacaaggcaagggtgtgcgcgtgccgactcagagcgacagacgcgtgcttttcatctgcctggatggtaattttcgctgcatgcgcacatgcacgagtcaaaatgatttaaagtggagtcgggtgcctttcttctcagaagattcttctgcatgtcggggacaaaaaaggaggagggagctctcgatcgtcagataggtgccagctttgttgccagttcttttcttactcctttgctattgggcgcagccgtcatgactctccttcagagcttctacttcgatttcatgcgccttctctcgacttgctccccattttgaccgcgagttcctgttattcttctttctctctccgttcttccactctgtatgtacaccagatgcctgcccgtgcttgttctgcaagtctcccttcccccagtggtcccgtcgccagactgtttccactgcgctcttctcacctgccgctcgatccgctgttttcgctcttctccatgcacccttggtttctctctttcttacattctctctctgaatcgcttctccgctctctttttctctccttcctttcttcttgcttcctcgcttgcgattctctcccttcctccactccactccttctcttctctctgttacctctttcctccattgttcctttttgtcgctcctctctctagcctctccacccgtctccccttttcttcctgcatacttatctctctttcctctctctcccctccggtctacttttcctctcttctctccttgcttccctcttctcgctgctctcgtcctttctcgttgtttctcggcctcggagcaaga

SEQ ID NO: 2136 - DNA, 4155 bp, Toxoplasma gondii
  source 1..4155: mol_type = genomic DNA
acatactaacctatacgggagcgtatatggaaccatacgtgggatatacgtatgtatgtatatgaatatatatatatatatacatatatatatatatatatacatatatatatatatatatatacgtatgtgaatatgaatatgtctgtctgctggcgtgcttaggtttgtggtgccggagtcgcgaccaccgtgttgaagagttcccggcacacgagcgaagcaggtttcgatttacctgagaaactctgtcatggcttttgcaatttttctagaggcggaagcagagccgctacaccgccgatggaaaagaagcgggaactgcgtcgttgtcccccttgctggtttatcttctgcagtggagatttgttcgggcagaacgatcgatcggagaaagcagaagcattcgtagctgctgtgcaggtcgtcgtctgtcgtccccccgaagggaggagggcaaggaagaagcagttggtgccgtctggcaagaaaagtttgttggaagacagaccgaacagaaaacaaacacaaaaaaggaagaatcagaaggcaaaaagtggcgtccgacttgcttgcgcctgatcaattgtcggagacagagaaattcagcgtgaaacgcgggagcttaggagcggtgaaagggttcgcggaattcgccggattctttcgatacgaaatgcgtttcttcgtgggaacaacacggaagaaagcggagaaacgccacgccgaacacgcaaaatccctgtttttgagctctctcccgcgttttgccggtccccatgaatccggtagtcgagggaaatgcgcccatgcaacgtggagaaaatgcgctgctctttccgagacagcgcaccatgaaacaaaaaccgtattgggttctaaaaagaaagggtccgcggattcaaaagcggaaatcgttggagaggaaatcggtcaagattgccggaaggtccagttgtgcatgcaggaaccggccgcgctcatcgaaacatgcgacacagtgtcacctgtagacaagaacgagagcaacacgcgtttttcgtgactttcccatccgataaatcacacttttgacagaagagaattccgggagaaaccctttgttgttgctgtttttcaagatcaaactgcgacggaagaagggtatcttcttggtactttacgccggtttcccgcttcccttaccaccgtgagactttacacactttaaccgcttaaatactcgaaggttctggtggtatttttggtgaagaaaagtagactttctactgaaggacgtatgtgtgcggggactgccttgtgtagtgggtattctgtgccgcgggctctgtgtctcggatcgccgcaaactcgggtgtgacgccggcaacactaaaaggttccttccgcggaccgatacccacgcaaaaagacaatgcttgtgaaatagaggtaaatgaggttcgcagattgaagaattattggcgttagagacaaaatgctgggagagcggagtgaactctcgtgactgcagagtcgcctacggtaccttctcagtttcggtttaggtagcttttacacgtgtggactgacacgaagctgcggaatgccctgcaaaagatgtccaacaggcaaaccaatgaatacataaagctcctcgtgctttatgaggtacgcagaattgagccattcaaagccaagctctttgaaaacgctgaaatgggaatgcgacgctgagacactactcctagaatcggggagaagaaaactgacgaaggcgtatctcgagttgcatgtgtatcaaacgagaatacgtctgctccatactcccgggctcttcgcggatagcgtcaactgtgtcaatagtgggaggaccttgacttttcgacgctctgacgctagcgacggacaacagaaccctgaccagtccaggattctccttcgatctgttacagttccgttattgagcgacagcaatgcaagtcgccgtgcatgttgagaacatgcccttggcttacataaaaaaacagaacatgatcaataaatcactctgtcgctaccgtagctcgagtatgaggcgagttggcatttctgggaggggtggtcacagaaaagacacccggactcataaataggcctgtaacatccgagatggattcaaacggtcactgtatcgatgtctgttctgaggagtagcgccataaaccgtggtcggagggttcgttgcttgctttatatggctcaccgcaacgaccttaccaagaaagctcagtgtgcacatgtttcgcgtccgtcagtaacacaaacggacaacaggtaactcttcagagcttggtgtgtctctcttccaggttgagattagacagaacggaacccaaggaaacgtttttgatctcgaaactggttagcagtcaatgaacgactacgctccagttgttaatcgtgaagagttctcggggcagtgtggatctcccataggcagagcaacgctcatgcatttagtgttacatcagacttggagtgaagtttgcggcttccgaacagtttgtgggttctagcctccaagttaacgtgaataccggtgtcaatgccggttctctaaaaagaacctgtgccatctacactgggtgtggtggttccgtgaactcaaaagcgcactgtataggtgtagtgcaggatccctgcctggtgcagcgacacgtcaacggcagctgctgcattacgcgggtccgaaagtgagagaatatttgcaggaaactgtcgtcatgcgtgaaaaagtcggtccgacggataccactgttgctcgagtctctgtaggtcctgggaaggtggatgcagagaaatggtcggctgatgtctcgaagttcgatttgcgctcgcaactgcttcctttttctatctccaacgcactttcttcgtcgcatctatcgttcgaaaaaaagaatggataacaccgtcattcttttcccgcttcgcttcgttctcgagctggagggccggcggggcaccccgcgcgcgcaggggtttgcctcagacaatcgctcggcagttcgtgcacaccgtggaaaagtcaagattttgggaggacagtgactttttgtggagcaacattgcagctggcttcttggagaacccgcaaaacaccgggaagatctgctctggaacctgtatatttatatggatttctcgtctgctctcctttgtagcgtcccgccgttcgactctcacggggctgggataatcatcccggcaaggcagcagtccggcagaagagcgacgggggacccgagaaggggagacaggggtttcagatgcgtgtggaattacagtgcgtaggagtaggagccgactaatgctgagacgaacacctgaagaggaaaaaataatcggcgtgcaacactgtcggagccgcggcacatcttccgcagcagccggtgtgccgcgactgcttgtctcacgcttctcaggtcgggtgaaaggatttgcctcgtgcatgctcgcatctgtgacgagtcctggaggactgaagatcgctgcgtgaagacaagtcaaaccaaacaggtgacgaatcttctggaactgcggtagacaaagttggccgcggtcgtctcgtagcgccttcgaggtccgctttttcacgcatgtgttccctggctgctccgtagcagctaggagggttctgcggcacccgagaacgggcagcaaaaccctttggctctccccaacccgaagaagacattctttcgcgagtgtttattttccagttacggacccaaagccccttttggaccgcgatgaatcaatgaggaacaaatgtctgtcgcgaagcaactcagaggtctccgacagtttgagtctccgagccggtaacgggaggtgccacggtcgctgagaaagacttgcgcgggtggctgctcgccactggggtcctctgcagtctgctatagtttgtttttgatgtgacggggactgaagaacaagaaagcgttcaaattgcctctcgcgttcaaccaaccgctgtcgtccccgcgccagacgcctccgcgggtccgcgcgtaccctgccctcgcgcccaccacaccagggcggcaggaatcggtgtgggtctgcggagttctagcagggactttcgcttttatctctccttttgcacttcgtgtttgcgcgtcgacaaca

SEQ ID NO: 2137 - DNA, 3624 bp, Toxoplasma gondii
  source 1..3624: mol_type = genomic DNA
acgcatgcggacaaggcctagagaaaactcaaccttcttttcgctctccgcgttatttaggcgcaggcgaaagtagacagacaggcgtgtgtgtcataaagagaagcttttctctctcgaagaggcttgcatttcgtctcacttgaagcatgagggtccaccacttgtgtttgtcggagacgacgcgcatggcgtctcgtttgtgcctcgggtaaagtcgaattttttcttcttccatccagacgacgacgtcgcgcgtccactcccagtcggcctgtctttcgccctcgagcattgcgcatgcaagcgccttcagcttcctctctgtgaagggggtgagagccaccgggaggcatccggagcgaggcttgcatgcagcagaagctgcatccgccatcgtggagcggagggaaagcgcagaagactcggcggcgagaggaagtggaaaggaccgaggagggaggagacgcgacagaaggaagatggggaggggagacaacagaaaggagagagaaagcagatgcacacgcggcacgcggaggcgctggaggcgcggaggcgctgcgaggcgagagacgagagaaagagaagaaaagaagacggtaggggagaaagagaatcggaagaaagggaggagagagaggaagaaccgcggtcagaagagccgagaagaggggcacaccgaactgttaaggcaaggagcagacgagcgggtacgaaggaaaaacggacgaggtggagagacagaaaacaaggcttatgatgaaagaggagcggacgaatacaagtgaagagagtacggagatctgcaagcgcgaagaaacagagaaagtgcatctgcggagtcaaagtacctagggaggtcttgacatagtggaaaggaagagagaaaacgggcaaggtagctgacgcatggggttaatgctgccacttgggcatgtgttgcgaaacaggagcccgaaaactggggaacgaagacgtaacaaagagttccattgcgggaagaactttgacaattctccggcgtacacaatacactgcggaaatgcgcgccgctgcttccccgatttcgcgttgcggcggagcagcttttcaggacttgcagaagcgcggacgacggtgaacaacccgtcaaaacgttctgtgttgcgcaaagcagaacacaaggatcgcggagaccctctgagttccgatttcttttctgcccattcttccaaggaccattttcctgaatggcatcgcctcagcgagacatgagacaccgagcagagcacacatgcgcgcttcgcaatgttgtcctgccaataaatgcgcatctgcctgttcctttagcacgagcccgcgtttttttcagtgcttgtcacattttctttccttccggcttctgcacttgactggcgaagacttcgggctgccacgggcgtcttcgcggttctctttgcgctgtgtttcgccgacatgttcagcccaggtcgtgtccagaagccaacaaggcacctacagagtctgaagaaagttctcgagtgcgcagcttcctcgcgcgcacaaaacgaggcattttctgctttctgaccgcacaagcccgtcaggtggatcgatacgtcagtctgtagtaggcccggcaagtgctattccaccataaagcagggcttagacacgagcttgccatcaaggtatcacgaattaaagggatttggcaaacgaaaagaccattctgcttcacaagcacgcaagtattggttcgattccgacactgcccataaaataaaagacaaaaggtgaaaggctacgctctgtcctccctcgtccaaaccaaggaaacgacgtggatacgtagtgccctatcttcagagggcatagagtcatataattctgtatttacacgcaattgggtagggtcgtgactgattcacctgttgaagtaggtgctcctgtgatgtgtaacaagattcagccgcgaacgactgttaatcatctggagtaatgcgggagttacgcgtttcttcttgtgggtcagaagagcagaggccgctctctacgtattcagcactgcggctccgtggccggcttggactttctcacagctgcgccggtgccggtaaattcatcgacaaagacagggatatgggtttcaggatgcagcaggacttttgtcacttggtaggaaatgcagtctgcgtcttttgatagagactacggcttgctgtgtgcgacgtcaagcgtgatctgtgttccacgatacagacatggatttgcgtttcgccatggatagcgcgacttctctggcgtgagaggcataatgcagttgacatatggcttttcctaaacgcacgggagaagactgatcctttctcacaaaacgatgaagacgtctagcggtcatttccagatctagataggtggtttctccctcgacggagtctaggaaggaaccagttcgagacgggaggtgatctgagatggatcgcccgcagctcttcgtccgatccccctccaactcagattgagcggttaggtggcgacatgcttagctccggggttcgcatgcagccgcaactgcttactctgaggtaactcgtctgcgccggcgtattcagccccgggcactcgaggaaacggcacagacccgtctccctcctgctcctgcgtttcatagaaaggcgttcggagcggcgcgagcgttttccactactcttgtcgcaaagctcagctcggtcgaaacagcgagtcgaggaaacgcacaacccggggttaccaacaggccagtagggtcggaaaaaactaagcacgcgaaactgaggccggggatcttcctcttgtggaaggaactcgtggaatactctgcagcacactggagcggttcagtcgagagaattcctagggcaaggtgagccgacaggcgctttcctttgtccgtggccagggatttagggctgagacgctgatacaatgctgcagactgtactcttggcgcgtcatctctttactgttccccagtttgtgtgtgcgacactgccgggggacgacgtgcaagacaaagcgctggaaagagctggaacacgtagagataagtcggcgtccgggtgtgtggaggcgggttgacgaatgcctggtgagtgtgagggttcgaaatctgttttcccctggagtctttctgtcgcgaaacttggagatcgttggtggtttcgcacgtaggtccaacccgtacaaggattacctgtgtccatctgtgcatcaacgtggatactcggttacattcgttggacgctgacttcccggcgaagcatccctttgctttgaaacacacctcccttctcgccgtgcgtgtgacctcaaagtagagaaaccctgctgttgtcctggcacgtgtatgcgacattttctgtcagaacggaatgcgcgtgacacggctcgtgaaagcggattctctgtgcaacggcaccgcgtgtgtctgcatcgtttccagtcaggccccggtggtgagggtttccccttgtgatttcgagagatttcttcgtcgcggtgaccgaactcggctgctctgtttggtgtctttgaccgccactcgcgtttcctactctgcgcaattttcgaactctgtgacctttaagacttctgcgcgta

SEQ ID NO: 2138 - DNA, 3570 bp, Toxoplasma gondii
  source 1..3570: mol_type = genomic DNA
tcacattcattgatataatgcttatttgtatgtgcaagtgtagaacttcggtgggaagcaagtgtatttggtgtcactatgcacgcatgcggaaggaaccgtttttgatggatgaagctgcctgtgtgttttatcttcagagccgacggaactgtggtcgtccacgaagttggtgtcccggtggttgctgcggaaaaaattgtggacaccaacggcgcgggcgacgcgtttgtcggcggttttctctatgcactctcgcagggaaaaacggtgaaacagtgcatcatgtgcggcaacgcttgtgctcaggatgtgattcagcatgtaggatttagtctcagcttcacttcacttccgtgttgaactggttgatctgcagcatgtacacccttgaaaggggggggattggggaatcccacacacggtccaaaaagttcgcttctttgaacggccgtcttttgccaggcgtcaacgtgtgccctgtgctcaactgtacagaaatcctcagtttagtttcgccgtttggctcttccgaacccatgtacattagccttgcagggtcgtgtttcccagtgctttccgccgtgatgcgaccgtgtggcagtctccgtgtgtttgaggtggaagttcgttcggtccaaaatggtgtggcagtgaaatggtgcattcacgggaacgtagtcccacagtttcgctccatacgccgcgtgtattggccaaaatagtcgttgcagaactcgtttggcaagtcaaatgacggattcagttccacaggatatcgcgagcaatcagccaaagggcctccaacgggatcagcaaagtcccaaaatctccttttccggtcaaaactgaggcacagagatgtcaacggcgggtttttatggcgtcagacatgcagctggacaaacagccacgcacgattgccgccggccgagagacaccgaaaacgaaacgaaagacttagaaatttccacacaacgaagcatatacgaaacgcagctgggatgtctgacaccagcaatcgccgctcatctgaaacaaaaacgacaggcacatacacaaaggcaccattttctcgcttcatgcatataaatatgtatgttcaaatattttcatcacaaggccctttcggtcggttcaacttctgctcaaacaaaccaagaacctctaacatgtgtacctcagtttgacgacgctggagacgcgctggtatgtctggatatatatttgcatgtatgtgcacgatgcgtgtgtcttcctatgcgcaccgtgttcgtttataggcagcactgctctgtataactgttttcgtggagtctaggagcctctcgaatatacatccatgtatcttgccttctttcgctacgtccgcactattgaatccacagcgtttccaaggggtggaacgagagactagaacatggttgcttttcgactcctagcaagttgtaagaacgttcacgattgtttccattcttccatcttccacaccagtgacctcatgagcctgtcagtcattgtcctctacgttcctagacctacgaacaaataagcgaggtctgctggcgacattccgcacagtactcgataatcgaacgatttaaaacaaggtgttgttgcaactgttacaacacccccctcaaatcgaatcacagatatgtgtcgggcctggggcgtgcaccctctatggataggattcttgtttcgactgcatcaacgagactgacaaggcggaaggctacgactgatgctacgcagtggcaggcagagtagacaagaagcctgacaatcagtatgccacgaaaactgtgcaacaacactcaactcatctggaattccgaacgtgtcagttcgagatcccggcgtttctggaggccaagatatcgacagaggagcaagaatctgcgcgcatgtgtgccaggtctcttgcttggattagcagacaacaccttcaggaaacactgtcgggcgcatttgtcggtgccccgcgagttgcttgcgtttcttactctccataacatcatcaacatcacagctatctactgctatcgtaccggaatggtactttctcgtatatcccgggatgttaaaagtgcccagcgtatatttgaaaacccaacatttgccgacggagtatacacataccaagatattgttgcacatctgcacttgtctcgcagagcaacctctgcaacttccccaggaatatagtgcctcgggacagcattgaaggacacgataaaccagttattgccgtctcgttttccggagtatacgaggagggaaggcgacgagaacaaaggcaatcttacattgtcttgactcgagagaaacgcaacatcttgtatagaagagacacacgtgcagaaaagtgaacggtcgcgacatccttcagtttctgtgtgcggtaccgttctagcaatcgttaaaccatgtgtacagtgagagacgctcgacactttttcaccccttcttcccggttccgctgcattccctgcctttctggaagtgtgcaagcgtgtccaatctctgtgcgaaggtagaagatcacgtctaaatcgagaggttgaaatttgagggcataaacggatggggctgtcgactgactacaaggatctttgctgaggtcgcagtttatccactgcgagatcggcggacgcgcgcggggcgacgcccgtaagtggctaggcgagttgagagaaaaattttaccgctagcgagcgccccttttcttcgtttcttcttcgatttttgatgttcttccgcatctttgttctctgttttcttccctgcgaagaatttcccgctcttcgcggtcctgggtgcttccctccagctctcccgttccctctcgacagagctcgcgctaccttcctcagagccagcgcatgcctacaaaggacgtcttttttgttctcggcgtgaagtctccttctttgtcgcttcgtcttccccagaagcaggctctaggttccttgtctctcttcgctgtcgctgcctgtccttttctcgcgggtcctgctttctccacggtgcctcgcacactcctcccttccgcctcatggaacgagacgagaagtgagtcgcccgtgagctgggctaagaacatctctcggcagtttgctggccaccttccatttgaaattggaggcctgaccactgcttgccaaggactttcctgcctctggggcgccgcaatgcagctgctgtttacgtgctcctgcactggacacggattatacactgcaagacttcctcatgcgtcttagcagttaacagaggccgatgtgcatcagacgcgtctcccgttagagactttgcaaccctcacgtcttgtacggcttctgttttgcgagaagcaactgacgctctctctcccttctctagttcctaggttgcttgtcgccgtgctttactcccgaattcgaattccgcgttgcttttctcgtgtctccgctgccagctccgacaaagtatttctcctcttcccttctcagttcgcattccatccgccatctctctgtcttgctttctctgcaccagctgtctcatttttccgtctctccaaga

SEQ ID NO: 2139 - DNA, 1262 bp, Toxoplasma gondii
  source 1..1262: mol_type = genomic DNA
taaagtgtcaacagcagaggtttcgaaacctgccattcacccgatcattatggccccgtgtgctaccagtacgaaactgcgggctgatgcattccgtgtgacagctaacgcagagacgagcgagaagaaaagtactaagaggggaagagactgggtgatcagtggaagcgccaccgtcgatgatctacttggaaacatcaaggtcccacgcaaaggggaaacaatatcgggacgggcgccttcggcagttgtgtagtgctgatgagaaatctttaagccttttgaggcaaactgataaaggcttcttcttcgctgtgaacgcattatgagcttgcttgagttgaccaacaatctgcatgttactactctgacggtgatgaatcagtcaaagacctgtggaagtaccgcagttgcttttggggaagtttcaaggatgtgctcactccgaacagtccgcgccagcaatcataagacatgtattgcgtagcgcagaagggaaaaccgaggttcaaggtaacctgcgttgatgcaaagaaagtcgaccgcaggtgatagcttctatagtttgccttggacggaattaagaagccacagccgcttgcctcagtattgcggttgtcgcctgccctgtctccgaaattctgacactccgcgatcaacgcttgcttgatagggcctgctcaacatgtcagagccggcacgacactcgctcatgttacacgggtttctcccactggacccccgatttccagagccctcttggggaatgcgagaaaagcattttaacttgcacaactgcaattcagggttcattcttggcacagatatcgaaacgtcccctggtgtgcaggtagagtagctgttcgacagattgtactgtttgagtggcgagctgtcgtccacggaaggactgtgggcaaacgtcattgtacagatttcactgttcactattcgccgtgctttgtgtcttgcacggatgtgcaggctcttctcaggttgcgggatatgtcgtgtttccgtaaataacacgatctatggcacatgtggtaaatcttttcacaatgtggcaagattcttgaccgctcagaacatcgaagtggccgttcgttgtgaaatacggttcccggctcacgctcattgactgtacgtacacagaactgaatcgcatcttgcatgcggctccggagcagggtatctctgaagaaaccaactacgggcgccgttgtagtttgttcgtagccttttctcgaaattcattaaga

SEQ ID NO: 2140 - DNA, 4866 bp, Toxoplasma gondii
  source 1..4866: mol_type = genomic DNA
caaaatccgcttgtgaaagatctttgcctccacctaccacgtcggctggcgcctcgtactccggtcgactcattgtgtctcgtttctatggagtgattctgcttaaaattcaaaattgtttgctcccctcagagcagcgctcgccttcctcatgtgcaaccgccttcacaggtgcgtcggtgttctcttttccctttcgatctcgtccttctttccccggataggggcattcctatcgagatcacacgcaaacggctgcgagagctgtcgtccgttatacatgacagaagtgaaagggatttgtgtccgttgttttggaggcttccttctctgttctcttctgggtacgcagttgaatgaaacacagatgtgcgagtcaggcgtcgctttccaggaaacaggggcagagaataaatcaagagtacgtgaagatagtggacactcggaagggggaccaatgagatggaaatggagggacggaaggaaaggaaactgagaatacaacaacagaaaagacgaaataaagaaacagatggacaagcgaggcggcaccagtttcttgttcagattcaattcagacaagcgcgccacgtagaagcgtcttgaatgcacgaaactctgctgctgagtgcagaaaccttccaagaaactgagacaaatggtcaaaggagccgagaaaaatggagctcagccgtgtgaggaagggacagcggcacggaacaaaaaccaatacgagaaacgctgatcaatcgcagcgaaggcgatctacgtacagaagctggggactgaagaacgcaagccctgtgctcgttgcaagggcctggcaccgaacgatggaacgtgggctcaattctcgaaaaaaactctacaaaacaaaggagaaaacgaaaaaccgggggaaaatccggcgcgattcaaagcacaaaggcgttcagtggggtggcagttgcggcgcatgcagcgaaaattgaggtacccgtaggtgatgacattctttgggtttattcgtggcatctaatcagaacgagatattttgagaggagcgtttgttctcgttaaaagctagagggagattataccctcaatttgattcagtttctgcataatttcatgatacaaccgtgaacagatgcatgcggtcgccggcgagtggatcgacttgctcaaaacggcgtttccccgtaaaggaaattccctcaatgttccgaaatgctttcagcgttgcattgacatccttatccctcacagttaactaggagcgtagaagtggtgggcgacttagtactttcagaaactccgagttaggaatcggtgtgcgtgctgaaggaggtaccaagcgtgagtagcagcggtagctgatacggcagcctatgtctcactcacacgtggcgttccacggcatctttgctccaattgcaaatgtacctggatggaattttcaaagggagcttgacagtggcacatgatagcggtggtggtcagagggccgttgcgtctgtgaacgcgccgttctaataatccgttgaactgaaatatcatgaagttcgttatttttcttagcttacaagtcaggaggtgagacactggattgcggaaagtcaatgccctaccaggtgtctgtcgaactagctgacgtaggctatcgcgcagggactacgtcgttacacagcccctgaattggtgttgaatatgtttccccagtttttggacctcactcgcgaaggcctggaaccacgtcagagttcctgtgatctttccgggggtgaacctacacgcgtgttcacttgcttcgacctgtggtgcttgtacatgaatgtatgtggacgactgctgagtacggtcactctccttgcggagaaatgggaatggattaccatcgagcaagaagcatgtccggtcacaaaaaataatgtgaaagcgatcccccccacgtcgttggagcgccggtgacggcgtggaacaagcaaaaccactttttcgtgagagttgtttgcgaacataatggcatattgcagtggactcctggtcagaatgttgtcatctgtagaggcaagacagaaataggttcgagaacatttccacgactaccgagacttgccgtaatcacgtatgcactgtttgggctgacttttcgcgagggagttgcctttggggtcgttttcagatctgtgtgatcgacgaatgtagtcctctctcaaccaaaaacacggtgacttttgccatacatagaattcttcgcttgactactggtacgtactacaaaggaattgccaagcgaaagtcacgggaatgaataggtgtgcggcagaggctttttgtgtggccacaattccgcggcattttgaaagagtcagagtgacaacgataagtctttaagtctttcttgcacccgcacatctgtgcatagcccttgccagtacacagttttgtcgcagagctcacatttactcatttacaacatataatctgcgacgacgagcagtgcggcacagccttaagctgtcttcaagtagaagcaggtgatacatttccacacgaccgccagtcctagatctttacccgtctggaaatgtaagcgaatataccgctgacatctcccactatgcaaagcaaatcgacaaactagttgtgcgttttcacggtggctgctgctttcaaccaaagcctaaggcggtcacgcgggactgaccctgggtaggcgtttgaatgtgtgcccggggaagaagcacggtagcttttaagtgcttgtgtccgtaaacactgcagaaatattgaacggtattccttgctcccaaattaactggaggccaagtatccggaatctagtacgagagaaattaggcttgtgaccagagtttggtgagagagatgcgtgcactgaagacatgaatatgtgaagaagcagagaaaaagcacggaatatgtctgtagattgaaaaccatttgctgctcggcaagaatcctacgctcacaaacagcctcatctcgaatagcggagcactcttggtgatagggatgagactccggtggagaaaatgggcttttccaagtcctacggttggtatttccaagatatgtagcatcttgatacgacatgatttgaagatgtcaaaggaaaatgttgagttgctcttcgtggcagtggcatttttaaaaggctggtgtacacttcccaacaagcgtctataattgttgctgtatgtgtaggcagcgggaaggtaatccacaccatttgaacgaaattgtgtcgcctacattttccagagtgtcacgacaacgattgaaacctttctcgacggatctgcctcgtggatacatctgctcggtctttcttctggaaaggttctcccccctttttttccccaattgcagccaacctgtagaccctctccacctcgtgaaaatcactgcggtgtgtctgtgttgcgctgtcgcaggccctccgttgataccgacggttagggactgaaagtgttcgcgataatttgccccatttcgtcccgaatcacggaaaatcggtgttaccgctcttgtctgtgttccgcccagcgacctcccggctgcctcccagttaaatgtggtgtcctgtcttttaaggccgtttgtctctccgaaacgatgccgctgtttgagtgtgtcctgttgagggcttgtccccgggtgtgtcgtgtcgtggaaagatagctccgtccagcgttatagaggacactgatcatcatgctgtttgtccgggactgtagtataccatacatcgtgtacaccacgctggctagcctcactggcggttcgttttcctgctttttctcactgtaaggccgttctctctcagatacaatttgcgtgtatataaaaagcgtcgttcgtccgtcggtgcacgctgaagccaaaccccctttgtttcggtgcggtggtctgagccgtggtgtgccggtcgggttgcataactgagcacttggagggaagtcttccgatacaactcattcacggtttctgggggctggcgtggcctccttggattcggttttccctcgcgaaaccgttgccgtatgtgatctgacaatacaccggggtcgacgaatgttgagcgatttccgtcccaagaaagtaaaaaaggaatgcttccccagtttggcattgcgctataggagagggccgcaacgctggatttgccgtgatatctgcactgccgtaatcgtatataggccgcaaagagttgctgcgcactttggaacgtggtagcgcggcagagcaagactgaaaactcataatcgtgttgcgaagcgattccacgtttccccctaaaccgcgtctgtatgagataaaagattggttttcgtcagacctctagagacgcatggccgccgcgcgaccaaaatattccccgtacgtttcgcgtcgcgacccttgacccgagaaagcggcgtttttccggctgtcggttgacgaattgcaaagacacagcatcgtatgtacgattttttcttgtaaaacgcatctctccatgtgaactgctggagaattgactgtttttgcctctccccgtctgctggttcctgtcttcccgttctcgcgaataactctctccgtttcttcctgaaactggcttgtcagtgcgtcggtttcgggtttcccctgctcagtttaaagttcagagccagttttcggcggccaacgatttcatccaggcaaggaacgcgcgcgtttcttctcgcttgctcggcgctgtgtccagaggaagaaactccttccggttgctgccgctccagagttaacgacctgtgtttaccgtccatttctccgtcatatcttcttccttcttgtcgatctgagggcgtctcatctcttttcgcggcttgcgggcgaaaa

SEQ ID NO: 2141 - DNA, 4649 bp, Toxoplasma gondii
  source 1..4649: mol_type = genomic DNA
aatcatttcggttaagaacgactaggccgtcattcctgtggaactgtttcagtaatcgccgtagaaaggagttcgtaaagagacttcttgtttaactgtggcttcgtctggggtagaagaacgggccggccggcctgatttgtggtcgtagtgctgaatcgagaaaggaagtactccttctccttcgaaagcaggtttctcttctgcaaagtagtgacagcttgagattgctgcagcggacgaaagaataactgctcgggactcaccaattctagagcttcgatttctctctctaacttctgaatcatcaatggacctcggggaccctcggactgaagttctttaagctcggcatcaaagcgagttctcagaatggcgactgtttgagcgtgtctttgcagtaacagctgcctttcactcttcgaagtggcaacagcttcccgcaagcggcacacaccctctgtcagttgagacagttgcgcttttttctcggtgacttgcctcgacagcgaggagagactcgcttccttatccgcctgttcacacctggcccagtggagctccgtttcgggtaacattacgccacacgcttacctttgcccgcttatacgatgtttcacgctccactgcattggctccactcttttcgacttgcaaggcgagtgccagcttgccttgaatgataacagcaagtgaaacccagctggtgtcagcctgtgctgttcggtatgcacttacgttcgactgcctgcgcttcacaaagttctatttccgaagtgtggcgcataatcgtctcttggtacagctgaagcctgatccccaaataagcaggttcttactgcggggacgtgaagcatatcctactctcgaagcgcagaggcgttcttaattttttggtttgtccgacatttcagttccgatgccaaaggaagccagactaagcgatgccggcagttgttcgtgaagattaaaacgaagcgaactcgcttaccctccgactgcatccggagttgctgccttgcaaatctgactttgtcagtgagctccgacagctccaaagcgaggcgggaattctgtgtggtttgtgcgccaagcaagctcatgaacttctctgtttcatgtcgagcagcctccaaatcgacagagatcaccattttctttggaacgacaacagcaggacgctgagtggctttcgtatgtcagggagagaagagaatctactagttctgtgtatccacccgcccgggtactcagacatgcctatacacctgaaacgctagctggattgaccgcttgacttcagcacgttgccttcgcaaaaaaagtgtcctctacttttgcagtgacagagtccttggcaggaacttgcaccgtcgttctttttggaacagccgatgtacagttttccggaagaattacggttctaccttaatctttgcggcgacacttctgctaagtgcgatcaccatattgagtgccattccttagtttattacgcacgcagagttggcaaaagcagcattcctgtgagtcacccatgcgccaggaaaacagaatacaggtatcggattcttgttggcatcgcacctgtttagtaactgaatgaacgcctttacgcctagtatgtgtggataacactcgactcttctctgttataatcactcaccgccgaactgacacaccgccgcagcaaaaaaactcctattgttttctttctgtggaagggcaagacggtgtgcaaaaagtcagttcgaacgaaaaacccgccgtgggatctgcctgtttcctagtggaggaattaatgcagtcagacggaatagaaaaagagagagaaatgcagtttaccttgccgatcggtgcttgtagaaaccctcggccatcgcgtacgtgccattagtaaaagatatcgcagaagtgttgtactgcatacagcagacacgacatggcaccccgaatctcctgaagtggacaacaagacacatcggaaacctgtgtacactgtcgcgacgtttgtgtcgtctactcttaaagcgaaaaacgaccactagcagtttatcacagtgtggactcacccaaggtgtgagtgttgagctccagtagtccccggtgacaataaactccggatcccagagtggcgcgtactcaggatctacccactttcggaaggcatggggaatctcgagaacgctttggacgtaaatgtcgcctttcggcttgggattaaacaagatattcccaactaaggctgcctcggccttgccagcagcaatgtgcacgaatgtgtggaggtcttgtccgtaagctggttgaaactggagataagtgttttctcgatttccatctcgacggcgcagtttacgcgggtgccgtcgttgattttcgatcgatcctggctttttgcgccgatgaaagagagaatcggcctgggtagttctgtggtctctgctagtctcaaagtatcctcttgtttgcggcgcgtctgcatactttgccacactaatgcggttcctctccagatggtccgggtctttcaactcttcagcaccaaaatgcgggcggccgagataggtggaacttttctgaatcgagtaaggccttttccatacgccttgagtttgaggctcctgcacgtgggccgtcaatgtgtcgccttcggtcccgtttccgtagtacacggtaacaaacataaatgctgagtcgtcatgcagcatggtcccattgagtgctgcaatatacacatctacagtagttggcggggatctggactgtactgcttcgacaggcacggtctcggtgatgtacagaatggtgaactcatgcgaagactctcgggattgacctatctcaattgtctctggtgtcgcgatttcgccgtcgagttccactgatgcttcctgcgcagcgctaacttgagacagcacttgcgcatcagtcccagactcgaatggcgcttcagcagccgtgggatctgaaattgctttttcggaactcgctgcaaaggagagggcaacgcataagagaaggaactgtgttttgcctcgtgctgtacgaaccatgatgtgtgaagggttcaggcgggaaaagcaccgagaacaacgagaacaacttgcaatcccttgggtagcctcttgaaatgcaggtgttttacggaatatactttagtcggcttcggccgcctccactacgtggcattttgtctcgcaagcggtttccggtgagaatccagaaatgcgaaagaagcttcccgaagtcgcatagcaaacagtgggtaaagaatacgaaaacagttgacagtggttgaacattttcacctcgtgcgacggcatgatctcgactttgctcggctgttttcagaccacttctgcaaatctgcagcaccatttaagcacatgtgagtcaacccactgtctaacacttagtatcgagttgatttattcgcaagcgatgaaccgaaacctcttcacgagccggtgacgtgccccgactgttggttttacttcagccgagcgcgagaccagccaacctctgcaaacaggcatctaacagtaatgattagttcaagagctttctagtccagcctttctctcctgtgtacttctgcgcaacgatttcattgctgtacgagttgacaagggggtgtacaattgccggccacacaaagcatctgtgtcactgtagccatgtgcgcctcattgttaaggcatgtagcgcttcagaggagagaaccttcggtgccaatggcttttgacggatgcgattttttgcagctgcacggtgctttcactgctgaatgcgtcagttgagaatcgaacagctttcgaacagggtgagtattttacacttctgagtagtgcaacgaagtcacgaaaaggcaaaactgttagtgactcggctggaccctgggtgcgaccgtagaccgatctcgacatcacgaaagcccttttagaagagtatagggacggtacgtggcacgtaaaacctgcaacggctctgaggctcccaacgcaattcccatgaaaaatccgcagtgcgctttgtcagtagcgctgctgatccccttggcaagtcaaccttttgagaatgaacagagcaccgcgacacctctgagagttttcagcagggaagtttgcacataacaagcagatacaacttgaaacacctcatgtgtactggtgagaaagaatatgcccttctttcgtctccgaagcggctgcattttgataccgagttttggctaaactgtgcaggtggatgtaaaacgacgcgttctttgtgccaaaaagaaaattgtgaccctcgcggcctctctatgattgtaatcttcaggtttgtttttactgtcagtgaagtggcaagtgagccgctcacgacccggtggttttgaccaacctacatcgcgttgttagacactttcatgatgcttctcggtggccacgaccagtcgtcgttagttctagcacttttgttgctagcaacgttctgtacctctgtcaatgccattgtcgagtccacacacctgaatatgggcatatcactacaagcggtcccgtcagaatcagtacgggaatcttgccggctgaaacacgggggcgaaacaagtcgcgatggaggtggaaactgtcttgttaatgcagctacgaactccggga

SEQ ID NO: 2142 - DNA, 3453 bp, Toxoplasma gondii
  source 1..3453: mol_type = genomic DNA
caaattcatgatgcggattttccgtgctttcttcgtaaggcgtcctatcacgtatttctcgtcgagccaccagggtgtcccgattgtcgttgcccattcgccggaggggtacggtggtgggatgtggatgaatctgccttgcggcgtatagggctgctcgattcctgtctctgggtcaatgtatcgaatgggatttttggtttcgacgtcaaaccagtcagaaatgtccgttccagcagcggctatcagaggaagagctaactcattttggtgctggataagtaaaggcgtcaaatctagaacacgaccgaagagggccacccaacaatcgtactgagaactgtgcctcgcgaggtcggacaaggtatagtaacggcaccgagccatttgtttggcgaccagacgaggatccacatcttcatagttctttaccgttactggtgtcttcaacatctttccggaattgttggttccactgcaatcaaaatggcttcgaagctcggtattttctaaaatcggttcccgtacgtgttgtaaggtcctcggtttcgttcctctggtggcagctcgttggaacgtgcttacgtgtcgagcgccgccaactgtcttcaggttgctcgtgttaatcgttgtgccggtagaaacgaagctgttctccaaacttgtccccacgtttttcaatgcacagacaggaaaccagcagcactgacgaaccagtcagggagatgacgagcatttctaccatctgcccaactgcatttctcaagcccttgctaattctcaacaacctccgtttcagtatcctattcagcgcctggccaatagcttcgaacaacaagaaggaggatacgtgttgctgcccgctaaactcattctgtacggccgacatcgaaaagggtgctcggggctgtccccacatgaccgtggctggaccttcggacttatatgggaaagcacgcctcgcgcgttcactggaataaactcgaagactttgttctgtgtcactgttggaggcccagctgcaacacactggtaacacgatattgcttacgattgtgccgcctcaggtacgccgtgacggtggttttgctgctggcaggaagacgcgcatgacgtagcagcatgaatggatttattggcgtatgcctgaagcagctctattatattgagcatggacacggtgtgctccgccacacgacacaaacgagcaagaacatttggggcacttcctcttttgtgtgttttagcaggagttcctcgtattgttgccaacctcctgttgcagagcaggatgacaaagagagggtcttaacgtagccgatcctccttatgcgagggtgatactattataggattccgtgatctatgtaaaggaaccagttttctatatgttgagcgcagttatttagcgctcacgacgaaaatagtgttgtcgagcctgctgttctgctgtagaacaggccatcttccgcgtgtaggctcctctgtgctggaccttgtgaatctggtcttgcgccatggtctagttaccagatttattgaccgcattgtctcatgggacctgcttcacgcatggtttggcgaagaaaaaggattccgtcgagggcaaactactgtttctgtaccgtgtgtgtggtgcgcgcttgaccgaaactcccgcgattcagtagcatgctcccgcgcttgttaattctgtagcagcgtcttcatagtggcgtagtgtccatcttcatcgacaccaaaagcacaaagggtgctgtatctagcatgcacaactctcaaaataacgatatgccgaataacagactggaagtcgtcacagccgtgagggggtatgatatcagcatgaaaggaatgttccagcaagatgctcacttgttcgacttttcagaagcgtattcctctacgctgtacatctgcgccgacgtacctatgtagaggtttacctgggaatcgcgaatctgtttccccaccaattcagttacagattatcctcacccactgatgcacctgtgcactgccacccatatacacggctaacatcgtgcatacacgcggttggtgaacaatcccattcatatcgatctccgtacaaactcttaaggtggtatcagcatgcgtagaccagagcggtgcggacagtggtcgcgctgccagttcatgtgctgtgcccgttagagttacgaattcgtggccagcgcgaaagagagcacctcgcctagtagccgtgctcgcaattcaagacaaaacgccggaggaatgcttattcactgaagtactccctgattttttcaaggaagagccacactgtactacgatgaggtgaagaggcgacgcggaacttcgctgagacaaaaaacgatgacgtgccttgcgaagcagcagttatcaccatgttaccttttggcattgcattgtagctcccaaaagacgtagggacacagtgctgtgccccgaataccaccactaaccagtttcacaatagtgtagtctccacacgactatttttcaggcctctggcaagccagggaacggtgcttgaccgcatctcctagactgccctgtaaatgaaagtttactcgttgtgggtataacggatagcacggttcactttgacttttcatttgctgtcaaaaccgcaaccgtcacggcatatcggtgtattagccggccgtggcccccaggggacctttgccagttgttgccggacctatgagtgcgcatgcagtcggacgaaggaactcgccagctctctaccgtggggagacgaacgtctttcagagcagaggaaaaggtagcggttcttttcggaggagaggaagtctagaaaagggcagcgtagacggtcgaaaagcgcagggaagggaatttcacgcgttccctccttcttcacgttccctctcggcagtctgcccccctctgccaagttcgcaactcccaaattcatgtgtttccccccacatgttttgctcgtgtatctccctcctctcccgttgctccagcttttgccttgacagccttttatcgcgtccgtctcctctttcgcttgttctctaaaacatctgacacacgagcggttccgcctgctttgtcaaaaaaacacaggaaaccaccttttctccgttcttcgccgcgacgtctttgaacctagtcctccactgacttctggcgtgtctttggaatctgcattctttccccggtctcgtctacagccgccttttcttcggtccgtgagtatttttgtctctttctcttccgtgcgcctctccaccgcacccttcgtcccgtgtgtccgtgttttctcccttcgcctctctcccccgtctccctgcacgactctctgagttcttttgggtctttcactttttctccagccattcctcccgcgacctcagaggaatctccgcttttctccgcgaaaagggtacttgcttcccagaaaaaaagtcgcca

SEQ ID NO: 2143 - DNA, 3590 bp, Toxoplasma gondii
  source 1..3590: mol_type = genomic DNA
ggaacagcagagacttcaagagctcctcgacacaaaacgaaagtcgcagagagtcttggggtcgagcaagctgtcggctgatcgggagccaactgaggcggcaagcgacagaacgcgtttcggacgcgagcctggcgtcgcgtctgcgtgtcaacagccgccccgtgtcaactatgacactgtttcctcttgtctgtcttctgattcctcgcatgcgtcttgttccgtttcttccttttcttcgtctccagcttctcttcctctgtcgccgccttgctccgccttcggggttccacactcgctctcgacgcaggttgcggcgctgcacagtcagcgaagggagtcgttctccgcctccgacgggggcagtggcagcttccccggcttgggtgtacaggatgctccacgttttcagtcgcacagctccgtcgccgtgaagccacagagtcagttgcagtctgctggcaagcggcggttcgcagcgtttctctcatcgcaagaaagcagcgcacatggggcgggaagaaacacccagacgaacgatgagcatctgcagacgggacggagcaaattgccaggcaacttgtgtgacacaccccaacaacttgcttcttgggtggacgcggcgccttccatggaacggctgcgcgcctgtcgcaacgaagatgcacaaaaccgttcgaacgcagttgacgtgtctgcacaccccagatccgatagcgctaactcggcgcacacacgttccccccacgtaacggagaaagcgcacacttcgttgactttcatgtctttcaaaaaaagtgcgagtcgaaccgtcgtttctcgttccgtcgcctcgatttcggcgtctgcatccccgcggccttcgccggacttcgccggtgacttcttttccggaaagacttgcagtggttaccgacacgaacagaaagacatgccaacgaaagcacgcagttctccggcactctctgattcggagcggaaagtgatgtcggccaagacacctgaaaaagatgtagaggcgataagtagggatggagaagaaaaaagggggaaggggacagaggggacgaccttggcgaaggcggtggatcgacaagacgtggaaaagaaaagtcagaaaatgacatatctccaggcaggtgcgaaacaagcgacgaaagagcaaggcagagcaccgtgcgccatgcagaggaaaggccttcagaagggaaagaagaacgaagcgaccatcctagaggggcagaggcatatcactcgttattttgcgacgaagaacaccggggagagaaaaggaaagggcgctgatccagttattgatgttgacaacgtgtcgcacccatgagaggagaaatggaagggtgcttcccggttcactgtgaggtggatgggacctgagtgctcagaatttgttcgaccgccacattcggtcgactccgagtaacaaacctagggaaggtgatacaagagaaacgtgggccgctgacgagagggagaatggattccacacgcctgagttgttcccttcttttctttctgagagtgaagagccttgtatgtctgctgtgctgatgtggagagcaagtaccgcagagatggtgctgtgacgtggccatggcgatgaacgtagatgggaggtcgagtgaagcgtgtgtcaaggaatcggggaacggtgtgtgcaagcagctcggtgctaattgaaattggtgaagcgacatatgaacagatgtggaagtcgcgtaggtgtttctgatttgcgcatctgtcgggaccaaaggaagggaaggtgagggatttatgttcgttagttttatatccaagttctcacgcatcatgcaacagtagaacgctcgttcgtttattagacccactcatgtagcgtttctaccgttctctgtttctctaccgattgtccggcaacatcttccccatggtgagctagtatagcattgtcttagaatgagcagtcttttccgcactactgctttagatcagctggacaccagttgtgggagtgtgtttctacttgtggatatcttgtttgtatcgggactttaaaaatgtcatcatgcgagaccttttcggatctacatgtcgtggaggcgattgcaagtacctcattaatactgttttgagggcgtaccgtccctttccatgtcctgtggcttaaatttttgaagtgaagtgtaatgaagcgacatacgggcgcgaagagctcagcccaaaaattcccgtttgagaacaaatttgttaaagttgctcaccaacagcttcctctcccatttgcctacaactgcagtcttcgataatgggagagagaaatgtatgtcaaggatggtgaggattttgacggcgaaatcctcaaggaggcgaaacaggtctttatgaacgtcgtggctcaaaaacaagtttcaagttgccgcagtcacaaaaatggggggagggaaggaaatcgggccgaggtgaggtcgtcttgtttcgtttttcggaggtttgtccgtcccgtgaacgaactttcacatagctaaggaggtagaagtcgaaactggattttctgtttggcttcgcagtggcccacagagcgggttctcgcacaagaagctttgttcggacgtacctgtttcactgattaaaccgtatacggcgtacttctatgtcaacgtgtcgccaaacagtggctaaaagaagcttcgtgggaccggctgcacagcagggatttattaacatggttcagtcgtacactaaggtgatccaaggaacgctgagaactaaccgaggctaccgtggtaacggcttctagtggaaagtgcggcgtatgagcggtacattataagatctgatgaccacccggactcggcaacacactggaacctggactgcctctctggaaaatgtgcagcacggctgctggaccctttttgtataaaagggaggacgacatttcgtactactcaccggctaacacaagctggacgcaggcggccgcgtctcagcagaagtctaactgcagccgtcacgcacacgaattgtctaggactgcagtatgtacgggtaaaaaaagcgggatccacaacggattcacctcacgtttgtaggcacacgggcaaaaaggatatgaggacactatgattcacctgaaagagagaggttcgtcttccgtgatcggtgtatggctgcaatgtagaaagagagaggttcgtcttccgtgatcggtgtatggctgcaatgtagacatcgtgttggttgttaaacatggaatcccatcgacgaaaggggtgaccacgcgctccgctcgaactgtcacgagctgtctatccctcatcgcttcttaccgactagtaacgaatttctcttcctttcaattgttccgttgtctgaaggcaatcctccatgaaaagtttgccggtgtacggctggtggaatgagaaccgtgtgagttgtgtgtgctccacgttccataacttcgactcgctgaaccggcagtcaacccataacttcgactcgctgaaccggcagtcaaccactgtgtgacaccgctggtgtttgagcatcagaactcatcatcgtgactgcatccagaaagccgaaga

SEQ ID NO: 2144 - DNA, 1941 bp, Toxoplasma gondii
  source 1..1941: mol_type = genomic DNA
caagtacatgcatacctgaaagtgcagttgccagtacacacatatacatgtgcatatatatatatatatatatatatgtatatatatatatatatacccatacgcatacacaaatactaaccccgatataaataaacacataagtatatatatatatatatgtatgtgtagatatacatacatacacacacgacgtcacataccgatatatatatatatatatatatatgtataaacatctgcctttttgggtattttggagggagacactgtggaggagacaggtgaggctcctgcacgcaaggggaagcctttcgatcttctggactggctgcgagtctctgatagatcaggctgcctcgtttctggtgtgagaagacgcttctctcacctcatcagcctttgtgcggactctgttgtaggtgtcagtgagtagctttccccacatggcgtcgaaccgtttttcagtctgatcagaagaaaaggaagttcggttctcctcgaggtcccgttctttcggaaagctctcggcacttggcggacagctctcaccgcggcgaggaaggagaaagagagaagaaaggcgaggagagaagaagcctttgtgtgagttgaaagaccggctgtttgcgactggggagggcgagatacagccaggactgctttccccaaactgtggaggtgccaagcgcgcgtgaaagcgctctgcacgtagggttggttttttccgagtcgaagagcgacgagaaaattcagcaaagaggaaggcgctccggagagacagaacggaggcaaggagggtgaaggtcgcgcagagaccgcgtccggggggccgtcgctgcggaagaagaggaagtcaaggttcgacaaaggattctcgggacatccgcgtttcgccggcgaagtcctttggcacccggtgaggtgtgtggacaccggaccgcagagctgcgccctggggaagccaaaagtcggaaaagtcaaaaggacaagggaagctggagaagtgtgcaacgctttcgcaacattcagagacgaaagaaactggtggaacgggaggtcctctggcgtgcttctgcagtgtacagacacccgggagccggcgaaaaccgacgctggttgaggagagctttcggggaagtctgtcagccagcggcgaatgaagtcggggcgagaagacaacgggtgcatgcaaacaaaaacaccgttgcacaggaggagtgggcgttgcgctgtcgcactgcgacacaaaacggcaccgaaggttccgccagagaggcgactcgcctctgaacaatttgcacagtttacttctctcggtcgacgcgatcgtctgaacaacacaggagggttccaaaaagtcttcctgccaaggacaagtgccggacgagcgctcccgcgcaaccgtcggcgcctgcagaggtatcgctgtagagagcgttccctgttgacaaaaagaaggtttttgcaaagaaacaccgttcgagctcctgcatgcgtcggcgatcctctctcttctccgtcgcgcttcgcagaacacagaaggggacgatgggcagtcctcttcgcaggcgcagatccgcgtgaaaaggagacgcctcgctccgaccgacgaaggcaggtgaatgcacagcgagacaggcgctggattgagacagctcctaaaagggagacacgacggaccctctaggaaaacaggagagaggaggagagggcggagaaaaagcaagacagagagccagcggagaacgcgaggggacagagcgagcagaaagagagagagaacgaggagaacaagtggggagacagaggcagaacaagtgcagaaagagagtgtaggacagaacaacgcaaaggggagaacgctgacggcgaaggacgaaggatcgatgcggagaccggaagttgcaaagagtagaagaagctgaattggggagagaa

SEQ ID NO: 2145 - DNA, 4273 bp, Toxoplasma gondii
  source 1..4273: mol_type = genomic DNA
ctgccacaaaggaaactgttgcggtctcagctggacaacgaacatggcgcgcgccgttctatctggagaagtcctttctctgttctgatttctttttcgacttacgaacacgaagaggcagcagttgatcctctgctcctctgtcgacatttgcgacgtagaccgcgtggaccattacccagacgctcagcaagagtgccgtgagcatcgtgcgtgcaaaacccatttttcgaaaaatcggcaggcgacgtctctggagttttcgctcttctcttcctccagcgaccgctccgagggaaatcgcgaggaaaggcaagccagcaggtccgctgcaagacctctgttacaactccagaagtgaagcatgcccctcgactacctgagtgtccgagagttgccgggacagttgcttcattcgaaatccaggaagaaacccacagaactgcattcaaacacaagaaacgcgacatcgagcaccgcagcgtttcaaagaatcgaagtccacggacttaccgctatacctgtattagatgtagatacgtatgagacaaagacacatatacttgtgtaggtatccaggcgtggaagtttgtgtgcatggatgcagaaactttttcagatgcacggtttgacggctggggtcaagacgaacgcggaaagagaagaggaagcaccctcggtgaaaaggcaggcacctggatttaaaagtggagaacaccgagtttcgctcgagtctgagaacggaatggggaaaaaacagagacacgccgacaggcagcttgttctcagtacagttgctcctccgtccagaggccgtcctttttttcggagctctgtgcttttcgcggtcgaaagtctctcgaagaaaaaagtaagctggagaaaaaggcgagtgacagttttgcacgaaacgtctcgcgtttcacttgaaggctcacagcttttcccggcgcttctgcggcgacgcgcttgcgacagaaaccgcacgacggcgacagggtttcaccgtaaaacgctcaaggaaaacgagaagaaacgccttgccaaccgcccgatccgttttccgtcgttcctgcgtttcccttccgcgaatttgccactttcaactggacttgcttgcctcaacacgtgacgagctgcacgacacaaatctgtcggcgagttcggcatgcagaaagttccttcgtgtgtgtcatggcaacgaaaacaaaggaaagcacgcatctgcgcagaaaagggcgcgagccgaaacggagaaaacggaagaagcagcaggaaaacacccgtgcaatgtcgggcaatgtctggcggggcttgtcgccgcggctggatgagggttgtcttgctgaaaactcgcggctatgtgtcacacgagagaagaacaaagacacacagacatttcgcctttttcgacttttcgacgccgctgtttcatcccgattttttattagaatatccacgaacagtctccgttacagcgactgcatgcaacacagagcgtcggaggcgcgaaaacaagacactgctagatgcgccacacacgctctctcgatgccgcttcaagccaatttttggaactcagagcggttgaagtcttttgccgaaacaggagtcaaatcgaaggcctgtctctcagctcacctatgcacagcattcaaatcaaaaagacactcacgctctacagctctctgcagcacataaagagtatacacattcatatacagaaggagacagggctgtacacgcgtgtatctggagagaaagagaggcaaatgtagcaaacgtatataaatatatatatatatatacgtaagcacgtatatatttgtgcatatggagagagagatgtacatatatatatatatatatatatatatggagagagaaatgtaaatgtatgtatatgtgagaaaaaagaattcgaaatgctcggggactgaacgctatgaaggctacaaagaagtagtctagatgcacacgtcgtcaaaggtaacgagttgccagtgaggatcgctagaggtaaggtgcattcacaccagatcgacgcgtgcaccgcagtgtgtgggtaaatccacactcctccatttccctgggtgtttgtgtgtgcgaacgcatgcactcgttcttaaaatgttcatttgcacatgcgtgcttgtgtgtctacgaagaactgctcagaaataatcacgcccagttcgcatggggtttgtagcgcgaacaaccgcgctctcctcgaccgcccaatgtgtatggcatctttcttcgtacagattggtcacagatgctggttttgcaaagatgccctggtggaggtgaattctacagaaaccggatatccaaagacacttcacgagcatccagcaaagcgagaaaaggcttcaaaggcagttttctggaccgagcgtcgtcctttaaacgaaggttcctcgcttcctgtggagagagaaacggtgaaaatgtgtccagggattcgcagcaaaaaactcgtccatttcgggggcactgcctttcctgaaataaaaaacggagttcttgagtccgtgtcatctcgcctgaccaatttttcgtctgaagttctcgcgaagaaaatctatgcaagtttggaaacagtctccgtgctctttgatttcgagatgtgtagccagtgacgcttcttccccagagagcgaaagccgcgaatgcagaagagctatgtgtcttcacacactcacatcgaatccctctccaaacacggatgcacatgcatacacaaaccggcctctgtggactcgacgtgaagacggcaaagtgctgacgcgggaaacagcggctcgtcgtatggccatcacaaccccatttgtgggtgaggcggtgaacgcaaatcacgcgcaagaaagaagcgttcgctgcccagtaaatcggatgaggacatgacagaagactgtaggaggcacgtctacgtgctctgatacttgggcgacgaacagcgacaccctcgaaaagtgacatactcattgcacggagacatgcacttatggaacaccatgtacaggcacagtaagtatatatatatatatatatatatgtatatacatcggcggtaaagtaagaagacatagattcacttgcaagtaccggtaaaatctgtgcattgagaaaggcatttggatgcacaacagtgaacacagacggtgccagctgcaaagatggacattctgatccttgtgctggcgtatcatcgcctgtatccctctccggttttgaaatgtggcagggaaatatccttcgcacaaacccccgctgcgacgcggctgtcgccttcgaagttcagggaactaaagaccgccgaatatgttttcgcgcaagttgaacctttcagtgctttcgagtcctgaggaaggcgcccatttcggcagccatcaacctctcgagaacgagctgctggatgtcgtaaccccagcaactccgtgacacggaaccggacattcgcgcagtggttcatcggtaaattgcattcgcaaacgctgctgaatccctaccgagctaacagttttacggacgacagctttcacgcgcaagctgccgggttacctctcacgtattctgccagctgaatcagaaggcgcggcaaagctacaaagttagttcgcccgtcagaaacgccagcgcgtctttttctagccgccgactccctttgtcggaaacccattcacaccaactacccccgtctctagggtcggcaaaagctcccgttctctgtcgatagcctctccacgtgaaactatctaaaaagtccgtcagttgaaaggacaactacgccatagctaaatccgtcatcgatctgaagtcgcaaaaaaaagcaccccgccacgcaggccaatgctgagagccggaatcatccgttgtttcacagacgcgccacgggaccatccaaatcgaagagtcgaacgattcgagagagtctgcgttgtttgagaagtcattcccctgcgctgcagcgatctggagaaaagatggccggtgaaaagcctcgctattttagagagttgcgccggctctgctttccccgctgtggtttttccgttcacacccaatatacgccggcgggactcgcgcgcggtagggccatgcaagggcgatttttctcacggcaaccaccgcagaggttcgtttctctttcgttggatttctttttgtggcgttctcgagagaggagacgacgcagcctgcggggctcagcttttttctttaacggtttgggctgtctctgtctcgtctgctccccgactaaaaa

SEQ ID NO: 2146 - DNA, 1465 bp, Toxoplasma gondii
  source 1..1465: mol_type = genomic DNA
atgcagagtcctgttgaggtatggacgacttgttcgttctcactcgctgtcgtagatgtctcgccatctccggtcactttcggagagcaggtctctcttctcagaaagcgcgttccccgcgtctgggagtcgcagatgtgtatgtgtgtctcggcggaggcgcgcagaagtttgcgagagtgcgtcgctgccaacggagaaatgtcggaagctgcagaaagaccctcccccctctgtctgtccagcggcgcgcggtgcagcgcgactctcgcgagtgcagagagaaacatgcaagagagtaaggcacctgtgcagcagctctttggagatccagacgcttggttggtcttctctgccctgctctgagatgagattacgcatcagtgcttgctctggaattgcagcagaacagatgatatggggacgagagtgaggtcacgatgctcggcgcagtcgctcgaaacaggagttcaactcgcactgggtgtcgctccccggaagagccggaagagtcttgttgcacacaagtgaccaaggtccgcttgaagaagtcttctttccgtccaattaaaagcggaagcataatcgctgcgcaagaggcgactcctgccccatgttcgcccctctgtttcccaatagtggcacagaagccgtaacacagtcggtacgaagtcgaaacaaggcagttgatggtgaaccactggctgaacaaaccacggatcggactcttgttggcctcgcacctgtttagtaactggatggacgcgtttgactcagcgcgcggcttcggcctgagagcctcactagtagccactggctggcgcacagatgctgagacagtgtcctctctctgtgatttcgcggtctctcgcaatgctcggaggcaagcagaaacggttctgacgaaaaggacatcctcagaggcttgcagccgccgaccgtcttgtggcgacaatacacactggagttcacgcatatgaaagtatagaaaaaatacatacatatagagagctgtatatgcttcactgtgtgcacaggtgcaaattcatcttctcacagaagagaccgtgtctccacacggagactgcagcgtcttgttcgacggtcgcgacttcttgaagaagggtggaaagagtttgagcctgtcgcattttccagagaacggaggaagtggagactcggaaaacaagaaatctgttcagcggtgtcgctgttcgctttttcttcttcgcgggtgcgtcagagcgtccttgcgcaaatgtcgagcgcgcgcatgcggtgtcgcatcgcacgagtgtgacgtctctcgctgagtttctcctgcgttttttaactgagagcctctctccgttgcgttttttctctctttgaccttttttctcggtgtctctcccgctgtctttgccgggggcttcgccgcgacacgcgcgcagcgctgctctcgcgtattttttttttgtcggca

SEQ ID NO: 2147 - DNA, 4702 bp, Toxoplasma gondii
  source 1..4702: mol_type = genomic DNA
gtacacagacgatctgctcttgcatggatctgcagacggagatgaagagctgaataggttgatggagagagaaatcgaggaagacagactgcaagacacagagagaggaaacgccgcaccgggtacaggtacatttgtgcgtcgatgcaggttctggagtccgagtgaggaggtcgcaggttcctgatgtatcgcgttcaagacgcgctttgcaagagggcgttgtggtacgcagacagggaaggcgaaatggcactcacgtttggcgtctttgtctttcgcgcgtccaggagagactccagcgcctgccttcctagacggccgctcgaatcgttccagaaacgcgcgacctgcggcctctacgcggcgctgagcggtgcagagagaacacaagacttgagggggacaggagacgcttgagtctccctcagtgggctggaagtcgcgcaggcgcggaaggaagaaggaaggagggaagaggacgaaaggagacgccatctcggaagacaggaaggacccagaaaaagcgcgaagggagaagccagaagaggaaggagacgaaggcgagacggagagaggaaggagaggaagaaggccggcacagggaagggagaaggtgaagaaagaagaccaaggacgagcgaacgacgaggagcgagcggatttttgcgaggaaaagaaagcactgagggacagtcgactaagaaaaaggttcgttctctcgatgcgtccgtggagaagggacgacgcaccaggagacagggagacgcaggacgccggagtcgacaagagaaatggttgcagcgaagaaagcaagaaacaagcctgagactctccgatatttataccgagtgtgctatgcaacagagcctctttctgcctttcgtcccttttcctttccttcttctcccccctttccccttttatcttatttttcctttctctctttctcctttctccctcacgagaggctgtcacggagtgagagcctggccgcggacggagcctgggagagagaaccgaacggcgaagagctacggaggtcgtcgttcggagtcttcgtactctcggatggagggaagaaggcgcgactggtcgactttcttccaggaaaaggactttcgactccaagaattcacctccctccttcaggtcggcatgcgcatgcacagcatttttcagcagcccacgcgaaaaaggcccagagagtgtctgtgtctccctttctactttgcctgggtgtgtgtgtgtctccccgaggcggctgccgatctctcgttccagtcgttttcgacgccgcctcttccattttttcctttcttccccgcggagggtcttgccttgtttcctgctccgtcgcttcgccccctcgctgttcttcgctgcctcgacctctcccctcacggtgccccaggcgaagtaaagaacggcgttgccctttgaagaaggaagaacgaccgccggagcgcttcaggcagcatgagatctcagtctcatctccacaaagggaggttaagaggacagagagagagcgagggaggaaccgaggaaacgtttccagaaaaaggaaaggcaccagcttcgcttgaacgagatccgcgaacgtcgctgtttagatgtcagccacaaaccccccaccgctttctcctcggcctttacttttacagaagcagcaaaacgcctgaggtttctctcgcctcgatgtcgagaaaggcgaggagtggagtgaactctgcatatgccacaggacagttttcccactgcgctctgcaaagtccgaaacgcatgcagttagaaccgaaaaaggaagacgaaaaactttcaacgccccctacacagtccacttgcctgcgacgcgtgtctccactctcgacaaagcataacgagaagacgcacgaggctgaaaagttcagttctcacatctcccgaaagccccagtgcctttgttggttccgttcgagttgaggaaagtcacgttgttctcaaagggggcacaagcagagtgaatgcacgcttgtcagcgagtctgcatgaaccggaaaaagaaggcttttcccggtttttctccatctcttcagagctgagcagctccacgtttttcgctgaacggaggggaactccaggatgggcgtcgaggcctcgatctaggagcacgaagaccgggaaaaggaaatgtcacatgcagagttgaagaaacgatgctacctgcttcgggaaaggggacccagaggaacatccagtgaggaagataggtgtgtgcaggttcatgcgaaacagaggcagagagctctactgacctcaccgaaaaaattgctagaagcttcctgctacctgtctgttcactgcacagaagagaaagtgaccggaggtcgtagcttgctggcgcgaaacagctcacgcaaacatgaaagccaggagaacgatggtgagaagcctggcaagcgcgtttgagcagccgagaacctgttgggaaatgaaaacacacgtaaacggttcctctttctcagtctactttttccagattcacttggacgcctcgagtttcgccgccgctcaaggcactcgggcatctcgctcgtgtctcgttttccagcctttgcaccaatctcggggagaagaaacagagagcgagaaagtgacagacgacggtgcgttccttcctcacgccccttggggaacgcgtctgtctctgggggggaggggggatttcgaacgaaaagaaagccgaagaaacgaagcaaaacaatgtctaacgggatgtggtagtacctgagacaagactatttacagtcttctctgtggagtttgtaaagacgttgaaacgcttcgtttactggatgcgacttcggtcatgtcctcttcgtgactctctaacgtcgttcaggagactgttcccagagcactgcattcggaaagccaccatttctttaaatgctcaagttgtccaagtaccctcctattcaccttcgaaggagttaagcctggtgtgtgtacatcgccgaaaactgtgtcggaaacgacgcatgttcctccagactgctgtctttctaagccgtgttgctgtcggagcctcgtcagattctttaccaaggataaacgcgagaaaaacacagcagtttccacggttctttccatacacagtgactgcagagagatctcctctgtcttgcagtggtggaaggggaatcgaagaaacctacgcaatatacagaagatctagggtacagaggaggactcctgtagtcgatgactctttttgattcgactgaaagagagactctgggagattgaacatcctgaaaaaatctccgcagggtgtagttcgcgtctccacgttctccgtttaggtacgacctgcgtaggactgttttctctgtcgttttcggcgcgttttacgttcatggttgagttgcgaaaagctgtgtggcggttctttttctttttctcgaactttccccgctctgtcccccggtccccttttcgtttcctgcctcctccgcgctcgttgtcggtctgcgccgcttcctcatgcccctgcgaaaatcgcgggggtcacccgacggctcgggcggaccggaacgctccttccttgcttggcttgttgcacggccgactttgactctcgaggcgtttagcagcttttcttttcaacgcgtagctgcctttctcctgcaagactccggctttccttcctgacttccccgtcgttgtgcgctcctcccaacgaaaaaaaggttccccggcgcggaggctcttccccatgcgtgagaaacgacgagttttaactcggttccggtgaaaaccttcaggcttgtcggtcccgtgaagagccacagcgaaagaggccggaactccgaaagagagtttttcactgctctcaacttttccgctggaaagaagtaaggaaacgcggaccgttcgaggaacaatcgggacgctgcttagccagcaggcagcagcagggcaacgctgtcgggtctgattttaacgttcggcgtttgagaaaaaagagaaagatgacagaaacgcgttcttccgtacgagaccctgagagaaatgacattcagttctttcgttttcctgctttctgcgcaaagatttaggactcaagagcgcctctctctcgagcttcaagcgaaaggaatctcttcgcactccgggctccaggcaactagctgcggctcttctttgcggttttccggcttttctcggctttaaaaaacttcaaatcgacttctttttgtccccggactgaaggcgatttctcgctcccctttgtccctgcttacttccagttgtttcgagccttctcggcgttcgcttctcccgtgcagccttcagcgggccttccgcggttttttcgaaaaaagagaactcagccaattctcttctctccgccgctgtacttttcataacatccgcgtttttccgtctctctgctcttttctctgggttttgtgcatttctcaaacgaaggcttgggctgctttatcgctcccgtgtccttctctttcaaattctctctctcctcatttttccttgcttctccttctctcaccttctccttctctttctctctcgttgttcttttctcaccttcttctgccctcagcttctcctcttccttccgccgcctcttgagtttgtttcttctttttctgcggctttctccccttggattcttcctcttttgtgtctgcga

SEQ ID NO: 2148 - DNA, 3662 bp, Toxoplasma gondii
  source 1..3662: mol_type = genomic DNA
gagctcgaccagcttaacctgtgcacggaagcccagtcatttgtgaccaccttcttctcaccataaaccctgccgtttcgtggagagaaatttggagacttttccacctggtcgggacgtccactcccaaaaggagctgcggcccgcgcagaggatcgcgtccgattagccttgaagtagttaggggaagggatttccgaagtagcgtggtggtccaagcgtagagtttcctgctgtctcctgtagccacgtgtttgaagcctctctgcgataatttcctgcaccttttgtatcatcttcggattagacccgacgttgacaatccagtcaattgaagcgttcacatcgtccagagtgacaactgttgaggaaggtggagtagaattactccagtcactcaccatcggtgactctttgcggatcttcccggatgcagtgtctcgccgagtgcacgacacttcacagtagctctcgtcaaaatattggttgccggtgtaagttgaccatccatcgctccgggcaccttgactgccactcggagatgtggaagttacactcaacctacaaggagactcttcctttcttccacgaagcaacgctttcttcgacaacacttgctcctggccgtttcttgacgaattctgcccaaactgacctaccgacctgagtgatggtgcagcggtgggtgctgtctttcgatttacgtttctgccctcgaagtggcgcctagtctcgagcggccgaggaggtcgtctgcatcttggtctttctcttgacatgctcggcagttccgcaaattcaccttccgtaatttctctgctttgaggcaattcgtctctatcggatccattcacctccatgaagtcaacttctgaatgcgaactcctttctcgatgccgagagacctcgaaaaggccatactcgttcgcttcgctgccgcttgccattctcctaggtgtctgcggtagcgacaaatcatgacgataattcgataattctgagtcaccacaagagtcggcttcccactcctgttgctgagcagtattccgatctcgcagttgatcttgaaaactccgatggtgcatgctccggatatcatgagagccgacgcagcccgacgcctgcacatgaatgttgttctctctagacgcgctgtttttgcgtcggcatcctacagtttgcctttcgtcgtctgccatagtatcttttgcagcctctcctgcttcttcccgagtatttctccagcggcactcattattcacagacagcctccattcgggaaacgatgaatgatcacacgcatcactgccgatcgatccacagaaatccgagttgtgctcgttctggttggatgcaccggaacccacaaaaattttcttcagacacttatttgccctgttccccaagtctcttgaacgaatcgttcggccgttgtccgtgctctgactagcacagtggcaacttttgtgcttcagtcgctgcgaaaaaccaacttccttacactgtctttctggtggagcaagactcgcctcgagagggaaagtccctggttgtccgccccgtcgacatatagagtgactaccatgagtcgctggcggtgaatttatgtctctcctccatccaacggtctgactacttctcatttcccgttcagaactgcttgagaaatcgacccacgaaacaccacttgcctcgctggtgctctcgctgttgtacgactcgtcgcttccacttgactccgttcgcaaagcattttcctgggtcattcgtgaggcaagtccttgactacccttcgatagacgctctgcgtaccttgtggcagacaagtgtcggcgactcctgtcttgcctttgtgtgccttcgtacggaacacctgcctcgcaactgctcacatcaagccgcaccggcgaccactgtcccgcatgttgacttaagaacttttcgctggcgctgttgctgatgatgccaaccttcggggacatatttcgtgctggtgactcgcttatgcagagcctttgctgcattgaaggtggtgatcgcgaccgacagttcgctgactgcacgtttgccgcatcctcagggcacgagcttgcactatcaccgccagtgccacacgcctcagaaggtgagtaggcatcggaaccagaatttccacacgtgtgccttcgccctgtagccgagtttaacaacgccgaaactacctcagctggagcaaacccctgaaggcggcgacgtgaacagacccgggcacgccgccgagctgacgcgagccggactcgaccgtcgcctagttttgtccagtgcctctgcattgtcgatgtgcaggcgattagatacccgttacaaaatatcgagctgactaggtatggtaccttttgatcagaagacgcacagccagctgttgggaagaatgagaatttcttaaagatgtgtcctgccactcgtaacagctggatggacggcgtgaacatcgtccgagctgccacggcagcttgtggcaccgttcaccttagcacgcagagcgaaggaaaaagtcacttgagagaagggacaacacgcttttacgggacacagaaagatgacgcaggaaaccgaatgactctgttggccgtttacgtcgttgagttatcttttgagagaaaccgccgtcatggtcttactgagctagcactccggcgaagtctcgatagcccgagtgactgaccgccggcggtgccaggcagtccaagattgactgcccggacaaaatgttggcagtcaaatccgaaagttttcaaccgacaaaagtgtaaccagatttttgtgaaggaaaaaatatactgaagttgacgcaggtcctctacgtactgttttgcgtagactcaggtgtgttgctctccaactcctccggacacatggtgacaatgcggagcgcctcagcaccagatagaggtggaggtcgctgaggttctcgatgtttgaaaacagaacccgcagtgcgcgttgcactggctggcggtatgatggggtctacgtcggcttgcctaacagagatgcaccagacggacgtcttggtgcgtgtcgagcagcaaacaggcactcggcaatacttcagccatcgactgtcaaccgcgactgaaactgaaactagtcgatttacggagtgggagttctcatttcacaacagccgctgtgcgactttacaagaaaagcattaacgataaacggagtacgtagtgctaggaacaggccacagcagtcagcgaaaatatctttggtatccgaatcgcggggcgtacagccaccatttgacgatcgctgaagtcgagaaaccggattaggtactggtgattctactaccacccactagccttctcggaaaagtactctccgtgaccgtgcttcggttttccactgtttcctcgttcaacgtttcgccaacgaaaaaagatgtatgtaattcaatgttgcgatctggcaactgttcggtgctgtctgtacactgcggtctttcgtccatagcttgccgctatgagaggcgccgagtactgaatcactctgtgagaagaaatgagggtaccactggctgcgtaggaggcaaaacggcgaggcaaacatccctgggccaattacttgtgaagtccatccacttgcagtataccgctcagaagcagcaatcacga

SEQ ID NO: 2149 - DNA, 4175 bp, Toxoplasma gondii
  source 1..4175: mol_type = genomic DNA
gaataactccgtttgatcctccgaccgcggccgtttctccgaggagtgcaacgcaggtgggatgaggaagagggtgactctccaccgctttcgtagatccctcaacacaggaggcctcttctcgcgccgtcggaggagactgttcccgagcgacagagtgcctcccttcttcagagccttgctcctcagtctctgcctgcaatcggtgtcgcagcgcgcctgcccattcttcttccagaagcggagagacgcggtggagtgatgctggagacggagacgcgacatgagagaacggaccagcgcgttgcgagccgcgagtcttttcgtcctgtgagggagacggatggaacgagttggggagtccgctgccgcctggggccgcgtccgacagcagtgagagaggaaaagcttgcgtgtagaaaaaatctacaagagaggacgaattgcctggctcgacaggcagcgcgacacagcctccagaggacggagcacgattcgcctccatcgtcacgaacgacagacgctcactcaactgtctgcggtcgttctgcgcaggcgtctcgaggtccgcatgctgtgttctctcccgacagcagactcctcgcagtctgcagggcgcgagggaggaaatgcgaggcaggcggtcaagcggcgagacgcgaacgagaagtccaggaacaggagccgcctcccatggcggatccgcagcgttagccggtcagactcattggacgcgccgaacgtcgaggtgcatgcggcgtctccagagacggcagaacgagcgcaggagagagacttggatacgcccaggagacgaacaccccgcagaagcgagatgagggagcagagggagaacggaggagaggaaagaaagaaaacgagggatgaagaaagagaggagagagacgcgctctcaaatgccttacgtttctgagtgactgtcgaggatcggcacctggtaagaaagcgaacttttcttcaaaaacagagaaaagcctctcaaaaggtgagagacaatgaatacgacgcgagcgctcctcaggtataaaagacaggaaaaactacgcagaacgtccctggaaagtcgtacagagaaacgaccattcttgtcaatctcctcactcggctttcctccctgctcttcctcccttctcttctctctctagacatctctctgcctcatctgtcttcgtctacctcccttctctctgctcctctctccttctctccagttctctctccctcgccgtctctggacagctggtcctctgctgtgcttcctggaaacggagacagtgcttgtcgctgtgtatgagaaatccagaagagagagaaacgccgcggcactgcatgcgaagacgcgccgtctcgtggacctctcagcaagtgaagagccgcctgtcaggaagaggtccttcccctcgaaaagaaagttggtccaggaaaacgagaacttccttgcgtagtaaaatcctgacacgatcctgctgaggaggaacgagaagagctgtcgagacagccccggagcagaaaagacatggagggagaggccgcaaaagtttgcgttgtaggggacagaaacgaagagaaaatgcggtcgaattcctttaaaaagagaaacagagacacctgcagcaaagcgtcgtttctagaagagttctccgacaacaggagaacaagccggcagaaaaaaaagccagcgatccgcgctgagagaaaacatccaaaaggcatgcagttcgctccctggcagcagggcaggaaaaactcttgaaggatgaaataacggggagtttctttgatttcttctaacggtcctcaatccgaaacagaaatctgtctcacaaattcctctggagaaaatcatccaggctgtctctgccccccacccccgcccgcccaccctcgatgtcttgttctcttttctcagggtcacctcgccggtgtttttatcgtctttattttccatctgtcgattgttttgccaacctctcgcctccgacctccctcctgctctccagctttagtgtctttcgtctctctcctcccttctcgttgcagcgttccctctcgcctgctcttttctcccctcttctagcctgctccccggtgatccctcgatcgcttctctctcttcttctccctctccctcgttctctctgtcgttccttctgtctgtctgtgttggactcgctctctccccaagttttccctctcgctgtctctcaacgctttggtccacccttctctcttgctcacctacctcctatctcatatgcttctttcctccctctagcttgttctctccctttctactcttctccccctctcgtgtcatctctcttttcttctttctctcttcgctcccctctttcgtcttgtttccttatccttttctctctcgactgtttcctttctgcctgtctcttgttgtctctttctctccgtttctctccctcttttgctctccttgtgatttcctccgtttatgcgccgtccttctcgggggatctgccgagacggggcgcgagccgcctttctcccaaaaaagccaagaagatgccgagtcagatacactttcctgcaaacttttcacagcctccagagcagaaaacgcagccgcaagattcgcagtttttacatgaaattgccatacacccctgacaaccgttcggcctactctcctcgttacaaatccacaaacataatcacacatatatatttacatatatatatataaatacacggaagtgcagttgtgaacacgaatagacatgcaattaggcaaacgcgtatatatatatatatatatatatatatatatatttatttattcatacaaatctgccaacatatgtatccataaacagctgttagtggatgtgatttgtcggggtccctgaaaaacaggaatcggcatccgaatatatatatatatatatatatatatgcatatatatgtatgtatatacagatctgtttgtacacaactgttctgttgataagggtggcttcccgcattatattctctccttactaatatatgcgtgcatgttcttgttttttgtgggactaatttattcgcggacatatcgttgtccacttcatgaaagaagttgactttcgtcgaagctcatctggttgccgtcaggggactctcttctttcttcctcagcgtggatacaatgagagtccaccttgacttctgttcatctcggtccttctcacatctggacgccacagtaccgagattcgcatgcttcgctttttacgcgtttgcctgattctgagttctcgcagggcaggttgttggtttccaggctcctgcgtttgtctacatttccgtccagttgactagagtgacaccgtcgcgcccaccactgcttgccgtcacatctctgtccctctgcatctctctcgatttttcgtttctgctcgcactcaagagcgttcgcgaggtcgtttcactttccgtttgaggaacaaagggagcgaaaatcgaaaaaatcccttccgctgcttcaggtgcatgcagccgcggtgtctctcacggcctgtctccgagagaagaaaggctgtgtgttctcccgaggatctgttgcctcctcgttcacggttgaggctgagtcgagtcccctcacaaatgcattcttctcggaactgcgcgtttttcttctctgctactccgcatttgcgcgcggccccccgcccccccggcaagacactgcactcgcggccgttctctccctccaagggtgatggctttgcccagtgttcgttggcataccgctccacgacgttgacctttctgagatgaggcgcgctttgtcctcgagctttcttgttttgtcgacaaaaaaggcgagcaaaggaacttttgtagtcttctttttcccgcgggcagccgcagcaggagcgctctcctccttgtgaagctcgcgctgcatgcaccgggcgcgtgccgcgctatctgcgtctagcggtgcactcaagaacgcaaagcgtcctggtttctggcgaagaggagccgttgccttgtctttgggagcgaaacaagaagtcggaaaagagaagggaagctcgagagagcgccgaagaaaggcagacgcgccagagttctttcgtgtgtatgcatgcaaccaccaaggactaggcaagagacagatttccaccca

SEQ ID NO: 2150 - DNA, 2776 bp, Toxoplasma gondii
  source 1..2776: mol_type = genomic DNA
ttggattttctgctgatagcgactggtgacaatgcgctgaatctcgacgtcgacattgtcgcggccgtagatctcacgcagcagagcggtcgccttcgctctctgcttcttctcgaccatgtactgcggggtctcaaacgggaagacaaaccacagaagccagattgccagcaaactcacgaccgcaggcaaacccaacatgactcgccaccacgcttgctggaaggtgctcacttcgtacacctcgtctcctgccggtgcgttgccgaaagccagaccgagcagggtgccgaagaagattccgagcgtgatgaacagctgatgaaaggtgccaaaatagccacggcggtcatctggagtcacctctgacaggtacatcggaacgcaaaccgtgaacatgccgacggccacaccgacgacaagacgcgcaatcaaaagtgtggggaaaccctcagcagccgctgacaggatgcaacccagcgtgcagacacaatgggtgaaaatgagagatgcgcgtcgtccaaaatcggtcaatctgccaccgagaagacatcctacgcaagcgccgaggaaaactgcagtgttaatcagggagccgtatacgagaccagtgtcgcagtcggagtaatggcctccgttttcatctttgcaccatccgaagtcgaggataatgaacgccttcgaggtgttcaacgcagacaggttgaagccgaactgaaaagatccaagaaccgccaccatgaccaactgggcagctgttcccatgcaggaacacgccttagaggcgtaagattcgggtgggatatcccagagagattcagcctctctcttaaggcttttctcacgcatctcctccgtcgccatgatgaacgcgtccttcgaaacaagtcggggtctcgaagacgggtatactgctggaaacaacaggaaaaacaatgcacgtctctcggaaagaacgatccacttcctctcggacggctgatccccttgtatgcacacacccgcaaacaaactcgattgcccttgccccaaaacgtttgcgtgccaaggcacctggtgcagcacccagacccgggttgcgttatcctttcagagttccaacggggaacaacaccctgaatccacaatctaccggtgatgttttctgacgctgcgtcctggacagataacgtggcgtcatagctcgtccacgaaaaatcaaacccagttagcccgaccaccagttgaagaataaacaccggcaaaacgcggtggtgcgcttacagaacaactacagcccgacacgacctagtggaaaacgaatcgggaagcaaattgggaagtgggaaaccgctaattgaacttgatactgccacagagaaaaacaggggcgccataggtgggaaaaagtggcacgcgcgtccgagtacgttgtagtagttcgggaaatggatgcggccacccggaagaaacacccccacgaaactctgtagaacagtatgtgaccgccagctcgtggcccgacattcattcgacgtttgcttacctaatttgcaccttctcttgcctgcaggcaatgcagacctccaggtaaatttttgggtcgttgaaaaaaaaagcctgttacagaaagattccggggaaaatcagaagtgatgggacggtgaactcgaaccagggctgcggggtccgccccaccactgattgcccggggcgacgcattccggtggtcctgcggttcactggatgctggacgattatgttccccgccacccccgtcctaaaaggattttaaagctgaagccccacaactcgccttacgttccctacctcaccctttcttgcacttcggtttgtcttcgaggtcttgagggctcccagaaagcgatgcgtcttccgattggtgctaaatgcaagcagaccgctgacagcacgaaaatgctcgtgcggcgcaccaacagttcgagcgcggaaaggtccatccaagacgctgtcgttcctggataatacccttgtggagtcatggcaactgcactaattacagcgcttccgtgaactgtacactttcttatgcttgccttgccttttcaggcacatactctttgctggtcgcatagattctgtcttcgtactgttatgttaggaacctgtagctacgggatgggagaggacttacacagccggaggtgtaccgagtccttgttcgatgtggcggtcgctaacattccgctgcacacagttgagcgaaaaccactggtactgctgtgcacttttgttgatggaaatacatcggtgacgggacacaagtttgggttgaactagtagagattcccagaaagccccctttggagtggcgctgcggctgttcagcgaaaccggaagctgcatgcggattggaccatacgcgtgcagcagttgggaggcggcacgtgagacagactcgagcaaatcaccgatcaaaaacacaatttatctggtagaagctagactcttcactgcagagtcgaattcacggccattcagtgcgacaggaactccacagcttcagtgttcactgtgtccaggattcggggtggacggtgtgcgccaccccgtgtccgtgagttaccttatcccttggcctttttctatctgcttgtcactgattgtagaactggtgaagggactacgaagccatggcttgttaacacaaattatacagcgtgaccgttgggtgcagtggcaccttgcgcacacctgcgtggacacgcgctgacttctattggaaatgacaggaaaggcgttgtcccagtcctaa

SEQ ID NO: 2151 - DNA, 4621 bp, Toxoplasma gondii
  source 1..4621: mol_type = genomic DNA
atctggaagttcttttctcggatccaaggtctgtctgactcggaagtgcgacagcattagttgtgcaagttcctaaaggtgcctccagtctctgacttccccgcacagccacaatgtatcgttttggaccagctacgctcatgccggagtgcttgaggccacatgtcactgccgctgtgagcagcgccctcgcgctctcgagatccgcgcattcaacgtgcatcacgaatggctcaactttgagatcaacagtcggttttccagagtgacgtgcaaccttgaatgtgtcgtgcctgggatatttcagtgcctcaggagctggctggtctcggtggtcaggaaatggagagctccctccctcggcgtcttcaccatttagagggcgacgcgtcgcatcgtgttttactttgctctgataatggctctcgtcgctacgaagtcgctgtacgatcacagccacttcagcttgttcaatcggcgagtgacttgcatagatgagcttcccgcccttctttgaattcccttcgggactctttggtccattttgaaagacgctgatcctcccgctgcaacagctggtagtgacgtaactcggattggtgttgataatggaacaaatccgcagcagatcacggtcaacggagcccttcagggacttgtccagtctggggggaaagaccagggattcagactcccccttgtctttgctctgaagtaatgccggctcgcgtgagtcagcaacagaagggtgttctgtctcatcaaacttctgcgacctcccggggccagtgactccctcggtaccggacatgctgccatcgaaatcgagaccggacaagatctgctttttcctgcgcaagaatgacgccatcgtgtcccccgccatttttccactgaaggcacagatggcccgttagaaatgccagccaagacagagtagcaaagttcagatgtccagtaagttcctagcatctagtaaaggacccctcatgccgataatttggcaagttgtggccgcatgctcccggaataaatgcacgcagaccttgcatttttttctgtgctcaaattccaccggaagtccatcctatcccaaataacttattgcagttgataagtaaaatgatggacacgtcgttgtgtttcgttgggggctgttatctttgccccaacaggttaccgcaagatgagttgagtctcgtgcatgcatatcggcacgcagcgttctatgttgaggctggctgacgtgcatgcggcgtcgccggcccacccgcgctcccctacgaaacaagcctcgatgacctcgcaccgatttctgtctcagtccgtttctaaaactccacactcaacgtatcccgctcaacactgacaagctggtaagcgagaacagttttcacgtctggctagctgggcaggttacaagcagagccagctgaataaatcggggtgtctgtacaggcggcgcccataccaaacatagaatagatggtggttccaccgccatgtctaataggaactccgccatgttatcattccatctaatcaaagcaagtggatcattccccataggagttcgttcagaacctgaaagcccagtcactcggggtctcacatggttatggggccggcagcaaggatgtcgaatgcagttgagaccaatcaaaccttgctggtcatcatcagatctctggaagcagatcttcgtggagttcgagacgagctcaggcaaatcctgacggtcggcacaaaccactgaacagatgagctaaggtttcatgttcttctgtacacaggtgctgaaagacttcctgtatttggccgatgaaaggaagcagaaggaatctcatagcccgggataccttccaccacagaggaggactctggttatgggagaagggccagagctgaacagcggggtaccggcgacaacacgagtgcccgacagggtatgcttgacgacgtcacatcccttacaacaatgggttagtgcttccgtttgcaggtcagtcctgcatctggtagatcgtctgtgcaactcggccgattgcatcccagaggttcgaacaacgcaagcgtcgttgaacgatccgtatttaagcctgtggattgcaccagcgctggtaaaatcctcgtcccagtacgacaacacgaagacttcccaacgattttttgctccccctgcatctgttaagcggtacatacagtgaccgtttggtccggaacggattttgcaacagtgttgccacagagcgaatacatggatggcgccacgtcgtatcaactacttggactgctcaaacagggggcatgacgtgccccacacccgagacagcaacgtaacagcagacgcggaaaagaatgacgagaaggcacgtcacaacccaaaatgcctctgcagtgacccgctgacgaaccagtttcaggaagttcagcgactgaacgagggaaagacgcggtgcgcggcaggggccggtgggaacggggagcggaagcaggtgactttgcccaccttcgccagttatttcgcgggtctcacgaattcgtgtttcccttgtcgatagagtcaaacacgcgcttcggacaagctttattgttttggagggtccagcgtgaaactagaaaaagcatcgttcaagaggcagtgcaggattacagcccactccgccacggaattacatgcttcgatacccgtcaacgaagaggaccctgagcagaatgatatttgtaatttggtaagcgtcattccacctgcatcgattcgtggctcaaaatgaggcgagcattgtttttgcgtagtgccttatgcacaagaaagattctctgcacccgggacctcctgtacttttcactctcgaatgtggtaaggtagaatgacgttgcctcaaagacaacttgttgcaccttcaacaaactcagggcacgaatatcatttggcatggtaagtcaatgcctagatggaatgcggctagttcctcctaatgatcgtgagatcaatagtttatcagagtgtgtgtctaggagggagtgcagaaaagactgtcccatctgcaccaaaccagtcgaggaggatgacatcagaaagatattgaccaagagaaaacttctcaaaagaggcatgcaaatgcagcagaagcagctcgcacgggctgtagcggaagctgttgtctgacaactctgctctgaatgcaacgggcgaagcctgtgtactgtgttttctgctttcggactcgtgtttgtaaatataaaagagatgtgtgagatgccggtcgctgtgggcaccctgcacgtattattaactgggctatgttcgccctaagaatctgctttagactggaatgaattgcttaaaggcagtcttgatgacaatctacaggttgctccccgatttgcgaccacatctcgcagtgccacgcgaactacccagttgcatttcagcataatcggaacctcaaacccacctctctcgcatgccgttccaattcttcatttccacatttcaataactaattaagctgccttactcgaagtacaagtggatggacacatgcaaatggtctgagggacaatcctccagacgtgaacaaatgtgacagaatgtctgtcatcttgcaacctgtttgataatccgagcatgagcaagccgggaggaaggcaagaaaacagcctggaacaacgttcatcgaccgttgacgcgcgagctcctgagtacggaattgagaaaattgtggcaggaaccacgtcggaacattttttacaaagtttaccgcgttgcttgctggtttactcttattggcccaattttttatggccacagtcaaacggaggaggcaaaagcatgacttgcaccgttgttcttctgctgttttgactcatgctgaagagcttaaagcaagtgtccctgtcaaaaaggggaagatcttggatagcggtgttgaggaagtcaagctttactcgaaggttggtgtaaattgacaaaatgacctcggtgccactccgcccaattgcacagccatacgactgtatgccgccggagacagccgtagccgtctgtgctggcttgagtgaaacataattttggtgatcagtatggtgccaactgactacctgagactgagaacacgagtcatgttggactttcgtgaaactacgcctccgccactctgcaaaaagctgccaccgctagtgtggtaagcttggacggcttgcctggacacagctgatgttaacatatccactgttcatacacagaaacaagagttctgagttcgtaacagcttcgtcgaactcgattttgcatagccggcatcaccctcccccccgtccccgtggccgcccccctgaaggcgccgtacttgacctgttgcagcgtcacacccccctgcgggtactgacaacaccagaatatgggagggactttgcgacactagttatagcgatacgcagtggcttccttttaaacacgcaggaaaacgtatgttttcgtgtttctgacgtgcctagattcctctgtatcacaacgagttaatattatagagaagcaggggcaggaccacagatcgtccacccaacagtcggccaccgagctgtatacgcgtgacttcggtcgtcttcagtcaatgca

SEQ ID NO: 2152 - DNA, 2031 bp, Toxoplasma gondii
  source 1..2031: mol_type = genomic DNA
ttcagctctttcggacatctccacatacacagagtcgctacacaatctgtccacacaaatgtttctgttttgctaaaaaaacttctaattgagtgcagttgtatgcagactgcgtaggtgtcagcacagggaagggcatgccttagccacgagcagactcaacgtctttcttctgtgactgcacttttttctttcactttgttttttctcacacctttttttcgatccagagcacttctcggagacgttacatgcggtcgaaaggaacaacacagggaaaacaacccaaatcgacatttcttccgatttcaccctgtgatgactcaggcgccacagaccttggtcttcactcggccggcctgatcttcttcctcctgttctcctctttctttgttcactctttcttccatgtgggggttcactctttctttcacctgcagctctccctttcttctatctggcttctctcttttgtttctcatgttgctcttgtcctcgttctgttgacctcgcccttccgtctctgatctccccctcttctttctcatgttctctgtctgtccttgatctttgtctctagatgccttctcagcttgtgtgtgtgtatagtggcgaagaagcgcccgtgtcgatcgagaagatacgtattggctctgcttctgagaagaacgatactgttgtttcgtatctccctctccctgcgagacgccttctctgctgttgctcttcttcgactaggacagactgaccatctttcgcgctgttcttctcccgacagacctctttttctccgctcatcctcctctccgcgacttcagtggtacacaggggaagcctgcaggggtgtacgtcctccccagccgtgctcccctctccgtaaaccatctctcgtcgcatgaacagcggaaggatactctttcgctttggagagcggtctttcctttctctctttcctcttccatcatcgcttctgtcttctgtcgcaccggattcctggggaggaaaaccgtctaccgccacgagcagcagcatcgtgtgtctggtctgttgtctcctgcgtcgtcttgtgtgaatccttcgactccggattccccccgtttgtgccgtcgagaacttgagtttctgagactcttttacaagacgtgtatctcttttcgagcgcgttgtgccggcgcgcgggtcggacgctttcgggagcgtttttatctacgctgcgtttttgcgcgtgttgtctttcgaggaggcccgcgagactgcatgcggtgggcgaactgtgtttcctgactttcctgcacattgcgtttccattttctcgcggcagaaacgtcgcactttgctgcgccgacacaactccgcgtttccgatttgaacgcccagtctctcttctcgcctgtctgtacaccccgtccgaagaagccatccacggggctctctcctctcctgcgaagaagagaagaagaggacgtcttgctcgtagcactcttcttctcttcttctcttttcttttctctccttttcttttctctccttttctttctctccttttcttttctcttctgctcgctcagttgctggtcttcgattttcggtggacatgtgacgagacactgagggtgacgctcatcccgaaatcctctgtctttcggcggtggaaagacactttgaaacccagggagggtcgagattcaggatttttcgaccaagttcctcttgcacggtttcccccagctttctgcttcagtgctctcttcagttgtggagacttacgcggtgcgaaggcgacgcggctcgaactgttttctcgcgtttccaggaaggagtcgcccgagccgctgcccggttttccggaagacgtcgccgtccttgtcctctccttcttcctctcttctctttcaactatgtttggtgtcgactctgctttactcctccgcctttgagtgctccaggttccgctgcgcttgtgtttctctcgcggctctcgtcctcttcctcgccgtcgcttggacgctcttcccctccactctttcaaga

SEQ ID NO: 2153 - DNA, 4982 bp, Toxoplasma gondii
  source 1..4982: mol_type = genomic DNA
cagtaattttcctttttgcaggccggtgacgcaacgcatgacgtgcacatcagaccgcagagcagcaaaggagacgtggagagtcaagcggatttaatcaagtgattactcagtgaaatcgctgctctggtggcgcgatgctggcaagaatccgataccgtatcctgggggttatgcggagcgggttgactgaaagggcatagtgaagtgtgtgagcgtctcctgaggggagatacactctttgaaaagggcgttctggaagcattacaggttttggctgggtaggccgcttcgcaggcaccacgttagactgtgtcgtcggcacgagcacaatagaggcttccacctagcgttttgttcagcggtgcttgacacgggcttatgttactggggtagagaacctcagcaggcgtattttgatagcatttcgttcgaaggggctacatcagcatttgatggattccccctaccatatgtgactaagcgcgttttccgtgatccgcacacccttctcatctcgtggaacttagcgggcgggggggggggcgtggatgtcctctgcatgcaagagtgtctttggaggctgttcttatttcaatatgttctctggtgatcttccatacgtgaggtggaagaaaagagttagcaaagcagagagcggcaaagaatggctggtccgcgcgtgctgactgctgttgaacttgatgtgaacaactgggtgtcggaaaatgtcatcaaggctgggagcgtcagcagcaatagtgatctcgaatgacgagcagtggggtgcttgacgggtttccataggacacgtacccgacttgccgacacctgaggggattgtgctagggaagtgagaacagtagcgggcattgtagctgggtagcattctttgtggagctgccatacactcaggatagccatatagcatacaataggcacctttccagaaaaatatactgtttcccccgtaagtctcactgtagcctttttcgcttcgcagaaggggtggcgactttgacagttcgttgctcaacgaatcgcgggtacgggttaagtgctgctcgagggaagactcagtttctggatagtgtgtaataactacagccttttcttgggaaaacattcatcaagaaccacattctaccagaaactttgtgcgtgaggttgcagcgtttatcggccgcagtcgcagtgctagatgggggggccggacgcgcagctcctagcaggcagttgtgctgcagaacttccagtgtacgaggggtttaagcttgtagaactccgaagagacacactcccccacagcacgtccttttacgtcagtgtgtcatttcttgatttttcgccaattgtcgaatgagtgcatatgttcactctccagtgtgacgtacctgtggcgtgggccccccgcgacaacggccgccgcagagcggacggtggtccacaggaacggcacccgatgggcgcctggtcccgtgacgaaagaatgcgcttccaaacgcgaataataaccaaatttcgaaagcatttttgaaaccccaccgcagtactctgtgataaatctcaagatctggcgtcgaacctacgcagtacagcatgccttttattttgtgctcttctgatgtcgtgaagcatcgattgaggtgtcggcagtacagcctgtgctttgattcgcggttacggcgggcggaagcagcgcggccgcgcacggggttcacacaacagtttgtctgcttctcatttggcgtgttgcagcgcctgctttgtttcgtttgtcttcttaagaatgtctacacggacaacacccacagggcggtctgagactttgccaactcaaaaaagtcaacacctttgtgagcgcgccaacgaacggcaatcggtggaaggggccattttcggttggagctgtgcgagggaagtggggacggtgtgcgcgagtgcagaagccgcatgcgctgcgtttgtttgtcacaaaggccacgaagcgaccacgttcgaacaccccacccaccgtagttcacccgatcaagaaatgtctcggccggtgcggacacttctccctcatggtctttcccctcacggatgtttgacgcacacaacacgagttggtacgccagcgacctgcgcgtcacttttttgtcccaaacatccacgtctttggaagagcgtttactttctcagtatctggtttctgtgtgccgtctttgttcctatcaccgtgggagcagtacgatacactaaacatccgacgcgtctccgaccgggatctttaccgtgtgttgctttttgtttatattcttcaagactttccacaatgccaaacccacgcgtgttcttcgacatcagcattgacaagaagcctgcgggccgcattgaattcgagctgttcgccgatgttgttcccaaaacggcagaaaacttccgtgctctgtgcactggcgagaagggtacaggtcgcagcggaaagccgctatactacaagggatgccccttccacagaatcattccgcagtttatgtgccaaggaggtgacttcacccgcatgaatggaactggtggcgagtctatttacggtgaaaagtttgcggatgagaacttcagctacaagcactccgagcccttcctcttgtctatggcgaatgctggacccaacaccaacggctctcagtttttcattacaactgtgccctgcccctggttggacggcaagcacgttgtttttgggaaggttgttgctggacaggaggttgtgaaaatgatggaggcagagggccgttccaatggtcaacccaagtgtgctgttgaaatttcgtcatgcggtcagctctcgtaatcatatcacgtgtatgcatgagttacctatagctggttcggtgtatgtgagctagctgctggtgacaagcactcgttcaacaagaagagactgttgaacacgtggatgctgtgtggtgagtttggtggtgcgtcgattgtgaggcgcttgctgcgcatcggttgtcaagactagcaaaacccagtctatccccggatctatgtcattcctcgcatgtaagatacaacggcggctttcggaaaagcttttttgctttccacatgccgttactccaagcagcgggccagcagcacaccgccactacatcgtcagaaacagcaaacgcaccgccccatatagttttgaattgatgtaataggctagttcaacccgttaagaaggccactcgtatgctgtcggagaggctaagcgcatcacggaataaccgtctcacgggtgggcagcacacagggtcctgtgctgttgttgttcacggccacaacgacatagcggtaagtcgcttagagaaagtatttcgaagtggcagacctggcactgaaacacaggtaggaagaagtgtgtctcgtagaagctttgttaggggcgccccttgttcgcggtttgccaagaaagtggaagcgcatctcctggaaggtagtcgcgcgttctgagttgggacgcaagtagggtggtagtttctcgtggccgacaggattatgtctactagcttcagtgacaagtgcagggttatcccaggagatgtcgctgttaaaggtcgattcatcgaaaatgcactttttgggatgcacacggtctcatcattcaggtgttgtacactgctccgcacctgcgtagcataacaccagtacattttgtgatgctggatcacgaccagtttactggcattccgcagtaggtcaactgcagtagccaatattttcatggatataatatgaatagcacccctcgagatgccttgggcgctggtaagaattgtggcgctggtacatccggttcctcgtgtaaacgatgcgagcatccacctctgtttagggtggctgacccaggctgtttgcgcatcttgcaaacggcaggccacacggagttgatgctcgcactcatctcactagaacttgtttatggcgtgagttttagactgcacaacaccagtggatgagtgactgatttggaccaggctcaacctcagcgtcgatgttatggagcagtgacatttatctgcagcagtttcacttgctgcgtcgccttcctagctaaaaagaatcacagcaattaagagtcacgagaaactgccacttcagctcgacaaggcatggtttgaagcacacgtcaggtgacgtcttgcgcgtgtgggcgtgtcgtcccgagcttctgttcgcgcatgcctgcatactgtcggctagctggaaagtaaaaaagtgcctcgcgaaaagggtgccgttttctgtggattgggaacgccatgtttgcatatctaatacatgtctatctttgccaagcaaccaacaacagcatatctgttgttcgttcagtgacggttcctttttaaatccccgtgacggcgttgaaactggttccttgtcttgccctactgctcggtgaccgcacgctcgcggattttcggtaagactgcgtttttcggtttgcgcagtttcccattttgaatgtgtagatgactgaggactttatgtattgtgctgcgaatgcgaacgttattatccatcgagaattgacgcacaacaccctgcattcagcgccttctctctggttttcgcagcaccgcccaactcgtccttgtggcccgtcctccactttcgtgggtgcccatcccatggcactatgccacacgccattttcccgcggctcactgtgtttcgatctttgagtgaagatgtgttgctcgcatacaaataattgggcaagcagtgaagaatgctcaacaagttcgtggcaatccacgaaaaatacggggagctgatgtgacttgcaaaggggtgtgcgttcacggcaaccagtttttgcgcaattaggggtcccaagaagatcgctacctcatcttatcaacgcaagtccttcgtgaatgtggtgaggtgggctttgacttaacggttgtagaggtgtttagggtgccaggcgcataactccataa

SEQ ID NO: 2154 - DNA, 2200 bp, Toxoplasma gondii
  source 1..2200: mol_type = genomic DNA
cgtgtgagagtgttggcgaggctatggaattctgcgaattcaaacaggggggttgtctgggacacgacagtacttccttcaaagaagaaaagacgccgcaagacaaaacctcgagtggaaagagcgaacaggcgacagcgcgagctgcagcagacgcgatcggtgccgagtttacacgaaatattcgcacaaccatgaatgtgccaaatgctcaccttcgccctcactggcaggtccagaactgaagaaatgttgatgcacacatttgtggagacatcgttcggctgcgacacttgcaggtttttcaccagaaggcgccttcacagcaccaaagagcacactgtgacgtgctttgaggaacggctagaggctccctgtttccgtgcagtggtcaaaaacaaaggttatgctttttcagtccgcggcaccccactttccgttggttgtcagtatgacgtatacaagggggcagcaagatacgccctgcggacacaggccgatacttccgcatgtttccatgtaacttttaaagaccgagatgtggaagcacctgactgcatgtggagttcaaagacaacccagtaaatctaaagatgacgaagcaaagtcgcggtaccagaacttgcgccgccgaggcaccgctttttcatcgtttgcgaacgacaaattttgccatatttggggacctaaatgctgcaagcgggcttccatgggtttaatagattgaagcaacttcctatgcgaacactgtttgtttagccacccatttccgtacgtaagggtgagaaccacaaaaagcggttggagcaaatcacggtggcaccgatatgtttgttgtctataatccaggtgtacgaatctgacacgtcgtcagcgaaaattcagcagtggctgctgtcgaaggtgtcatacgatgcagtcgccgttgtgcagtgacagggattcgtttctctacggcagtggtggctggtccgtgaattcttcctccgcgatttactttcgaatcacacattccgtgactggcactcttttgcattcatccacgaacatattcgggcgttctcggtcagaaacggatctctcagcacgcgctcttcaacccgcagaaagtaaggggtgtttctgatgcggcatctgctttgaaacagtccatgtgtgttcggattggaaggattcctgaccctcttgagtgacagaaggtcaaagtgagaagaaacttgacggccgaatctcccccaaggacttgaccggatctattactgtggttgagttttcaccgatacaaaaaagagagcggagctcgtgtctttcgctcgagcacttttttttcgagaccactgtaaattattttgcgcctaaagtcacactcgtgtggtcgtcgcctaccggtggagaaccccacatcatcagcagtttttgcagtgaatctacaatcgtgttgcttcagctgactgacaagatcgaagcgggccggcatgtctccctgtttgcagacatcagcggatgtgctttgtgccgttcgatcacagaccaaaacaccggtcggcacacgcccaggtacagtgtcttcgtgtacaacggcactttcctgtgagttcgttactgtgtttcttgcgattgaatacatcgtcaccatcccagaagctcttgattttaagttggtgttcagagtggaccttttccgagacgcagttctggcttcaattaagtggcctcgccgtttagagcacgggttgacaacgcagtcgggagtacccactgcctccgacctgtacaaagtgtgggcacgtgatttcgcggtggtttgtagcgcttcgctgagcgctgagtgttgcgttgacgcaaactgccgcaaagaaagattcgtcactcatgccagacgaagggaccgtgtgaccgctcagtcgcgcttatggtcggggagcggtctcgagttcgaagggacggtgttatttctcccctcgctgcatgtcctgaccacgaaattcgcgcgcgcgcgagacagagagggtgggcgttagaccgcccggcacccgaccctaatcggtgctggatgctgaactgtatgtacactcgccctgacgggggttctgcgctcttcgacgggtgtgggctgggactccatcactgtttgtttgttcgtgtgccagcgaaatagccttgacagaagagatttcctgccttttttcttcacagaaaa

SEQ ID NO: 2155 - DNA, 1700 bp, Toxoplasma gondii
  source 1..1700: mol_type = genomic DNA
ggaggcttattctccagtcatagctgtagtagttgttctattgtgggttccttgtgtttgtgaatgacatcaccaccagaaagttgtcccacgatacggttgtccctaggcgaggagcgctgaccaggtggtggtcatggaaaacgactacagaaggctattttgtaatctcagctctgcaaggacagcgcaagtagtttacctatccacgttccattgattttgcagcgggtacttaacacgacaacatgtgtggaggtatagtccgtaaaacagcacatatttgtaagattgtggaggtagaattcgtcaaacagcacatacttgtagaacgaagagactcaaggtgacctaggatccttcttagcctcacacctgatagatgacacaaaatactgttgcagcttctattcgacgaactcctcatgaatccaccagatattcgcgacgtttcttcctgcatgggtattgtagcgacaggactgcacaatatgcgtcacaaagtggcagtcgccaaagactatcgatataggtggttcccgggtgctattactggttcgtgacggttccaacgggacccgctttgcatgaggaccgcttctgggacccacaacacactttccttcacatcgtgtttacctaaaagtttcacaaataacattatctttgcttttgaggatttagctgggccgacggctagaccctgatcaccttcacatccctccaatcgtactcaggctcaaatcttccttgatcgacttggcaggcacagcgtatcgggaacagccagctcgttataaaactctgattatccccaaagcatgtgcaagatgcagcgaaccacaaccctgttatgctggctgatgtgacgcttgctgtcacccggtttgattctgatcagagaacatgcgccaaactgccttcaggactcgcaaccgcttgctatgctcagtggcaatcactcaagcagtcgtggccgttcactccgaacaataactcgatcttcattcggtagcaacagagcacacttccaggaaaaacttgtgctaaaagcaacccggtaaatttgtacaaggtcaggctcgagtcaccctgcaatgaccccaaacagttccgacttgccacgcgtaggcaggattcggcgactttgtttttcgattaaaaggccaagtgacagcgcacagaactaccaaagaagcatcctttggcgaggctatccacagctacatcctaaaggaaaggcgtagcctaattatgagccgtgtcaactgtttgctgcacagggcgctggttttgtaatcccaggagaaacaccacccgtgtgttccttgacagactctggatttttatcggagacgaagaatatcgagaaggaaaggctgagctcaatcgttcccttgcctgcgcaacgtgtcttcgctggctgtaagcgccgcttccacgcggcagttactacactgcgttttcctaatgcggagtgactctttacttcgccgcgccgcggacgtgggaatccgtgcgtttgcgtttcttttttaagccggagggacgtgggtcacgacaatgcctctgggtctgttatgaaagttttcgtttttcaactatacgccgatgcttgtgactgcatgcggggctgctggggattttgcgggctgagtggcaggagggaggggcctgctgtttggttctcccgaggcgaa

SEQ ID NO: 2156 - DNA, 4700 bp, Toxoplasma gondii
  source 1..4700: mol_type = genomic DNA
caatgatcgcggaaatgccctgttgtaccagatccggcatttcgcttgagcgtctccggacagccagtccagcaggtggcgagcttgttgtcagcgagtggcgtatgcttttgaggttgacgttgcatgcggcctgggcggtccagtctgtggttttctggaaactaccaagttgcaaagcgttgtgttttgaagcgccaacgccttgacaccttgtgttggacctgtttcgttctggctcgctaggccgtccaccgtgggagcggcgaggggctgtaactgcactttttcccgctcacacagcgtcgtatttatcttcgcactttaagcagtgtgctcactgaagcgcgggtgcgtgaaataactctcgcgcgcgcaggcgaacgaatggtcgcgcgagacatcaagacaccttccacccacaccactcctctgagaaatcgggcagggtagcgtttaaaaaaccacagaacagttgagtactgtccgcactcaccaggcctaaaaagcgttcatccagttcctcaacaggtgtcaggcgaacaagaatccgacctgtagattccggtcagaccagcactggaacacaaggaaagagcatgtcgctgttcacacgtcaacagcattctgtctccctgtccacatgcatcgagaaactgactcgtccacatgccagaaccaaacaggcgtctgatgtacgaaagtctggtttctaagtgggaacctctggaagatgcgaccttccttgtggcgtctgctattcagggacacttggatgtacatcgagtgtcgtctccgcattcgccagttttcttgttgtagtttttcatcgttcggatgaaaggcttctttttcctcattcgggggcctcagcatcgctgaggaacacccctggctgggttcgcgtccaacagatggaaggcacctgcatcttgctgttctaaaagggtcgccgagccagacctccccaactagagggaaagatgaggtccttagacggtcagtttgtggttcgacacatggtggagggtaactggagatcactcacttactcaccactctcggaacaacagctgcgcttgcgtttgaggaaaattgcctaacgtttgtcgatttctcgtagcagcagccaagtggccaggggacccgttgccagacggaggacggtcgactacagaagtgggggtcacatacctgttgcagaactctatattgataccgcctccgcttaactcgtgaagcagtaatcgcttccgtttgcacggaactcaagtccacgtggcgtactaccaccgaaatcggcataccacgggttgaacgtaaacacactgcaagtcccgcgcactgcgaggcgttaccgtcaaaagattcctttcctttttctgtgatttgccgctgtaggagattgagcagttggcactcagcattcgtgagagtttactgacagaaagacccaacctcttgatttgatgaggccataagatctaacgcgtgtggcaatttcgcgtagctgatctctgggactggacggcggcgccgagtggagtgccacaaagttgtccattaacagagacagccgcgcgcactccaagcacattttcttgcagagagcggttctgtcgtaatactgctcagctgcaacgtacctaacgaggcgctatgaaccgggactgtcttcctgaaagaatacgtaattaaattagttcgctctcggttctatggtgtagcggttagcactgcggactctgaatccgccgacctgggttcaaatcccagtaggacctctcttggcgactggttgcatgcaaatcgcgttacttctgcatacgccgaccgcggctgaacactacagttgaaactcttggatgctacaactcagttgattctgtggctaccgccagctggtgcacttatcgtcgtcttccgctacgttcttctacggtggccttagcacagaccactggtccatctgcagtccgttctgtacgttctggaaggtgctttgcgtatacaatcctcagaacaggtcgatattgaaaattttcgatgacacacagtcgacaccgaggtagcgttgtcacgaagaatgaaacatgctaccacacggatacatctcaacgggagcgcacagggcgtgtgactcttgtattttcaccggcgaaagcgagacctcagaaagccagaggcagcgtggtcaagctagagcgaaggaaaagtgagtttgcatctgtttgtcactaagaaacattcgtcaaccggggggcagaccgagaccgtgtaaccatggcgcttattcgatgtcccaggaaagcggggattacacgcccgtggcctagacgaatttatcgcacgctacgttggcctgagactaatcgatggcaagatagaagaacatcggaagactctttgcgcttcaaagccggacggcgttgttgcctctcgtgaatcgtagcggcgggcggtagagcccaagaagccatggtgcacatatatatcgatgtgtagccagcaccgcagtcccgagcagcgatgactacgtacccaagtgagaaaacgggctattgacactccctggtagtcgagcaggtgaaaaggaaccgattttgtgtttctttcgggagcttgctgaagctggaagcgatatgtgtgactatgatgcgcggagccatctgacaccagtaggggcagtagagagacgccatctgcctgagacaatcaatcagggagaaagagaatagtgagacgcaaccctggcccccaaaatcagttttcgctagggactgagcgaacagaaaaggacattccccctctgagacgcaaagctcgatgtctgctaaaggctgtcatcccatgtagtctaggtggttaggatacccggctttcacccgggcgacccgggttcgagtcccggcgtgggaatcttttcgcaggcgatacatttgcgttccctttgcttaatttgctgttttgcagcattgcttttttcatttgtggagtcagctccgattcacggaggttcgaggctgcaatagagacccgttttcaggcggtgcacacgagtcagatcgatgatcagcctgtgccgcaatgacattcgtctggcatgctagtgtgatacgcccaaatttctcatgcactccgcttgacattcagggtcttttcttcgaacgtcgtgtttaccagtttgggtttcttgaaaacgtcagactttcacaacactcagttgatgccggtgggcttctccgtctttggcgagctccatccggaagggccgctacggtgctcagattacgaagaacaagcactacagcgatcaaactgtttgtcagacgtctcagacgttgttgacctgccccttttcgcttaagtggaacgatgtcaggtctttcgacaaagaggtactaaccgcctccgagtgtgcgtcaaggaaagcgtacttagagcaggcttgagccgcgttgtcaaccgtggaaagccacggtgtcccgtgtctcgagaattgcgatttttctgaaaaggaagtgaggctctcgagttcgcggtgcagctcctccgcggaatgcgattgtcaatcccctgaggaaagacgcgttccgcaagggatttccgcgtcgcggacgaccgacgacgcatgctcgcgaccttgtcttgtttctccgagagcggaagcaagttcgaagtgcggccgccgtgcgtgtttttgaacttggaagaagttcgagctttccttgacggtgtgtgctgaaacttctgcgtttttgttttgcacaaggcgcaaacaggggctagacacgaacgtgttccgtccgcgcgtttctctaaaacgaagaatccgttttgagaaagactcctcccatttttccgcggcgctgactcaagctcccgcgctcgctttgcggacctttttcgcagtccagcgcacagctgagaggggtggtgtttcccggcagtgcgcagtcgttttcccccctttttttcgcgaaaaaagcaggcgcggggccggtcgaaatctcgcggggaatttcttctttccgaactttccacttttcccgcgagaaacccgattcccagttgcgaaaacgggcaaatcgggggctccgtccagagcgtcgtctgggcgttccacccgcctgtggcagaacttcgcggaacgggcgtgtgtgtgttgcgagtaatttttttgctgcctgcatatactctccttgctgtctctttgctttcctagaattgcgccagccgccgacccagccgctgacccagctgccgacggtttcttccgcggactccttgctggacggcgtccctttctgggttgtgtgccctcgtcgagcgtatctctctccgcgtgtctctcttcaggatctttccgcgaactcacctcggaatctcgcgttcaggaaagatttcgaatctcttcgtcagtctcgcgacagcgagtcaactcccagggaccgtccattccggagcgtctcgatttcgctcagggtcgctcccgcgtccgttcgagcggcggcgacgcccgtcgtctgcgttgcttctcagcgttctcggtcagaagaagacggctcttttttccggcagaacagtgccttccgtgtagccttgtggacctctttgagatcctctcttgagggtcgattccgcactgcgtgagctagggtgcgaggcccagacaggctttttctcgttccgccttttta

SEQ ID NO: 2157 - DNA, 1992 bp, Toxoplasma gondii
  source 1..1992: mol_type = genomic DNA
aataattcgtttttccagagctgatgaggcgcaaagtgtcactagtcttgagacccagcctggaacctcttcgtcggcgcatgcgctgcgctgttgtgcttgttaagcctgctggtgtggtactggtactgttcttgttcttattcaaatcagtcgccatgtaaagcggcttattctgatgcgggcctgacaacctccgaaaacggtttcctctgaaaaggtacctgttctgcgagcatgcgtgcggaacagtgcgatacacgagcgtttatttagttgtgtgtctcatgtcgaccatatgtcgtttcagaagatggtttgtctaaaattatctaggagatgtcataagaataggactttgcaacataccaagtaaatgcgacagaacgaacaactgtccttcgaagggcatgctgatgtcatgggtggttcgcatttgaataaagaaacaaggcaggaccatagattccatgaaatacgcttaccctttgtgaatggaagccactagcgtgcatatctgaagcatacgggaaaatgtgggttctaacttgcaactgtcgaggttgtttctactgaaatgacgccttttatcgtatgcctgtcaatcgtctaagaagacaaatggaaatcaggcttcaagaatcttgcggcgtacatgccactttgcgtttgttgtttccatctttcgaagcacatttccgactagcatgtcggtggtcaaaaaaaacaatgacttacatctcgagttaaaggtgaaaccacggcgtagagtcttcaccttggacagaacttccgcagaaaatatgatatcgtgtcatgatcagtgcacaatgctgccttcggaattagccttaacataatgagtcgttttttaagtcgaaccgtgctgtgcatgcccgctctgctcagtaagtctgtctcaaacgaaacacacagtgagtcaccacatcgaacagcacgacgatcgaagcagactgcaactgcctggttcaagcctgcacagtcattttgagttcggttcgtaggaggtccacgaagcaagacgtaggggaaaagttgtacataaaaggaaaaaagggctactttttcatagagaagactatcgtaatagaggtatgagaatacatgccggcacacgcttgttcgatatgcgtgggggtcacagcggaagtacttgctttcccttgaagttttctatttatcagcggcaatcgtgccgagatcatatgcgtagttgaaagttatattcagctatctgaagtgggtgacacagctttacaatcttgacagctgaaaagaagtgttgtgactgtatcctggcctgcctgtctcaagggtaggccggtgtggagcacgctcgaacgttttgcacattcagctgccgtatccaacagccccgtatggttagtcattgttagtacgctctctctgtgtctaccgctgaaaatatcaagtgcgagaggctggcggatgctactttacaggatgaacgaagatgaatactggcaatatgcgcgatgtacgttttgtccaaaggtgtgagaacttcgccgggatgagacccatgcggcgtcgcaaaaactcgggaaacaatttctaaaagcgagaatcatgtttccacatgcgtttcagcaggcgaatgggagatatgatgtttccggaagcttcttcgccgctagggtttgttgtgtccccgctccgactgatgtgtctacgtgctcttttctgttctgtttcgagttcaataagtgtcacacacaatggtctcatggatttctatcaggcagcccgaagagcaatttttaggtggatccaacatatctcaaaaggcgtattagtcaattctgtacatattaaaccacgccgtggttttgtgtttctagctagctgaatttgctgaccgactggtggccccagtagtcttgtgagtatggttaaagttctgcatctcggcgcggtttgttgatgcatttcgtgcctgttctccagaaa

SEQ ID NO: 2158 - DNA, 1207 bp, Toxoplasma gondii
  source 1..1207: mol_type = genomic DNA
agacatgaagtgatgcacgaaggcgaaacccgagtaaaaatcagagaggacgaaagaggagagacaagcgggaaagggcaagaagatgtttacgaaggaagcgaagaggaggaagagacgaaagtgccccctccactttgtggagcactatgtccctgaggattcagatgaagtttcatttgccactgttgagtgttcgagaagtcgcgtctgtgcgtgatgattcagagggcgagtcccagctttcttgcgaaggatcacgcgacagcagtgcgggatccgtggaactgcgctagaaaacgtcccagccagagagagggtgtgaagcgacgccaggaaacacgacaaaaggaaacagcgaggacagacgaatgacgaaacgaaggaggcggtcgaagaaaagaaggaagggggaaacgcatccttttggaggagagagaatcgtggtaaaacgagacggagggagtggacgaaaggcgaagaatggaggccagaggattcgagagggaagtgccgaaggacagagtagaacgccgctaaagtgtgggcaagcagaacggaaaggtgaaactccaacaagagagaaggcccacggaacgagtctgtctgcattcagcgaggagcggagggcagacaagaaacgcaaaaggagcacctgggtagacaaaggcgggactaagttacctgcgcaccctttggcgacgctgtgcttgtcaaggacggaggcaatgcagagatgtgcgtgttctttgttctggtgatttgcggctgctcagagagaatcgaaacaatcgatgagaatcgacacaccttcagctgtatgatagcgcataggtctcttcaaacagatgcagcgcggctggacctaagagggaacgagtgcgctgctgcatgtgcgattcagtcttaatcggtatgaccgcgcttcccctttatcttccagcccgagaggcaaagttccgctccgctggcttgttctctctcttctcgctatcgtttcgtggggcctgtatcgcatgtctgctggctgcatgcgcttgtgtcgccggttgcatgctgcacggccgcgacagaattcgccgtgagacggctcctgaaacgaacggaggcctagcccttgtgtttttccgtcgccaaaactggatcatgtctcactgaccggtcggctctcccgtgcgcgcacgctgcggtatgcattcgtagcgga

SEQ ID NO: 2159 - DNA, 4344 bp, Toxoplasma gondii
  source 1..4344: mol_type = genomic DNA
atatgcgaacgggacgcatcgacgattagagtgtactcatacaagaagtgactgtcggctcggaattccgtttctccgtcatgtgaaaattttcggtaaaaggggaggccctcgagcgtcttgggtgaaccagaagcgcatggcggtgtgcagcggttggattccatctttttgcaaatacgacgcagtgccattccgcagttggaggaaaggagaaacgcagatgtgaggaagagcggcacggctcactcttgagcctctgttaactcgctaaacaagaagcgaactctagaacaaatgaagaccaagtgcgtgaacgtttcaggtatatacccttccggcacagaccgatctggcaacttacaacttactggcttatttccaccgtttgtgattttgttctagttcatttaatgatgctggtatcgcttattttgagcaagcctctcgcggttttacacagagtagtgacagcatttcggatattcacggcagcccgtcctcgaaaaagaagtttcgcctcttatgaaaaaagcgttcactgatgctttcagaaagctacagggaatcaggtgcaaacatggtagctggggatgttggttgtagtcgagttttagcgatatagaggcaaaggatcgcgggacggtcttcaatccccgatcggttatcatacagttgacagcaggtgtgtaggtaaagaacagcagacgctgaacgacggcaaagcagaagaacgtgttgaaatatataccgaaacgcttgcggagtcctcagcaggctccctaaatgtccgcatgcgtggatcgtcgaaaggattggtctagaacttgttcgtaaaatgcgaaactttctacattacctttgccccgacgagactctacgttcgctctgtggcgatacgactgtctagaaaaagccgctatgggacgtgagtgtttgtctgtgattccccaaggaggcaagtgactcggacttgtttcagcatgtacgaatggatcaggtccgtctgaacgtggttctcgtggcactcgtttccctgcagagcagctgtcctccctggagggtggataactatttgtcaatgaggctgtttgactcggccgaagctgcccttcagctacacaggtgtgttttcttgacagtgcgcaggcaaggcaacctgctggtgactgttgtgtgcctcgacgatctgttccatactttctaattcggctggctgaagaagctactatgccttcaccacacagatgtccaggaaaatggggtagactggcaaccctccctcgagcacgtttctctgaagccgcaccaccaacggtagcgctctgtgtctccctgccccgtccttgcggcacatcatcagtaccgcctttgtcagtcttgtcaagcggcgaatgtgtttgagaaccgctgttaccagggggcgacctggttttgtcactcgccctcttcaacccttccagctgggtgtcagaccgggtacgccggccacacgctggctgaggagcgccttcatctggagcgtgcatgcagtgatttctgcacgcgagccttggacagcctcgatcgtcaatgtacatgagacggacctgtgaactgctgcctgttcgtcctgcgcgattcggcgttggaaacctgtcgggaatctcccgtaacagctggttccaacccccctcgaccctttccggcgctctggaaggaagccgatctgactgccgcccagtgctcgattgtaaaacggatgttttcgcaagtttttccgaattggtcgtgctcgagacaaagtaagaagatgtagctccgtcgggggccaaagctggcttttttggtgccccatctgccggcttcggtgcgagattcgcaccagaatgaccttcttggtggtcgctgcgatggtctaccgtttcagcgatgggtgatgtaggtactttttgtggcaacgctcgcgtttggaaagaactgtcaatactggtggcaggcgagaggtcctgccccgtgatgattcgcgtcggcgaccgtgacgggatggatagtttctgcgtgctccacaaacctgcaagttgctgctgtctcgattcctgcacaatccatccgggggatttgaaaaactcttctgattctttgttcaagaagactgttcgcctgatggccgtttcatgagtttcgaagaggtcaagtatgcatggagggatgtcttgttgcggtcctgggcatgtgaaggttgcagtagctgtcgtgttcagcgttttccctccaaaagatgaccgttccccgccatcagagagcccgacacgttgcttcctggctcggggctgcgtccgtacgttgagcatacacttgctgtgtcccctggaaaacggtatctctgctgcagaggtcggtggatgagactgggaaggagagagaggaaaacccgtgtttttcgtcacagctacaaactctcccaggtcccgacttcccggcgactgttgcttagcactcgcagccctgccctgtttgtttcccactaaaaattgttgaaggttggagcttggcacaggagggcggacgcgtcctcgcttgccgccacttgcaagagttcttcgagattgtgatggggcatggatttttcgcggattggtcgtttttgcagaggcagtgcaactcaggaactctcgctccctccgtccagcctccaggtcaccgacgaacttgcctgctcctgcagtggccagcagcagagatgcttccttattatacaaacgcacccgagctttgcggaaacgggtattgatacgctgcagagtcctgaaacctttggcgatctcgtcctgtgtgccctctatcgtctccatttgaggaagcagtgatcgttgaagaagactggttgtagcgatgcctcctgtcacgtcgaatgaatagggaccgctaattcacaagaaaggcttaactgcggcacacagttactttcttgcttccctctttattcatgtctcggcctacctccacaaaactggagtgtcagcccgtggcacggacaaaggaactttttcttggtggtttgccttctattctgaggcccaattctcatttaccttctgtgcggtacccttgtccccgatctctgaaagaaatggcaccatctcatgaactggaaaagtgctggagagtcgacgttatcggaggtcgctggcgctgggcgtgtcttttgctgtcggcgaaggcttcagctataagatgggtttttatggacgtgtgatgctactgggtgacaagattagaaaaacagtttttctgtgcgtacgcgtagacgctgcgggggttctgcaaatggtgaccgttgcgcaggtgggcgttttctaccgaaggagagggtgattcgttttcacgcgttggcacaatgaccgcaacggctacgtatacaagttccgtgcacacacattttcagtatgttcgggcgtcgccagagactgtgcgatgcgctgtttccgagacactgaatgagggaactgtttccctcgctggaatcttctgccactaaagagaaacgagaagggtcctcacattttcgcaagcatttaccccagagcctacaaaacactctgctttgcgctgttgaaatacgagacaattcctctttcgagtacttgatgctttaaacccatcatggtgatggaagggcggctttggctgaaggcctaaatcgagacgcagttcgaactggtgtattaagttacaccccatgatgcttggatgagagaaagttcatcatccgatccgtggtttccacaagaccttctgggagtgtgtgtgcaccgtgatcgatgggctggtgccgagcacgccgtaccacgtagtccatcagcttaaagaaaagcgatggagcccggccccacatctagggctgcagccaacgaactggacaggaagttttgttgggagttgtgaaagaaaaagtcggtgatgaagagccgaaatggacctttcacagtagccgactgacgctgccttcactcttccgcttgagaaagtccccttggcaactgtgtgtaagcctgtagaaattttgaaagcatagccccctgttatctacaccgactctgcgcgaacgagggacggcatcatctggagccattccattttaaaaacatctggcaaaaggagctcgtgatccttccgttgcacagacgataaagccgcctttgcaatgcgccactgctggatacacaagccccaatacagctgtgtgaaagtatccagcgataatcctcgtgtcaagtggtagctgtaggcactcttggcgccttgctcccagccggtgtcatccgttgagttgttttttgctctgcgggaagattgacaaga
